United States Patent Application Publication US 2004/0034888 A1 - sequence listing, part 12

SEQ ID NO: 27342 - DNA, 2074 bp, Zea mays
  Clone ID: LIB4730-001-A6_FLI
ccgggcaagcattactatggtagaatctcatctgacgggtacgaggagatgctaggctcacggctagccacagttgtgcattgctcgagtgcatgaccactgaattgctcgagtgcatatatgatcggatcctccagtgatctgattgatgctcaaagaatccatgcactatgcaggtaggtggatcgatagctgggaggcattaaagcggacgatgacgccttggcctcgctgcaatcttgcagattgctgctgcagcgcttctttaagagccaaccatccacatataccttgcttgacgccaagccaccggcattgtcggcaccgtgccctccgctccgctcccttcctcttggttttcggttccttcctccctcaaccagtcatctgctgctatttatgccacagccactcccagcagcggtgggaacaaagagtgccagcgtctcacccctgaggccgcgcagagccactgcttgcgtctctgtctctctgtctgctcgtttttctccttctgcgactcgtaggagggtgaggtcttgcctcgcggaatggcggcgtccggggcatggctggcccgtgcgacggcgacggcggtgctgggtttcgtcctggcggtggcgtcagctgaggcggcatcgggggacgtggagatggtgttcctcaaggccgcggtggccaaaggcgcagtgtgcttggacggcagcccaccggtgtaccatttctctcccggctccggttctggcgccaataactgggtcgtccacatggagggaggagggtggtgcaggaatcctgatgagtgtgctgtccgcaagggcaacttcaggggctcctccaaatttatgaagccactctcgttttcagggatattaggcggcaaccaaaaatccaatcctgatttctacaactggaatagagtaaagatcagatactgtgatggttcatcatttactggtgacgttgaggctgtggacactgcgaaagatctccgttacagagggttcagagtctggcgtgccgtcatcgatgatctacttactgtgaggggaatgagcaaggcgcaaaatgctcttctttctggatgctcagccggaggtctagcagcaatactacactgtgacagattccatgatctgtttccagcgaaaacaaaggtcaagtgtttttctgatgctggatattttttcgatgggaaggatatctccgggaacttttacgctaggtcaatctataagagcgttgtgaatctacatggatcagccaaaaatttaccagcttcatgtacctcaaagccaaagcaatcacctgagctgtgtatgttcccacagtatgttgtcccgacaatgcgcacaccattgttcatacttaatgcagcctacgattcgtggcaggtcaagaacgtcctagcacctagtccagctgatccgaagaagacttgggcccaatgcaagcttgacatcaagagctgctccgccagccaactcacaaccttgcaaaatttcaggacagattttctggcagcactccctaaaacgcagtctgtaggcatgttcatcgactcatgcaatgctcactgccaatcaggatctcaagacacgtggctagccgatggttctcccacggttaacaagacgcaaattggcaaggcggtgggggactggtactacgatagggaggtccctcggcagattgattgcccgtatccctgcaacccaacttgcaagaaccgtgatgatgattgagcaattgtataagtagttcatgttatcgaaatgaaaacaataaaggatcacaacgcgcgcccgtagttgtagatgatgaattataaacacatatgactgagctcaaagttgtttaatcatcatctgttgcgaaatgaggaagacaattggtgtcttgaagctgtgttttcgactgtgtctaaagcgtaaatgtaacgtatattgtgtcttcgcctatgcttaagacattggactagttgattggtcaatttaatttattaaatgttttgattggtgtaatgaatataataagtcgtgcatgccgcatgactaggcttccagtcttccac

SEQ ID NO: 27343 - DNA, 1550 bp, Zea mays
  Clone ID: LIB4730-001-A8_FLI
ccggggatcggattcggtgggacggtggcatctatgcgcccgcggcaccgtcgctcaaactgtataaacctgcgctcgaacacttcgagctcacccgcaacctcctccgggaagcgcgatcgccatctcgaaggagctgagatccaagattccaagctcttctgtcacagctgtgctcacgcaacttcgtgttatttgttcgtagcaggttgagggaagttgaagcaaaaatgttttacgggggatatgcttaccatggcaactcgtttgagcaaacataccgttgttatccagcatcgttttttgataagccacacctggaaggcggtgataaagtaataatgccaccttctgcccttgatcgtcttgcttccttgcacatcgagtaccctatgctatttgagctgcacaatgatgcaacccaacggatttcacactgtggtgttttggagtttgttgcagaagaaggcatgatcatcatgccctattggatgatgcaaaacatgctgcttcaagagggtgacactgtccatgtcaaaaatgcgactcttcccaagggcacatatgtgaaattgcaacctcacacaactgattttctggatatttcaaacccgaaagccatcttggaaaagactttaagaaatttctcctgcttaaccacgggagacagcatcatggtagcctacaacaacaaacaatattatattgatattgttgaaacaaagcctgcttcagcagttagcattattgagacagactgtgaagtggactttgcacctcctcttgattataaagaacctgagaaactacgacaaccaacagttcttgcaagcaaggcacctgctgaagatggcaacactgcagcagaggatgaaccaaaattcaaaccatttactggttttggaaagcggttggatggaaaagcctcaaaactgcaagcatcagaggttccttccactgcactttctgcaccttcagattcaaacaaaagagcaaatcagcaaatctcagcaccggcagcttcaggagctagcagttacagtcgacagaaaactggaaaacttgtttttggttcaagtgcaagcaacaataaggaaccacaaaaggctcctgctaaagaggagcaacccgcaaagaaggacgacgagccgaggttccaagcgttcagcgggaagagctattcattgaaacgttagctgcttcagttaaccttgaaattcgccgctactctttcgtttgttgcatggtgggtgttctggcacctggtcaccaccatgtagatatgaattgaagtatgtatatgcttatcttgatggaaacatgacagtctgtttatttaagcccaaaagtttaaaacagcgctattgttcttacccagtgtgtgttttggaatctgctcctgttttgggggccatggtttcggattagtagacccaagcaggatagtgaacgtgtcagcaatcagtcttagcggcagacgagatgtgatgattgttgggccctgggagtttggtcatgttccaatattatagaccgtactccaagtctcc

SEQ ID NO: 27344 - DNA, 1217 bp, Zea mays
  Clone ID: LIB4730-001-G2_FLI
ctcgaggccggccgggacccaagctgaaagcatcacactcgcagttgcagagttccgcttcatcagtcccacactctccccttcctccccccagtcctgagcttcgccgaggcatacggacaataccggcaccggcagcgagcagtcgggagccatggctccgcggctcctgctcttcctcctcctcctcctcccgctcctcgccgccggacaccagcacccgtcctcctacggctcctccgcgctttccgagtggcggcccgcgaaggcatcctactacgccgccgaccccgaagacgccatcggtggggcgtgcgggttcggggatctggggaagcacgggtacgggatggcgacggtggggctgagcacggcgctgttcgagcgcggcgcggcgtgcggcggctgctacgaggtcaagtgcgtcgaggatctcaagtactgcctccccggcacctccatagtcgtcacggcgaccaacttctgcgccccgaactacggccttcccgccgacgccggcggccactgcaacccgcccaaccatcatttcctcctccccatccagtcgtttgagaagattgcgctctggaaggccggcatcatgccaatccagtaccgccgtgttaagtgcctccgtgaaggtggtgtcaggttctctgtcaacggtcggcacttcttctttacagtcctaatcagcaacgttggtggcgcgggtgatgttagatctgtgaagattaaaggaacagagttgggatggctcccgatgggccgcaactggggccaggtgtggcacatcaactgtgacatgaggggacaacctctgtcgtttgagctcagctcgagcgatggcaagacactgaccagtttcaacgtcgtccccaaggattgggagtatggcaagacatacacggggaagcaatttcttctgtagagaatgagcgccacaagatcagcttacagtttctcattttttgttctgatcctacgagttgggctgtggtgtacattctctgcacttctgcagaacaagtaatatcattattaggagaaaattacttagtgcaaggcctcagatagttgctcttggtcataaatggttttccatgtccccttaatagttgtactaaagaggcttgatgtatcattcaaaatagaagcctccgttgtattacaatattttacctagcaagcaatgataatgtatttctgcatttctc

SEQ ID NO: 27345 - DNA, 1554 bp, Zea mays
  Clone ID: LIB4730-001-G9_FLI
acccatccgccgcttcgtcccaaatcccttttggcgggagacgagcagcaggctgcctccacttcccgcgcaaagcagtaaatcggagtaaccatggacggcggatcctccacaccggcgagccccccaccgacggtatccgcgtcggcggagaatatggaggagtaccggaactggaagaagaacgcggcggtgctttacgacctcgtcatctcccacccgctcgagtggccatcgctcaccgtgcagtggctcccatcggagtcctcggcccgcagccaccggctcgtcgtgggtacgcacacctccgacgaggcccccaacaacctcatggtcttggacgcggtgctaccgctcccacctcgcctcgctgcagccgtcgctgcctcgggcggcgccgtcccgttcccatccgtatccgtctcgcgcgtggcgccacaccgtggcgaggtcaaccgcgcgcgctgcatgccgcagcgtccctatacggtggccaccaaaacgtgcgtcgacgaggtgcacgtgtaccatctcggcgatgacgacggcagcgggaagagcggcgccgaagttgtgctcaaggggcatgaggcggagggttatggcttgtcatggagcccgatgaaggaggggtggctgctgagcggctcgtatgataagaagatttgcttgtgggacatctcctctgggagtggcgctcctgttctggatgcacaacaggtgtttgtggctcatgaggatctcgttgaagatgttgcttggcacctgaaggatgaacatatatttggatctgttggggatgactgtaagttgatgatgtgggacttgcgtacaaacaaaccagaacaatctattcttgcacatcgaaaggaggtcaactctttgtcattcaatccattcaatgaatggatattggctacagcatctggagacacaactatcaacctatttgacatgcgaaaactatcgagaagcttgcatacttttgacagtcatgaggcggaggtgtttcaggttgaatggaatccaaatttggccactgtattagcttcatctgccgcagacaagagagtgatgatatgggatattaataggattggcgatgagcagtcagaggaagacgcagacgacggaccaccggagctgctgttcgttcatggaggccacacagacaagatatcagagctgtcgtggaatcctagcgagaaatgggccattgccagcgtgtctgaagacaacatcctgcagatatgggagatggcagaaagcatatactgtgatgacctctccatgcaggttaactgactcgtgcctcgaagcataaaggtgagttacctgaccaatgatgcaagcgtatctggaggggttatatacctgtatgatttgagagatttcaatttcgctatttttgttcactgcagagtgggcatctataagaactctttaaattcgtgacatgcattaggctatctccagcagatcccctatcacatcctttatgttatcccctattttcaaacttctctctgcaaagagttagttattgacttgagc

SEQ ID NO: 27346 - DNA, 1715 bp, Zea mays
  Clone ID: LIB4730-002-F3_FLI
aaacaactttcccctccccggctccccacatcttgtctgccacagttccacctctccatttcgccgaggaagaaaaaggaaaaaaaaacacagaaggggttggagagaaacggatcaggggcggaaggttccagccctagcgcagcaatggcgggttggtgcgaggaggcggtggcgttgctgcagcgccccgcggcggcggagatggccgtcgacgtgctgctctgcgcggtgccgatctgggccgctgtcatgatcggcctcgtcgtgggctggtcctggcgcccgcgctggacggggctgctcttcctcggcctccgcacccgcctccgtatcatctggctcccgcccggcctcggggcccggcggctctggttcgcctgcactgcgctctccgcctgctccgtcgcgcccaggctcctctcctccgcattccgccgctgcagaggtaagcaacaggacaaggcctcccctgaggatactgctgctgtggctcgggacggcggaggttgcgccgatggcaggacaaattttgagggtgaacatgatactgtcactgagaaggacctagaacttctccttcaacttttagataataaggaaagcggggatacagcttggcagaatttgatggagcgtacaacctccaacatgacctacaaggcctggcggcgtgagcctgaggagggacctataatgtactgcagccgcactatttttgaggatgctacacctgaactggttagagattttttctgggatggtgattttcgtctaaagtgggatcccatgcttgcatactccaaatctttggatgagttccctcagaatggagcaacaattgtccactggataaaaaagttcccattcttttgcagtgaccgtgaatacatctttggaggacgcatatgggaatctgggaagacttactattgtgttacaaagggtgttccatatccatcattgcccaagaaagaaaaaccaaggcgtgtggagttgtacttctcaagttggcgtattagagctgttcaatcgcctaaacatgtgggtcagcaatctgcgtgcgaagtaactttggttcactatgaggacatgggcataccaaaggatgtagccagggttgctattcgccacggcatgtggggtgctgtgaagaaacttcagtctgggttcagagcgtaccagcaaatgagagacacagaaaataccctgtcacacagcgccattatggctcgaatgaccaccagggtatccatcaaggcttcgaatggtggcttagaccatgacctctccatcgccgataaaatcagtggcgagaatgacagctcccatgcagttcagcatggttttgactggaagtgggtggtgtttggtggtgcggtggctgcggtttgtgtgctcaacaccggactggtaggcaaggtcctgttgcttggagcagcgagacggcaggcaaagaagtgatgtgaggagcaaccttccagcctctgcagaaaggcattcgtcaggctgtagctacaaccgtacaggcaaaaagtattgaggaaataggtggggttcgacagatataattacgatgtgtaattttggattgtgcacttgtgcagtagatgtagcatgcttgctaccataacaaattccgctgtatcaggaatcgctggctaatactccgtatatctgaagatctaagaggtcactgcatgtttgcagctttc

SEQ ID NO: 27347 - DNA, 420 bp, Zea mays
  Clone ID: LIB4730-003-H9_FLI
aaaagggtgactccactgctccacccaaaaaaatggcggcggcgccggaggagctgctctgcgcggcggcgaagtccggtgaagatgtcgaagtcgctaaactccttgcttcaggagctgacgcgacccacttcgatgccgacggcttgacgccgctgatgcacgcgtccgcggggggcacgccgccgttgcgcgcctcctcctcgactgcggtgcgccctggaacgcgctctccccctcgggcctctcggcaggggacctagcctccgaccccgacacctacgacctcctcctcgaccacgccctccgctccgagctcgtcctgggcaccgtcgcgcggcggcaagcggcccccgcgaacggtcccccggccgagagctacctcgaatccagggtctcgttcagcgaggagagggtgat

SEQ ID NO: 27348 - DNA, 1755 bp, Zea mays
  Clone ID: LIB4730-004-A4_FLI
ctcgaggccggcccgggtaccgcaccacaccacaccacaccaggctcctcgacagtcgatagcctcccaagtcccaactcgacctgagccgattcggaaggacggtttgcctacctctggttccggcggccatggcggtggcggcccctggccagctcaacctcgacgaggccccgtcatggggctcccgcagcgtagactgcttcgagaagctcgagcagatcggcgagggcacctacgggcaagtgtacatggcgaaggagacgggcaccaacgagatcgtcgcgctcaagaagatccgcatggacaacgagcgcgaagggttcccgatcaccgccatacgcgagatcaaaatcctgaagaagcttcaccaccagaacgttatcaagctcaaggagatcgtcacctccccaggcccagagcgggacgagcaagggaagccaattgacggtaacaagtacaaggggagcatttacatggttttcgagtatatggaccatgatctcaccgggcttgctgatcggccaggaatgcggttcactgtgccgcagattaagtgttacatgaggcagctgcttacaggcctgcactattgtcatgtcaaccaagttctgcatcgagatatcaaaggatctaaccttttgatagacaatgagggtaacttgaagcttgctgattttggccttgcaagatcattctcgagtgatcacaatggcaaccttactaaccgtgtgatcactttgtggtatagacctccagagttgctacttggaagcacaaagtatggcccagccgttgacatgtggtcagtgggctgtatttttgcagaacttctcaatgggaagccaatattgcctggaaagaatgagccagagcagctgactaagatcttcgagctttgtggtacccctgatgacacaatctggcctggtgtcacaaaaatgccttggtacaacaacttcaagcctccccggccattaaagagacgagttaaagatttctttaagcattttgatcgacatgcactggatctgttagagaagatgttgactttagatccatcacagaggatatcagcaaaagatgcacttgatgcggaatatttctggactgatcccttaccatgcgatccaaaaagcttgcccaagtatgaggcatcgcatgaattccagactaagaaaaagcgtcagcaacagaggcaagcagaggaagctgcaaagcgtcaaaaacttaaccatcctccaccacattctcgtttgcctccactccagcagcctggccaagcacatcctcaaatgaggcctggccagggtatgcacaatgtgcctcctgtggcagccggcccaggccatcactatgcaaaaccccgaggaccaggaggccctaaccggtatcctcagggtgggaatcaagggggaggctacaatccgaaccgtggagggcagggtggtggctatggcagtggcccttatccccagcaagggcgagggcctccttaccctggagcagctggcccacggggcagcggtggcagtggctatggggctggagggccaaactaccaacagggtggcccatatggtacgtccggtccaggccgaggaccaaactactctcaaggtagtggttcccgcaaccaacagcagtatgggaactggcaataatgtggcagtattatgccattgatatgtatgtatttgcagaatgcatttgcagcacctttgcactttaagcatgttgtgagatgtatgtcat

SEQ ID NO: 27349 - DNA, 1336 bp, Zea mays
  Clone ID: LIB4730-004-B12_FLI
ccgggatgtccacctagaaaccctagttcgaacgcgccgccgtcaccgtcgtctctcgctcgcacgcgctctccgcccgtgagtactcccacggatcggagcgagagtaggggcgtgtcggcggtgaaagcgaccgcgtcagccatggcggacgaggagcattcggaaaggagagaggaggcctccgagcttgcccccttcgacccgaccaagaagaagaaaaagaagaaggttgtcatccaagaaccttctgatgaagtggacaagcttgcagagaagacagaaacactggcagtcgcagaacccgctgaacttaacttcactggaatgaagaagaaaaagaagaagccggtggatcttgattcaactcttgatgagcttggagatggggaagacactcaagatgatcaagctgtagaggaacaaggggaaggcattgtgctgggaagtgtccctacatacccttgggagggaactgaccgggattataaatatgaagagctgctggacagggtgttcaacattcttcgtgagaacaacccagatcttgctggggataggcgtaggaccgttatgaggccaccacaagttcttagggagggaacaaagaagacagtttttgttaactttatggatttgtgtaaaacgatgcataggcaacctgagcatgtgatgatgtttttacttgctgaaatgggaacaagcgggtcacttgatgggcagcaaaggttggtgatcaaaggaaggtttgcccccaaaaactttgaagcaatcctgaggagatacatcaatgagtatgtcatctgcaatggatgcaagagccctgataccattctgtccaaggaaaatcgtctgttcttccttcgctgcgaacagtgtggatcttcaaggtccgttgctccaatcaaaactggattcgttgctcaagtcggtcgtcggaaggcatgagcatctatatgtggatggtgttggggtcaataccaattcaacaatagttgattatttgttgactagagattctgcggcgcaatgttgagcaagatatatcaacgatgccctttgtctgcaatgttgagcaagatatatcaacgattcatctattgatgtcgcaagcctgtgacaactggcgagtgtgaatcctgatctacgactccctgcaatcataatcttgtgactgctggttagtgtcatatgcagtctgttaaacttgttgatgcggtcactaatacaagttcatcaaagattagtccgaatgccaaaattctgtcataaaatttgctttctctgtaatgtaacacaataaatctaaatgtttacttcattattcgatccttgg

SEQ ID NO: 27350 - DNA, 1105 bp, Zea mays
  Clone ID: LIB4730-004-C11_FLI
atcccggccattactcggccacgacttgccgactacgatgccagcgccaagcctccgccgcccagctaaaaatcccccaggcgttcctgagcacccgtttatcatcacatgaccggagtcggccagaatttgccgtagctctcgcccccgctcgccgtgcgcttctcgtcccattcccccgggatcgtagattctcgagctgagctgagctgagctgagctgagcgatggatcgcgagctcagccccaggggcaatgctccagggagagggagcggcggcgcgtcgtcatcgaagcacaagaacggcggcggcggcaagaagccgatcaaggtgctttacatcgccaaccccatgcgcgtccagaccagcgccgagggtttccgcgccctcgtgcaggagctcaccggccaacacgccgatccctccaagtacagccccggcgaccttgactccggcgctgccgcacagggtctgagccccagggccagggtcgcggacgtttcgtcggaaaccatcgtcgcaagccacagccctggcagtaaggccgcgccgcacggaggggactactacgacgtcgaggaagacgaagatgacgtcttcaggtcgcctcacatgctgctggagaacaattatacggtgttctcgccgccgacgctactatatgaccatcacccgcacagcaaggctacttctgaatcggaggctgggttcgcagcggagcatgacaatttctggtccaaatgaagctgaacaagttaatacgactatagctacgaatggtttcagtgaggagcatagcacaagacaacactggtacaagagactataagcatgaatacgaagatggctacgtacggcaatggtggtgaaggctacgacgaaaggattgcggcgatattacggttgatgaatggcatgatgtataattttcttgatggacaaaaggatatatacacctccgatctgttttgtccattgagcagcaatctatgtaatcttatgcctaatgaacaggctaaggatgttttagacacaactactctagttggcacaatgttggattcggaagggaaacattgtaaaacgttggttgcttccttgtgc

SEQ ID NO: 27351 - DNA, 1291 bp, Zea mays
  Clone ID: LIB4730-005-B11_FLI
ccgggatccgcggccgccgccgccgcgctgagtttgggccgggctctgttaatctgggcgactttgattttctctgctcccgctgccacggccgtcaggagtgaagcgatgctggagaaagaccggatatcctacttctacgacgagaccacacaaagcatatccaatagagcttgcccaattccattctgctgattatgtggaattcttgcaccggataactcctgattcccagcacctatatgcaagtgaactaactagatacaatcttggagaagactgtccggtctttgataatttgtttgagttctgccaaatctatgcgggaggaactttagggtaatgactgtgagtttccacaagtatggtgacctgttctttcctggaacaggtgatattaaggatataggagaaagggaaggaaaatattatgccatcaacattccacttaaagatgggatagatgacactagctttactcggctttttaaaacaattattgccaaagttgttgagacatatctgcctggtgctattgttcttcaatgtggggctgattcattggcgagggatcgtttaggctgcttcaatctctctattgaaggccatgctgaatgtgtaaagtttgtcaagaaattcaatattccccttctggtaactggaggtggtggatacaccaaggagaatgtagcacggtgttgggctgttgaaactggggtccttttagacacagaactcccaaatgagattccaaaaaaatgaatgtattgagtactttgctccagattatacattgaaagttccaaatttgaacatggacaatttgaacagtaagacctatctcagttcaatcaaagtgcaagtgatggagagtttgcggtacatacagcatgctcctggtgttcaaatgcaagaggttcctcccgatttttatatcccggactttgatgaagatgaattggatcctgatgaacgtgttgaccagcacactcaagacaagcagattcaccgtgatgatgagtactatgaaggtgacaatgacaacgatcacgacgacggcacacgctaatctgcttcttctgaggccctggtgtaaatggaaacctgagattcttcactgttgtgtgtagttcagcagccttgagatgtaatagtttgtcagttgacagcagggatctaatttagcaggtcaaagtggtttagacttttataagggattctgacccctcctgaattacacattgtagtacaagtctgcatatttttaagcatgcaaaaattcaaatttctc

SEQ ID NO: 27352 - DNA, 1956 bp, Zea mays
  Clone ID: LIB4730-005-B3_FLI
accagccattgtccctccggccctcgcgagtcgcgacctccactgcaaccgcaccgccatgatgaaaccgccggcaccggcggttccgtcgcctgaaccgccgcgcctcgccggcggtgggcgtgggccgcgcggcctccgatccctgcccgcgctctcctataacacccaccgcgccctcgtcctggggctcaccttcctggcctacgcgctctaccacgcctcccgtaagccgcccagcatcgtcaagcgcgagctcgcccggtcgtggccgcccttcgccgacccggcgctcctcggcgccacggacgtcgccttcctcacctcctattccctcggcatgttcgtcgccggccacctcggcgactgcctcgacctccgccgcttccttgccttcggcatggtcaccagcggcgccgcggtggcgctcttcggcgctgggtacttcctaggtcagcattcgctcgcgttctacgtcgtcgcccaggtgattgcgggcctgctccagtccacgggctggccctccgtcgtcgccattgtgggcaactggttcagcggccggaggcgtggcctcatcatgggcatatggaacgcgcacacctcggtggggaacatcaccggatcgcttgtcgccgcagccatgcttgggtacgggtggggatggtcgttcgtggttcccggtggtctcattgcgctcggtggcgtcctcgtgctgttcttcctcgcgccatacccccagtacgtcggcttcggcccgtcgccgattgaagaacctgtcactgacgagagcaccgacggggaggacattagtgccgcagatggcgctgggaaggacagacgggatgccgtcggaatttttaaggcactggccattcccggtgtcgtcatcttcgcgctctgtctcttcttcgccaaactagttgcatacacttttctgtactggctcccattctacttgagccagactgctattggagacgagcatatgtcagctgcatctgcaggatatctatcagttttgtttgatgtaggtggaatagttgggggagttctggccggcttcatatctgaccagcttaatgctagggcaaccactgctgcagttttcatgtacttggcgattccatctcttttcctctttcatgcatatggtagtacctcaaaagcgacaaacattggcttgatgatgatcagtggcctgtttgttaatggaccctatgctctcataacaaccgctgtttctgctgatttgggaactcacaaatctcttaaaggagattctcgcgcattggccacggtaactgcaattatagatgggacaggatctcttggtgctgcattaggaccattcataacaggcctcatttcaagaaaaggatgggatttagtattcacaatgcttgcactctgcgcactggttgctgctgtgcttttatcaagtcatgtgaaaacagaaattcctcagatcatccagaagtggagagatcgctcgactaacacgcagaatggaaatgcagatcctggtgttcagccacttcttgtggacgaaagttgacggggagatctttcggtgcggctcctagcgcgagacagttttgtagtgttgttgtgaggcagtgtgatggttctggagaaaagacaaatcagacgatgacgaggaaacggtttctgtccctaatgcttattgatctgagcaaacaaacatgagcgggatacgatctattttctcaaaaatgatggtatagtccatcgcagattcgcagtagaatctttagatacaccaatctcttgtgtaagaatatattgtgtatctttacgtatattagttgtacttggggggtttagatgaacttaggaagatggaacaatgacttgacagtgaaatactgatgaagactctgtgcacaatgtcaatgatatttatgttttttttacccttgagggtgactgtcaacc

SEQ ID NO: 27353 - DNA, 1614 bp, Zea mays
  Clone ID: LIB4730-005-D8_FLI
ccgggttcttcgccaatccaactcccgtcttccttcttcctcttccttgttcgaatccaagtaacctacccaaaccgccaacccccaccccaaggaaggaaccctacccgtgagaaccgccgccgcacaaccccggacgtggtggcaggcgaccgatccggatccatcatcccaagcttcctttctgtctcctcttcatccatctccacaagtaagatgcaatttctcccttttcttcctgtcgggcggagatagtagtatattcttcgaggaaacctaggtgattgcaatgtcgttttgatgatgatgattcccgaccattttatctgcacagggataatcaaggaaggaaggccatggttttgttcgaacttgacccggacatcatccgatggggtcttcaccatctcctccccgctccggctggatactctcctcatagtcgcacccaaaccacccctaccacaccttgtacagcctttgctcgtcctcctcatcagcccaacggagacatgggtacctcaagctccgttgagatcaaggtcgagcatgtcgatggggttgacaacgacgcgatcatcgcacaagccctccaggaggaattgtccaatgtcgccttcgccgaagcgtccgggccaacctctgccgctgacaatcaacaaaattctgctgttctcacgcagcaatggcttcgcccacgcgccgtccatgtagaaccagcttctcaagaggcagggaccagggaggaacctttcagcacctgctcaagccctggagatgacaataacgtccaggacagccagcaatgcttgatagagctcatggataacttctctgtcattgacggtgaagtgggcaaaagattgaacaacatggttcctgttcctcatgttcctaaaactaatggagagattccttctgttgacgaagccatttcagatcatcaaagacttcttgacaggttggtggtgtacggtttggttgatctcaaggttaaaggagatggcaactgccagtttcgagcgctgtcagatcaattttaccgaactccagaacatcacagatttgtccggcagcaagtggtgaagcagcttgaatcgcatcctgagatttatgcaggatatgtccctatggactacagggaatatctaaaaaagatgtcaaagagtggagaatggggtgaccacgttacattgcaggctgctgcagactcgtacggtgtaaagatcttcatcctgacatcattcagagatacatgttatattgagattcttcctgttgttgagaaatccagaagagttatatgcttgagtttttgggctgaggtgcactacaactccatatatcctgaaggagagttgccggttttggagtttgacaacaaaaggaaaaggtggtggcccttctagctaggattcccaggacagactagatagagcagctttaacagactgaggcctttctgttgggctatgtgacactgactgatgacgaaaatgagcccatgggtggtggacggaactgcattggccttgccctccttgcccacacgatagacatgtacagtgcgtagtagatggtactatttgcctacttggtaacccattctcagat

SEQ ID NO: 27354 - DNA, 958 bp, Zea mays
  Clone ID: LIB4730-005-E12_FLI
ccgggatcgatcgtcaatgcaagtttgtccattcgcattggtctgaatactgtagctactagcgcgagtgccactgtgccgcagctgcctgctcgccattactgcaagctgtgttcaatcaaagcttaattaggctccctctacatctgatccagctaagtagctagccagcactacagaagggcgtggcaagaatcaggagagagatagcaggggggctagctagctgagctcgtgcgacgaagaatggccggaattggcaggaacatggtggcgccgctcctggtgctcaacctcatcatgtacatcatcgtcatcggcttcgcgagctggaacctgaaccacttcatcaacgggcagaccaactaccccggcgtggccggcaacggcgcgacgttctacttcctggtgttcgccatcctggccggcgtggtgggcgcggcgtccaagctggcgggcgtgcaccacgtgcgcgcctggcgccacgacagcctggccaccaacgccgcgtcgtcgctcatcgccttcacgcagctcctctacgtgctcatgctccacacgggcctcttcggcggcagcggtggctaccgggaccacgactacggcgtcggcggcgcggccggcgagcccaagggggtcaccagggtctgaggattctgatcgatgcagctcgtacatgtgtcatcatatcaggcgctgctggagtgtgatgacgtaataagtagtacccatatatatatatggtgtgtgttgacgtaccacgtacactacgtacgtgtgtacctagtagctagctagtcagtccatcgtctgctcatctcgtcaggtcatcagatctctcggttctggtttgtacatcagtacgtgcatgcatgtatcccgtgtcaaatgtatttcgtcacccgtcagtttcagccggtcagtgaccaagtttatttcgtcacccctcagttcagcg

SEQ ID NO: 27355 - DNA, 550 bp, Zea mays
  Clone ID: LIB4730-006-A5_FLI
actcgaagcccttctttttcacgttcgcggcgctgtgcggcgtcgtccccggcgtaatcggctacggcgtgatgcagctcaccggctcccgcaacgagcagctcgaggcccaccttcgctccacggcccgtcccgagaccacgatgatggggcaagtgaacagggagaggctggcggagtttctcggcgagctgcaacggaaagaggacacgaacgacaggtacgtggccgcgctgaggggggagaccctgaccaggaagcgctacgagcgcatccagcccttgcctgccgccaacgcgcaagcgagccaggagactgccggagccagcgcggaggaggagaggcccaaggcaaagtgagtcatcagcgagacgtgcctcagtcaatttttacttgctggacatacgcatgcttcggcataatgtaagcagtcagcgcctgtgaaacgtcattgcgcttggggtatttgactcccttttgttttaaacgctgctgatgtaaatcttttgtgcatttcccgtgagaaggcgtattccgacagaccgtactt

SEQ ID NO: 27356 - DNA, 1472 bp, Zea mays
  Clone ID: LIB4730-006-A8_FLI
ccgggaaagaaaaaaaaaaggggttgcaattttgctgggagcctgggacgctgagtcagacccccaccgatggcgtccgaatcctccccgcccccggcgggggcgccaccgcctggtctgggagacaagctagcggtgttctgggacgagggcatgctggcccacgacgccggccgcggcgtgttcgactcgggccgcgaccccggattcctggatgtgctcgaccaacacccggagaacgccgaccgcgtccgcaacatggtctccatcctccgccgcgggcccatcgcgcacttcctctcctggcactcgggccgccctgcccacgcctccgagctcctctccttccactcctcagaatacatcgaggagctcgtccagacgaacgccaccggagccaagaagaagctctgtgagggcacgttcttgaacccgggctcctggggtgcggcgcttctagcggccgggaccacgctctcctccgcgaagcacatactagacgggcaggggaacctggcctacgcgttggttcgcccccctggccaccacgcgcagcccgaccacgccgatggctactgctttctgaacaatgccggacttgctgtgcaactggctctggattccgggcgcgcaaaggtcgccgttgtggatattgatgtgcactacgggaatggcaccgcggagggcttctatcggacagacaccgtgttgacgatgtctcttcacatgatgcatggttcttgggggccatcgcatccgcagagtggctccgtcgatgagattggtgagggcaaggggcttgggtacaatctcaatatacctttgcctaatggaagtggagatgctgggtatgaatatgcgatgaacgagttggttgttccatcgattgataagtttcagcctcaactgttgtttcttgtggtcggccaagattccagtgcgtttgatcccaatggaagacagtgcttgaccatggaaggctacaggaaaattggacaaataatgaggcgcctggctgatcgccattgcaatgggcaaatactggttgtccaggaagggggttaccacatcacttattcggcatattgtctgcatgctacactggaaggagttttggatctggaagccccgctgcttgatgacccaatcgcttattacccggaggatgataaatacactatgaaagtcgttgacatgataaagagctactggaaggaatcggttcctttcctaaaggaaatttagaggaaataatgttcgcgccctcaatgttcaaattgcaggaaactccacattcctggacatcttcaattgaattgggaagaacattgcacgtctacgttttcaggccgtttaagattatctgattgacagtttcacgcctaacattgtacaggatagattaagaacattgtttgctgctgctcttgaatttctgcaatcaggatctcgtcagcctatttttgataaac

SEQ ID NO: 27357 - DNA, 1249 bp, Zea mays
  Clone ID: LIB4730-006-C8_FLI
ctcgaggccggccgggacgttcagcatcgtcgtctttcgaaaaatgtggttcggtggcggacccatcgacgcggcgggcgcgctgcgcggcttcgtgcgggaagcaggcgggtgcgcggtggtggacgggggtctcggcacggagctggaggcgcacggcgcggacctgcacgacgcgctctggagcgccaagtgcctcgcctccgccccgcatctcatccgcaaggtccatctggactacctcgaagcaggcgcggacgtcataatctctgcgtcctaccaggccacgatcgaggggttccagtcgaggggcttctcgcgggacgagagcgaggagctgctgcggcgtagcgtgcacgtcgcgcaggaggcgcgcagggtcttcgcggcggagggcgacaggtcatcgcgccgcggacgcccgccggcgctggtggcggcctcggtcgggagctacggggcgtaccgggcagacggctccgagtacagcggggattatggaaaatcgatgacgaaagaagatctgaagaacttccacaggaggcggctgcaggtgctggcaggcgcggggcccgacctcatcgccttcgagacgatcccaaacaaactcgaagcgcaggtctacgctgagctcctcgaggagaacggcatacggatcccagcctggttctccttcacttccaaggacggggtgaacgcggcgagcggagatccgatcaacgagtgcgcggccgtcgctgattcctgcccgggggtggccgcggtcggagtgaactgcactgctcccaggttcatccacgggcttatcctctccataaagaaggtgacgagcaagccaatcgtcgtgtatccgaacagcggggagacgtacgtcgcggagacgaacgaatgggtggactcggacggcgccacggggacggacggcttcgtgtcgcgcgtcggcgagtggaggcgggcgggggccgcgctcatcggagggtgctgcaggacgagcccggccacggtgcgagccatcgcgcgggcggtgcgcgaggcggaatacgacgatatccctgccgtggccgtgctctaagcttttgctagttcttccattcccggcggagaaactgaagacggtgatcttcggcaataaagtacacacgctcgagtgccacattgtgcgcagttgtctttgatgtggagaaactggagacggcgattcatcgtcatgctcacgttccttcggcaataaaatgcacgtgcacgagtg

SEQ ID NO: 27358 - DNA, 384 bp, Zea mays
  Clone ID: LIB4730-006-D1_FLI
taccctcgaggccggccggggctagccgcaccgcgctcacttccgcacccccttcccgccgcgccgccgccgccgccgccgccgctgcctccccgccgccgggcaagatgggtcgcgtgatccgcgcgcagcgtaagggtgcgggatccgtgttcaagtcccacacccaccaccgcaagggccccgcccggttccgctccctcgacttcggcgagcgcaacgggtacctcaagggcgtagtcaccgacgtgatccacgaccccggccgcggcgccccgctcgccaaggtcaccttccgccaccccttcaggtacaagcaccagaaggagctcttcgtcgccgccgagggcatgtacactggccagttcgtctactgcggccctc

SEQ ID NO: 27359 - DNA, 524 bp, Zea mays
  Clone ID: LIB4730-006-E4_FLI
tcgaggccggccggaaagtcccatcccattgctcgttctgtcccttcgttcacaacctcctccacgaccaaacgatccgggttccagcggcggcggcggcggcgaagatgatcataccggtgcgctgctttacctgcggcaaggtgattgggaacaagtgggacctctacctcgacctcctccaggccgactactcggaaggggatgctctggatgctttggaattgttccgctactgctgcaggcgaatgctcatgacccatgttgacctcattgagaagttgctcaactacaacacactggagaagaccgagacaagttaagtgagcaagcatatcatgctctgaaagcactactgtttcgtagtatcatatatattgtaggcggcatgttgtttcttctctatcaggagaggattgttgtgagtgtgaacttgcttttgctctcgagcattcaaggactgacaagggcatgttgcatctatgctacgatgttggagattttaatcgatataacggctaact

SEQ ID NO: 27360 - DNA, 944 bp, Zea mays
  Clone ID: LIB4730-006-F5_FLI
ccggggaaactccgtttcgaattctagggttttgctgctctccgaccccgagctccgaaggccgcagcatcaggcgcggcccccctcgcgtgtgaccgagatggcgctgccgaatcaggggaccgttgattaccccagcttcaagctcgtcatcgtcggcgatggtggaactggtaaaactacatttgtgaagaggcatctcactggagagtttgagaagaaatatgaaccaaccattggtgtggaagttcatccgttggatttcaccactaactgtggtaagatcaggttctactgctgggataccgcagggcaagagaagtttggtggcctcagggatggatactatatccatggccagtgtgcgatcatcatgtttgatgtaacctcaaggcttacttacaagaatgttcctacgtggcatagggacctgtgcagggtctgtgaaaacatccccattgtcctctgcggtaataaggttgatgtgaagaacaggcaggtcaaagccaagcaggttactttccacaggaagaagaatctgcagtactatgaaatttctgccaagagcaactacaactttgagaaacctttcctgtaccttgcaaggaagctggctggtgatccgaaccttcactttgttgaagctgttgctcttaagcctccggaagttaccatcgacatggctatgcagcagcagcatgaagctgagcttgctgcagcagctgcacaacctcttcctgatgacgatgatgatctgattgagtagaaaggatcatgagtcttggacttgagcaggagttgtgccttgcacgatttaagttgttctagggtggactctctcttgagttatcattgtctggatcatttttttctccttggacttgttgcaacttttgagtgtggaaatggattggaatagtcgccatgaatttgctggctacttt

SEQ ID NO: 27361 - DNA, 1011 bp, Zea mays
  Clone ID: LIB4730-008-B8_FLI
ccgggacgccagaaactaattcagctagctagcctttgatttctcacttcaatctgacgaactgacgaactgcacacctaggcaacaaactcgaacgcgcgcggtagtggagccgagatgcagggaggggcgacggccaagctgcagtcgccggtgaccgtcatgcgccccgtccgcggcgacctcgaggagcacctccccaagccatatctggcgcgagccctggtggcgccggacatctaccaccccgacggcaccgcggccgacgagcacgggcaccaccacatgagcgtgttgcagcagcacgtcgccttcttcgaccgcgacgacaacggcatcatctacccttgggagacgtactcgggatgccgtgcgcttgggttcaacatgatcctgtctctcttgatcgctcttgtcgtgaacgggaccatgagctatgccacgctgcctgggtggctgccgtcccctctcttcccgatctacgtccacaacatccacaagagcaagcatggcagtgactctgggacctacgacaacgagggcaggttcatgccagtgaacttcgagaacctgttcagcaagtacgcccgcacttccccggacaggctcacctacagggagctctggtcgatgacggaggggttccgcgacgccttcgacctctacggctggattgcggcgaagctggagtggacgatcctgtacgtgctggcgcgggacgacgaggggtacctgtcgcgtgaggccatgcggcgcgtgtacgacggcagcctcttcgagtacgtggagaggcagcgcgcgcagcacgccaagatgtcctagctagagggaagaggatgcgacgtggcctcgatcgcgcgtgaatgaaatggaagccaagtgaacctgtctcggccggtatgcagatagtgagaagggtgtcggccggaaaacaagcagccgtgtgtactactccctcagctcccatcaataacgcagagttcgccggaccgggacctcctcatctttcat

SEQ ID NO: 27362 - DNA, 829 bp, Zea mays
  Clone ID: LIB4730-008-E2_FLI
ctcgaggccggccgggaattccggtttccggatagcttacctcccatcgacggtcggtgagccgttagtgagtggcgagacagcgggtgcgctgggcaagaacaggcgacgaagaagatgagcacgctggacacgcggacgctcaaggacgagctgacgagcatggacaggaagtgcctcgtggacctcggccacccgctgctcaaccgcgtcgccgacagcttcatccgcgccgctggggtcggggcggccagggccgtctccagggaggcctacgtcgtcaccgtcgaagggctttcaggagactcgtccgggctagacgccgacggcggcaagcggagccatttctccagcatcagaggtgacgacggccagaggtcgctcgacgcagtggtaaaaacggccggcaaggaggccttccagtgggggttggcagccggagtctactcagggctcacgtacgcgctgcgggaggccaggggatgccacgactggaagaacagcgccatcgcaggcgccatcgctggggcggcggtggcgctcacgggtgacgccggcggccactccgacaagctcgtcaacttcgccatcaccggcgccgcgctctccagcgccgggagcttgctccccggcatattctgattggcccccagggctgcacccgcctgacacgggttcgctgcccggttgagcccttcatccgaggggttttagcatgaaaggttgatttcaggccagcaatgaaatatgtattcctagggccctgccggtctagcactgtgcgcttccagtgtaatcgttgcttcgtgtacgagtttcagacatttag

SEQ ID NO: 27363 - DNA, 523 bp, Zea mays
  Clone ID: LIB4730-008-E7_FLI
cctcccctatcatctagggtttctagggttttccaggaggaggaaatggcgtctgatagggtgctcgggactgtgaagtggttcaacggaaccaagggcttcggtttcatcacccccgacgacgggagtgaggatctcttcgtccaccagtcctccatcaagtccgacggctaccgcagcctaaacgacggcgatgccgtcgaatacaccgtcggcagcggcaacgacggccgcgccaaggccctcgatgtcaccgcgcccggcggcggcccgcttgccggcggggaacgtcccgacggcggcaacggcggtgggcgcggcggatacggcggcggcgaccgcggatacggcggcggcggtgaccgcggctacgggggaggaggcgaccgcggctacggcggcggcgaccgtggttacggtggaggtggcgaccgcggctacggcggcggcggcgaccgtggctacgggggaggcggcggctacggcggcgggtacggtggaggcggcggcggaggcggccctc

SEQ ID NO: 27364 - DNA, 1234 bp, Zea mays
  Clone ID: LIB4730-009-C8_FLI
ctcgaggccggccgggttctcttatcctcactcgcgtagtcgcctccctcctcttctcttccgcggcctggtgcaagaccaagagggaggaggaggccacgatggccggcagcgtcagcaacggcagcgggaagagcctggcgcgctggctgcgggagaacgggttcgacgacgacgccgtggcgcgcatgtccaggcggtgcaggaacctgcacagcctcgacgccggcgaggccccgggcgtgtgggactacctcctgaccggcgtcaagatggagcggcggaagctgcggcacgtggtggccaagtgccccaagctgctcaccctgtccgtggacggcaagctcgcgcccacggtgcagtgcctcgccacgctgcaggccaggcccggggaggtggcgcaggccatcgccaagttcccccagatactgttccacagcgtcgaggagaagctctgcccgctcctcgccttcttccagacgctcggcgtctccgagaggcagctcgccaagctgctcatggtcaacccgcgcctcatcagctacagcatcgaggccaagttctcgcagaccgtcggcttcctcgccggcctcggcgtcgacagggaaggcatgatcggcaagatcctcaccaaggagccgtatatcatggggtacagcgtcgacaagcggttgcgccccactgccgagttcctcaagtcggaagtcgggttacaggggccagatctccagagggtggtcatgaccttccccgatatactgtcgcgagacgtggataagatcctgcggcccaatctggcgttcctacagagccgcggattcagcagggatcaggtcacggcactggtagctggttaccctcctgttctcatcaagagcatcaaacattgcctggagccaaggatcaagttcctggtcgaagagatggggcgggacatgggcgaggtggtaggttacccccagttctttcgccatggcctcaagaggagcctggagtaccgccacaaggtgcttaagcagatgaactcgagctgcagcctcagcgagatgctagactgtaaccacaagaagtttgccatgaaattcggtttggtcgcagcagtttaggtactcaacttttctctagtccaatccaaggtagtttgttttattctcaggtgaatctttccgtttgtaccgtcaggttgtgttgttcttttgaacatttgggcaatgataactaataattcaaggtc

SEQ ID NO: 27365 - DNA, 1760 bp, Zea mays
  Clone ID: LIB4730-009-H10_FLI
ctcgaggccggccggggccgcacattttccttctccgggcactgtacacttctgactgcggctgatcaggccacaggggggctcccacttcttcctcctcgacagtcctcactcctcagtcctcactcctctgtcctcacacaccgctccagcgtccaagccatccgtgcgaaatctgttcgcagtcgcagtcaccactgttctccagggatggcgccgtgctgcctgctccagatcggctggtgtctcgagcgcccccgtggctttcgcctcgccgcggcgctgtgcgcggctgtggtcgcgctggcgctggcgcccgccttggatgccacgtcggcgtcgcttctgggcatcaactacggccgcgtggggaacaacctcccgccgcctcagtccgtcatgccgctgctcgagggcctcggtattggccgcgtgcggatgtacgacgccgaccccaccgtgctgcgcgcgttcgcccggaccggggtcgagctcatcgtcggcgtgcccgacgagtgcctggccgccgtggccgacccgggcggcgcggcgcagtggctcaaggagaacgtcgcgcccttcctgccggacacgaagatttccgtgctcgccgtcggcaacgaggtgctcaccggcgccaacagctccacgctgtcgcgcaccctcctcccggcgatgcagtccctgcacggcgcggtggccgcgctcggcctcgacaagcagatcaccgtcacctcggcgcacaacctcggcgtgctcgggacgtcgtacccgccctcggcgggggccttccgcaaggacctgctcccgtacctctgccccatcctggactaccatgccaggaccggctcgccgttcctcgtgaacgcgtatccctacttcgcctactccagcgaccccaggggcgtgcagcttgactacgcgctgctcgacccgggcttcgccggcgtgcaggaccccaactccaggctgcactaccccaacctcctcgtggcgcaggtggacgcggtgtaccacgccatcgcggcggccaataccgcggcgtcgcgggtggtggaggtgcgggtctcggagaccggctggccctccgcgggggccgccaacgagacggccgcgacgccgcagaacgcggcgcgctacaacagcaacgcgatgcgcctggtggcggaggacaagggcacgccgctcaagcccggggcgccgctccgcgcctacgtgttcgcgctcttcaacgagaacctcaagcccgggttggcgtctgagcgctactacggcctcttcaagcccgacggcacgccggcgtacgagctctccttcaagctaccgcgcgacaactccacgtttggtcacggcgataccggcaagggcggtggcggaatcggcggtaacggcaatggcaatggcagcagctggaacaatagcggcggcggaaacagcggctactatgacatctcggcttcagcacgtgacactacgggtcactggcggatgtgggcgcaggcggccatggcaggagcagtagccgtcctgacactgtagcgccaagggtaggatcaggaatggagcggagttgccgtcctggggcagcggcctgatttggtgctgctcgtatgctgtagtttctgagaccgacctgtgactgtgactgtgactctgtgagtgaccttgtgcttccggaaatctggtggcatctaaagcactcctagttttaagcagcgctggatcaggttgcctgcctgcttgaaatgaaaccctttccg

SEQ ID NO: 27366 - DNA, 565 bp, Zea mays
  Clone ID: LIB4730-010-A11_FLI
ccgggctcccggctcagacttctgctgcagcgcctccgccgccgctgccgcatctaacgcagttccctccgccgcagcccgaggcaagatggttctccagaacgacattgatctgctcaacccgccggcagaactcgagaagctcaagcacaagaaaaagagactcgtccagtcgcccaactccttcttcatggatgttaagtgccaggggtgcttcagcataaccactgttttcagccactcccagactgttgttgtgtgccctggctgccaaactgtcctctgccaacccacaggaggaaaggcaaggctcactgagggctgtcctttccgcaggaagggagactagagcggatgtggtcttcaagttttgctctatgccagatactagcgtcatgaactgcctttagctaagattttccataagttgttctcgagcagctatgtgttgcatgttggctacttccaaacttatatctggtttggtttggattgtgatgaactaatggctctttgaatttatattatgatgttgacgatatttggcgacatctggtttcttggt

SEQ ID NO: 27367 - DNA, 963 bp, Zea mays
  Clone ID: LIB4730-010-F2_FLI
ccggggcgtccacactctctatataaagtgttccctcactccactccaagccctagccgcatcccttctttcattcgccgccgccgcctgctctctgctgccgtcgccatggggagaaggcctgcgagatgctatcgccagatcaagaacaagccataccccaagtccaggtactgccgtggtgtccctgaccccaagatcaggatctacgatgttggcatgaagagaaagggtgttgatgagttcccctactgtgtgcaccttgtctcttgggagaaggagaatgtctccagtgaggctcttgaggctgcccgtattgcctgcaacaagtacatgaccaagtctgcaggaaaggatgccttccaccttcgggtccgggttcaccccttccatgtccttcgtatcaacaagatgctttcgtgtgctggggctgataggctccagactggaatgaggggtgcctttggcaagcctcagggcacctgtgctagggtggacattggtcaggtcctcctttctgttcgatgcaaggacaacaatgctgcacatgccagtgaagctctgcgtcgcgccaagttcaagttccctggccgccaaaagattattgagagcagaaagtggggcttcaccaagttcagccgtgccgactacctgaagtacaagagtgagggtagaattgttcctgatggtgtcaacgcaaagctgctcggtaaccatggaagacttgagaagcgtgctcctgggaaggctttcctcgaggccgttgcttaagtccaatctacagttggaatgcgaatccagacgttttggtttagcctatcttattttgctttgtgcaacatgaattttaagtgtatggggtattacagtgccttgtgtgaacctgcttatctcgtgctgaacatcgttatgcatggaagtacttatcttttgttctgctaaaaattaaagtgttctgcgacc

SEQ ID NO: 27368 - DNA, 2634 bp, Zea mays
  Clone ID: LIB4730-010-G10_FLI
cctcggacccatcaggtgctgctgtgctgggcgagttctcccccccttccttgcttttgtctggcattcgctcgctctagtttcgcgcaacccggccgccgccgccgcctcgggtttctcgcctgtggctttgagccgagaggttggggactcggtttccttcctgctctgagttgggtttcgcgcggctcggactttggccggcgggcgaataaaccggccggatgcttctgggcgctgcggccgcgaggatggaggagaagcgtgtgatcacggggagggagcgggaccagttccccgtcgggatgcgggtcctcgcggtcgacgacgaccccgtctgcctcaaggttctcgagaccctgctgcggcgctgccagtatcatgtaataacgaccaaccaggccatcaccgcgctgaagctgctaagggagaacagggacatgttcgatctggtcatcagcgacgtgcacatgcccgacatggacggattcaagctccttgagcttgtagggcttgagatggacctacctgtcatcatgttgtcagtgaacggggagacgaaatccgtgatgaaggggataacccatggcgcctgcgactatctcctgaaacccgtccgcatcgaagagctaagggacatatggcagcacgtcgtcaggaggaagttcagcaagcgcgagcgcagcaaccttgacgtctacaaagatttcaacaggctgccaggcgcggatccatgccacagccacggccacggccacggccagaccactgccggggcttccgaccagagcgggaggatcggcaggaagaggaaggaaatgcacagcgacgaggaggacgacggcgaggagaacgatttccaggagggcgacgagccctccgcggctaagaagccgagagtcgtctggtcgattgagctgcaccggaaattcgtcgcggccgtcaaccagcttgggattgataaagctgttccgaaaaggattcttgagcttatgaacgtggagaaactcaccagggaaaatgtcgcgagccatctacagaaatacaggctctatctgaaacggttaagtgctgtggcgtcacagcaagctagcattgtcgccgcatttggaggtagagacccctttctccacatgggagcctttgaaggccttcagagctaccaacctttcgccccctgtgctgctctatcgtccttcatcccacaccacggctcgcttggcagaactaccgcggcagcattcggggtcccggagcttgctcctgccatcacagttcaagctgctgccagcaatggcatgataagccactgtgctggcgatgcaagcaggtttcagctctccggtatacaagaaaaccagcaagcaaatctgggacaaggctcggccacctctcttgggctgccccagctccaacagaagtggatccagcaagaaactggcgacttgtctactgtcttctctgggagtgcactggctaacactctgtctggtgcactccagagagttgcaagcagtccattgccaccgcaagaacttttggagggcgtacaaaccaaagttagcgcccagccaccaataacaatggcatctgtgagttcagaacttgttgagaggactgttggagtttcggctaatttgcaggactccggtatatccccgcagggcactcttccaataaatgatggatttactgctgacaagttacagctgcaagatccattcgacagcaatggtggaacaaatttttcagtaaacatgcctgtttgtccctctggtagccttacagcatccagcaacgccaagggtggtgctagttcgtgcagtccagtgctgctcgctcctgatactgggagacattcaaactacttgcagtttggagttgcaggcaactctggacatgacatgaacgatattaaacaggaccatctgcatcaaggattgagcactggaggtttcaatcacgattttggcacctgtatgactgaacaaacagatccaaatgtgccgtatcttatgccacaaatgaagcctaacaccttgtcatcagaggataaactgaagcagaggaatatttatgatttggggattccaaagctccatggtggttttagctctagtagctgcaattttgatggtcttctcaattccatgatcaaagcggaaaaggatgatctctcattcacggatagcgacctggggtgcgacttctttccactcggtgcttgcatatgagacctcttaacaacccctcgtgcagattggccctcgacgggatgggatgggactacggcctacgggagaggttgtaaagtacactgcttaggagcattggccagtttatgctgcctaatgtgttactatgcttggtactgtgcacactagaaatgctagggatacaggtagctacggacatgccttgtaatctacatttcctcctcttcgaatgggaaatgaaagtgattatggttaggtaaaaaggagcaagtataatgctccaaattaacatcatcttcatcttaaaattttaccaaattttgtttccaagtgtcattagctcaaaactagaccattaggtgcattgatgacacgtataatcgaaaatattgtaatagtccttcctttggcagtgatt

SEQ ID NO: 27369 - DNA, 1597 bp, Zea mays
  Clone ID: LIB4730-010-H1_FLI
ccggggtactgtactgatcactcctggcctctgcgaaggaaagaagaggtgggggaggctggtttggtggcctgtaccgatttgcagcggctgatggcggcgcctctgctcccctcttccgtctccgtgctcctctcgctccacatcgcgctgctgctggtcctctgctccagccaggtaggagattcctgctcctcagtgcgggactgcggcacgggcctctactgcggcaactgccccgccgcaggcaggaccaagctctcctgcatcagggacctagccatccagcccacctccattgtgaaggggctacctttcaacaggtactcatggctcgtcacccacaattccttttccatcctcggggagccgtcgcgcactggggttgagagggtcacgttctacaaccaggaggactccgtcaccaaccaattgaggaatggtgtcaggggattgatgcttgatatgtatgacttcaacgatgatgtatggctctgccactccctgcaagggcaatgctataacttcactgctttcgtaccagcagttgacacactaaaagaggtggaagcatttctctccgagaatcccacagagatcataacaatatttattgaggattatgttcattcaccgatgggactgagcaaggtctttactgctgctgacttgatgaagtattggtatccaatctcggaaatgccaactagtggcaaggactggccaagtgtcacagatatggttgcaaaaaaccgcaggttgctggtgtttacttctgatgcttcaaaggaggctagtgaaggagtagcttaccaatggagctacttgctagagaatgaacctggagatccagggattgtgcctggttcttgtccaaacaggaaggaatcgcagccactgaactcaaggccggcatctctatttctgcaaaattacttccccacgatccccgtgcagaacgaagcatgtaaagagaattctgggctaccacaaatggcccaggcttgttatgccgcagctgggaataggatcccgaacttcatagctgtgaatttctacatgcgaagcgacggtggtggtgttttcgatgttcaagacagaatcaatggccgcaccttatgtgggtgtgacaccattgctgcttgccaggctggagcaccaatgggtgcatgcaaggacacgggggcaccaaatcagactacatcgccctctgtaaatggaaatgtctattcaggaactatagaattcaagacgcattccactagtgctgctagcaataacaacatccggagtagatctgtttttctgctaaggctgcagttgactttgctgctctttttctctttcaggctctagttttcatatatctggacctttttcccacctactgtatagctgaaagtaacatcagcttttgttgtgagcttgctttctctattgggatgacggttagtgccttgctagctttataatctatagttgggagggggtgtggatcaatgttaatgaaagaatgggtagagatcttcctctgttctccgaggaggagtaatacggctacaacctacaaagaaactgatgagtggaagttcatgcc

SEQ ID NO: 27370 - DNA, 1118 bp, Zea mays
  Clone ID: LIB4730-010-H2_FLI
ctcgaggccggccggttttgtatttcttctcccctattccctcttcttgttcttggagttgttggtgtccccggagctacaaaggccccgccttttggctcattctcagactttagtactttaccatctgctccaagaaagcgtcttggagatggcgcgcaccgagaagctcaccagcgatggctgctccggcggcgaagtccaagtggaggtggagctcggcatgggggtggacgggaaggggatcatagagtgccggatatgccaggaggagggggaggaggccgctatggactcaccttgcgcttgcgctggcacactcaagtttgcccacaggaaatgcatacagagatggtgcaacaagaagggaaatattacatgcgaaatctgcaaccaggtttactccccgaattatgtcatccctccaccgaaatgttgttcagatgaaatggacatgaatcttaggcaaaactgggtcggacgaatcgatccccatgattcccatttcctagccatcgccatcgcagagcaacagctgctgcaagctgaatttgatgactgtgtatctgcaaattctagcggtgccacatgctgcagatccatcgctttagttgtgatgttccttttgctcgtacgccatgtaattgtcattgtgagggatgttagcatgctacaagatgcaacggtgctgttcagcgcaactcttcagtttgcgggattctttcttccttgttatgtaatagctcgttcttgctacgctttgcagcatcggagacggagacaggtgtagggaggctcacctgaaccttaaaagaacacaaagaggcaccaattgaagcgccgcctcggcggtacccccgaagataggaggactacatggaagcttgcgaagtgagcctccccgttgttgcttggagtcaccgcaaagcatttggtttctgtcctgaagacgtcggcggtttaattaggttgattgagtagcgagagcaggcgctgtgaagctcaagtgtacatacgttgaggggacaaggccttttttttacagctgagaggaagcaaaatgtagcctcacacatttctgctgcaaataaaagaacaatcgcccgtcagcgcctctg

SEQ ID NO: 27371 - DNA, 1361 bp, Zea mays
  Clone ID: LIB4730-025-F12_FLI
tcgccccgctctgttcgagttcccgttgtaggcgcacgccatggccgcggccattctccgccgccttgtccccaccgccgccagccagctcgtggcgccgctgccgcttctcgcgcgtggggtctccgactccgcggacgcggtcaccgttgacacctcggtgcccttcaagtcccacatcgtggacccgccaccgcgcgaggccaccacctcggcgcgggagctgctgtccttcttccgcgacatgtcgctcatgcggcgcttcgagatcgcggcggactcgctctacaaggccaagctcatccggggcttctgccacctctacgacggccaggaggccgtcgccgtcggcatggaggccgccgccacccgcgccgacgccatcatcaccgcctaccgcgaccactgcgcgtacctcgcgcgcggcggggaccccgtcgccgccttcgccgagctcatgggccgccgggacggctgctccaggggcaagggcgggtccatgcacttctacaagcgggacgccaacttcttcggcggccacggcatcgtcggcgcgcaggtgccgctcgggtgcggcatcgccttcgcgcagaggtacaggaaggagggcaccgtcacgtttgacctctacggcgacggcgccgccaaccagggacagctcttcgaggcgcttaacatggccgcgctctggaagctgcctgtcatattggtctgcgagaacaaccactatgggatggggacggcagagtggagggcctccaagagcccggcttactacaagcgcggggactatgtgcctggcttaaaggtcgatggaatggatgttcttgctgtaaagcaagcttgcaaatttgccaaagaacatgcccttgaaaatgggccaattatcctcgagatggacacctacagataccacgggcactcaatgtcagatccaggtagcacctaccgcacaagggatgagatcgctggcataaggcaggagcgtgatccaattgaaagggttaggaagctcatgttggtccatgagttcgcaacggcccaagagctaaaggacatggagaaggagatcaggaagcaagtcgacgctgccattgctaaagcgaaggagtgtccactgcctgatccatctgagctcttcacaaatgtttatgttaatgactgcggtttggagtcgtttggtgtagacaggaaggaggtgaggaccgttcttccgtaggctggcaaacaaaaaaaaaggttctactgatacaggcgaagcgaagggatcctctcctctgttaccgtgtatttgtttatctggtagtacgaagaagtttgctgcgtatgtatatggacgcatcacaccgcagtagtttcct

SEQ ID NO: 27372 - DNA, 582 bp, Zea mays
  Clone ID: LIB4730-025-H8_FLI
ccgggatcttctcccccagctccccagcaccagtccccaattatttggcctccgtcagagaggggagaaagacccgttcgaggcggcggcgatgtcggggcgcggcaagggcggcaagggtctgggcaagggtggagccaagcgccaccggaaggtgctccgcgacaacatccagggcatcaccaagccggcgatccggaggctggctcggaggggcggcgtgaagcgcatctcggggctcatctacgaggagacccgcggcgtgctcaagatcttcctcgagaacgtcatccgcgacgccgtcacctacaccgagcacgcgcgccgcaagaccgtcaccgccatggacgtcgtctacgcgctcaagcgccagggccgcaccctctacggattcggaggctaggcgcctcttcgtagctggggaatgcttagggggatacacgtctctgtcgctgtgggccatagtgttgctgcgttcctggatgtaatccatttatttttctgcaatgaagagatgctggcaagcatgctacctgcatatgtcagaaatggtagtaacagtgaatctttgttcacgaaccg

SEQ ID NO: 27373 - DNA, 1560 bp, Zea mays
  Clone ID: LIB4730-076-C12_FLI
ccgggctctctttctcaaagttcggagtcgaggccgccgcccagaccgcctccccttccccgcctccggtgcccaaggccaggccaacagttttgaggtggtaatggcggaccaggctaaccaacccactgtccttcataagctaggtggccagttccacctgagctccagcttctctgaaggtgtacgggcccgtaacatctgcccttctttctcaccttatgaaaggagatttgccacgaggaactacatgacccagagcctttggggcccttcaatgtctgttagcggtggcatcaatgttccagtgatgccgactccgctttttgccaatgctccagccgagaaaggtggcaaaaactccatgattgatttcatgatgggcggtgtttcagctgctgtttcgaagactgcagctgctcccattgaacgagtgaagctgcttattcagaatcaggatgagatgatcaagtctggtaggctatcagagccgtacaagggtattgctgattgcttcaaacgtaccatcaaggatgagggtttctcttccttgtggaggggtaacactgctaatgttattcgttacttccctactcaggctttgaactttgcgtttaaggactacttcaagaggctgttcaacttcaagaaggacagggatggttactggaagtggtttgctggcaacctggcctctggtggtgctgctggcgcttcctctttgttttttgtgtactccctggattatgcgaggacaaggttggccaatgatgccgaggctgccaagggaggaggcgatagacaattcaatggtcttgtggatgtctaccgcaagacactcaaatctgatggtattgctgggctttaccgtggatttaacatatcttgtgttggaattattgtttatcgtggcctgtatttcggactttacgattctatcaagccagttgtcctcactggcagcctccaggacaacttctttgccagttttgctctgggttggctgatcaccaacggtgctggtcttgcatcttaccccattgatactgtccgcagaaggatgatgatgacttctggtgaggctgtcaagtacaagagctcattggacgcattccagcagatccttaagaaggaaggccccaagtccctgttcaagggtgctggtgctaacattcttcgtgccattgctggcgctggtgtgctttctggctacgaccagctccagatcctcttcttcggaaagaagtacggctccggcggtgcttaaatggagaaaaatgatgacgaacaagagcagttcgctcccggtccagcccagtcaggatctggtcaagtttttgcctttcatatcgaagaaattaataatttatgtaggagaatttttccaacattcgttttgggcggagacattgatctcaaaacactcgtaactgtcctactaggtggtggcatgggtccccaaaacatggtcatagggtgtgtctagtctgcccttcgttgcagccgggcaattttccttacatatattgcctttaatcaagtatcagatgagtgtcaagt

SEQ ID NO: 27374 - DNA, 1011 bp, Zea mays
  Clone ID: LIB4730-076-D9_FLI
tcgaggccggccgggcccatttcgaagcccaccgaattccctgcgattcctctcccctcgcctcctcgtctccccctaggggatcgtcggagaggaatcgcaaagagggccgtctcatccgagccatggagcacaaggaggctgggtgccaggcccccgagggacccatcctctgcatcaataactgtggcttcttcggcagcgcggcgaccatgaacatgtgctctaagtgccacaaggagatgataacgaagcaggatcaggccaagctggctgcctcctctatcgacagcatcgtgaacggcagcgacgccgtcatggagccggttgttgctggcagcaacacggtagtagctgttgcccaagtcgagttgcaaacaatgaacgtgcagcagcccgctgatgttgccggacccagcgagggggtggcggcgatctccaaaggggggaaggtagggccgaaccggtgcagcgcctgcaggaagagggttgggctcacgggattcaactgccggtgtgggaacttgtactgcgcgctccaccgctactccgacaagcacgactgcaagttcgactaccggactgctgccagggacgccattgccaaggctaatccggtggtgaaggcagacaagctcgacaagatctagggggggttccctacggttggtgtcaggaagattgtaaaccgcggtaactcgtcatgcggaactgctgccttgccccccgcgcctttctcttccatgtttgctgctacaatcttgttgttgggcattgcagtgcacggtgcacacttgtgtagcccgcctccgagaattctcctgcctctgcatctggtcagttcaaaaatgatttgcatgttggctatgttgtgtaagctctatttatggtggtctcgctgagacgggtatttggcttcgcagttatctagctatgtgatgtactgttgtcttgtccctgggtattatatggtacactgcagccagtaatagtaatctgcaactgtgcgcg

SEQ ID NO: 27375 - DNA, 367 bp, Zea mays
  Clone ID: LIB4730-076-F5_FLI
taccctcgaggccggccgggaacaacttgggcgcggccggattcgtataggctagcagcacatagtaacaagctcgcgatctgtgcgcccaccaccaccaccgccgggaggagaggaccgaccgaccgaccgaagatgcggatgagctgcaacggctgccgcgtcctgcgcaagggctgcagcgacgcctgcaccatccgcccctgcctgcagtggatcgacagtcccgaggcgcaggccaacgccaccgtcttcctcgccaagttctacggccgcgcggggctgctcaacctgctggccgccgcgcccgacgacgccgcccgcccggccgtcttccgctccctgctcttcgaggcctgcggccctc

SEQ ID NO: 27376 - DNA, 851 bp, Zea mays
  Clone ID: LIB4732-013-C9_FLI
ctcgaggccggccgggaaacccaaactaacccttctaatccaaggctgtgaagggagctgctagccgccaccagccgccatgtctggaaggatcgcgcgcggccgcctcgccgaggagcgcaaggcctggcgcaagaatcacccccacggtttcgtggcgaggccggagtcgctgaccgacgggtccgtgaacctcatggtctggaactgtaccatccccggcaagcacgggaccgattgggaaggtgggtactacccacttacccttcatttcagtgaagattacccaagcaaacctcccaaatgcaagtttccacagggttttttccatccaaatgtttatccatcaggaacagtctgcctctcaattctgaacgaggatagcgattggagacctgctatcactgttaagcagattctagttggaatacaggacttgcttgatcagcccaatccagctgatcctgctcagactgatggttatcacctattcatccaggatcctgcagaatataagcgacgtgttcgtctgcaggccaagcaatatcctgctctggtctgaggatgttggcatactagagatccatgatccatcctgcaaatctgcatggtagttgcaaaatgtatcgtctcaatttggatttgacaggatacaagttatctggcggattgcccagtgtaaacctgaaccttttatgatgtgtggtgtccggtattggcagcaaaaaacaattcgtttactgctgtaagtgctgcagccactgatattttgtctatttaacttgactgtttgtgtgttggtagtctatcttgaagacaaatgtttatcaagaaagttatatgcttagaag

SEQ ID NO: 27377 - DNA, 1395 bp, Zea mays
  Clone ID: LIB4732-013-H7_FLI
ccggggaccaccggtccaccgcgcatcgaacccccacttgtgccgattctgctgatccctcgccgacaacggccggcgaatcgacaccatggccgctgcgcgccggggccgtggcgacggcgccaacggcgtcgtccgtccccgcccccgcgaccgcggcgggagcatggcggggcgcgtggccgtcctcgccttctgtgtcgcagggatctggttcgcctacatctaccagggcgtcctccaggagactctatcgacgaagcggttcgggccggatgcgcggcggttcgagcacctcgcgttcctcaacttcgcgcagaacgtcatctgcttcgtctggtccttcataatgattaagctgtggtcgggcgggagtagctccaatggcagcgcaccgatatggaagtactggggcgtcagcgtcaccaataccatcgggccgaccatggggatcgaggctctcaagtacatcagctacccggctcaggtgttagcaaaatcttctaagatgattcctgtaatgttgatgggaactcttctctatggtgtgaaatacacacttccagagtatttatgcacctttcttgttgccggcggtgtgtcctcctttgcgttgttgaagacaagctccaagacaattaagaagcttgccaaccctaatgcacctcttggttacacattgtgcttcctcaacttagcttttgatggatatactaactcgacccaagatttaataaagtcaaggtacccaaaaacaaacccatgggatataatgcttggcatgaacctctggggaaccatatataatgctgtaattatgtttgttgcgccattactattcagtaactggccatatgcaaatggttttgaggcattgagattttgccaggagaacccagaggtggcctgggacattttcctattctgcctatgtggcgccgtggggcagaacttcatcttcttaaccatcagccggtttggctctcttactaacacaacaatcactaccacccgtaaattcatgagcattgtggtttcatccgtcatcagtggcaatccattatctttgaagcaatggggtagtgttgtgatggtcttcttaggcctctctatccaaatatatctcaaatggaagagaaagaaaggcagagagcacaaggagtaagcttgattcttcaaccttttctgatttgtaacttcaattggacagatctcttgtgagattgaccaggataacgttaatgcagtctgtttgagattaggaacttctacatggattattatgagtgataccatgtgtgaggctgagctattggtaacagctctaatttatgtactagagggaggattcatgtgtttcacttaaatgttgatctcgtggatttgtcttatgcc

SEQ ID NO: 27378 - DNA, 964 bp, Zea mays
  Clone ID: LIB4732-014-B3_FLI
ctcgaggccggccgggatagaaggccggccgggtaagtacagaaaggaaaatgaaagtaaactagttgtcgctgctgccctgttgcggcgacgactccgtgattccctagtccctacccagatcggcgcccgacgcaaggccgagcaggcgatggccgcagcgacgtcaatggggcacccttacgcgccagccgagctggaccttccgggtttcgtgccgctgaagctgtcccaggtcgagatcctcgtgtcctacctcggcgcctccgtcttcgttttcctcgccgtctggctcgtctccggaagatgtgttagattatccaagaccgaccgtctgctcatgtgctggtgggcatttacagggttgacccacataatgatcgaggggccctttgtcttcactcctgatttctttaagaaggagaaccccaatttctttgatgaagtttggaaagagtatagtaagggagactctaggtatgttgctagggacactgcaactgttacggttgaagggatcaccgctgtattggaaggccctgcatcactacttgttgtctacgccattgcatccaggaagtccttcagccacattctccagttcgccgtatgtctgggccagctctacggatgcctggtttacttcatcaccgcgtacttggacggcttcaacttctgggtcggcccgttctacttctgggcgtatttcattggcgcaaacagcttctggatctggataccgatgctcatcgccgtaaggtcctggaagaaaacctgcgccgcgtttcaagctgagaaggtgaagaagaccaaataaaagctgtctttagctaccgttttattggaactaagggttgtgctgtggagaccgtcattttgatggctcaaattcttgtgttagttggtactggaaactgcatgatgtactctttgctcaaacaaatgaagaccggtttacaaattc

SEQ ID NO: 27379 - DNA, 899 bp, Zea mays
  Clone ID: LIB4732-014-B5_FLI
ctcgaggccggccgggggattgatacggattgagagagaatctcacggctagctagcacaagcatagtgcaggggcttgccacctaagtaaggcccgcctgagagccatggcatccaaggccgtcctcttcttggctctcaacctcctgttcttcacggtggccaacgcctgcggcaactgcccgaccccaacgcccccggtcgagccaccgccgccgcctcctgctgctaccccacccccttcgtccagcggcaagtgcccgctgaacgcgctcaagttcggcgtgtgcgccgatgtgctcggcctcgtcaaaggcgaggctggcaaggtgcctgccgagccatgctgtaccctcatcaaaggccttgcggacttcgaggccgccgtctgcctctgcacggccatcaaggccaacgtgctcggcgtcgtcatcgatgtccccatcaagctcagcgccctcgtcaactactgtggcaagtgcgtgcccaagggctacttgtgcgcgtaagcagcttccggcggtcacacgctcgtagctgttcacgtacgagattacatatgcacgcaccctgcatggcacgaatgcatgcattgtgtctgctgatatatctctcctgtctcagttgcattgtgcacctttcggttctacaaaacctagaaccattccagccaaatacttgtcagttcaattcgcatgtattgtctcttgttgaattcccatttttttttgtatttggtcatttcctcgtaagagtccgacaccttctccaaggaaaaagggcagtgttgagagtcattgttgtgtatgtaaaaccaaacacttgagcttgtagtaccttattcgatttcttatttattcctgtctttcggagtgagaataaagccatctggtcaattg

SEQ ID NO: 27380 - DNA, 1481 bp, Zea mays
  Clone ID: LIB4732-083-C9_FLI
ctcgaggccggccgggagaaaccaaccagatcacacgaaccaaaccaccgcttcctcccccgaccggagaggagcctcaccgccggcgcccatggcgacacgctacttgatcgtgtcgctgcccgtgcagtcgcccggcgccaccgccagctccctgtggtcgcgcctccaggactccatctcccgccactccttcgacaccccgctctaccgcttcaacgtcccggatctccgcgtcggcaccctcgactcgctcctcgcgctcagtgacgacctcgtcaagtccaatgtcttcgtggagggcgtgtcacacaagatccggaggcagatcgaggacctcgagcgcgccggaggggtcgagaccgggaccctcaccgtcgacggcgtccccgtcgacacctacctcactaggttcgtgtgggatgagggcaagtaccccacaatgtcccctctcaaggagatcgtcggcagcatacagtcacaggttgccaagatcgaggatgacatgaaggttcgagcatcagaatataataatgtaaggagccagcttagtgcgatcaacaggaagcaaagtgggagcttagcggttcgtgatctttccaatctggtaaaaccggaggatatgatcacctcggaacatctcgtgacacttcttgcaattgttcccaagtactcccaaaaagactggttgtcaagctatgagaaaattgacacattcgtggtacctaggtcctctaaaaagctctatgaagacaatgaatatgctctctacactgtaacactgtttgctaaggttgttgacaattttaaggtccgtgctcgcgagaagggttttcaggtccgtgattttgagtacagtcctgaagcacaggaaagtcggaagcaggagttggagaagctactgcaagaccaagaagccatgaggactacacttcttcaatggtgctatgccagctacagcgaggtattcagttcctggatgcacttctgtgctgtgcgtgtctttgtagagagcatccttagatatggtctccctccatcattcctgtctgctgttctcgcaccatctacaaagagcgagaagaaagtaaggagcatcttagaggagctctgcggcaatgcccatagtatttattggaaatccgaagacgacgtaggcgtcgccggtctgggaggtgaaacagaggcgcacccttacgtctccttcaccataaattttgtctgagaccggcatgttcctggccgtctgcggcccaggcaacatttcgagcagaactgccataaattctttgttgatttgtcggttcatgtgctcctgtaattcacatcacagagagaccagccgatcaataatgtagtttctgaggacatgtttccctgcagtattgcaccttgggagcgcattgtaaatggcctggaacagttgtctactggatttgtttatttatttacaataaaagccatgtgaaaataagtaactg

SEQ ID NO: 27381 - DNA, 926 bp, Zea mays
  Clone ID: LIB4732-084-B4_FLI
ccgggaaaaaaaaaataaaaaaaaaaaaaaaaagtcccctgtccggctgtcccctccttcgtgtcggagcctgcgcctcggcttgtccccaccaacccgcagctcgctcccaccaaacccacacccgaacaatggcgtcggcgtccaaggaggaggtgatcgggaagctcaacatccgcgtggtgcggggcaacaacctggccatcgccgacccgctcacccacaccagcgacccctacgtcgtcctccagtacggcgctcagaaggtgaagactagtgtccagaagaagaactccaatccagtgtggaacgaagtactgcagctctcagtaacacatcctacgaagccagtgcaccttgaagtttttgatgaagacaagttcacagcagacgacagcatgggtgttgctgagatcaacattactgacatctacgatgctgcgaagctggacctgaagcacgcctctgatgggacaaggatcaagacgatctaccctgtcggagtaaactaccttggcggcgagagccatgttcagtggaaggatggcaaggtggtccaggacttgattctgaagctgaggaaggtcgagagtggcctgattgtggtgcagctggagtgggttcatgttcctggcgtgaagctgtgaaggccctgtctgaatgagggctgatggagctgcagttgctgtgtccctggtttgattgtttggttgtaaacgatatcctgaacgtggtgatatgcggtgtatgagtgaggtttgagtgtgatgctttgtttggggtacttcctggtgacatgatgtgggtatgactgccaaaggttgtggcgcaccaataagaaacgccctgtcagcatgacagcatgttgtgagatgtaaactaagactttagaacctaaatatacaggtgattgggcgttaattgat

SEQ ID NO: 27382 - DNA, 1385 bp, Zea mays
  Clone ID: LIB4732-084-F3_FLI
aggtatactgaggcgaaggcaagctatctttgcgcttggggcaatgacgcagctcatgaggttataccgaggcgcgtcaattgctggttgaaaactatttccaaaccccctctgcggcccgcaagggccacagagaatttctggaagggctccctctaaccagggtaaagcccacactcatccattccatcatcccccttgcaagtatagtctcggcggctctagaagacgatgggcaaggacgacgtgatcgagagcggcgctggcggcggcgagttcgctgccaaggactacacggaccctcccccggcgccgctgatcgacgcggctgagctggggtcctggtcgctgtaccgcgccgtgatcgccgagttcatcgccacgctgctgttcctgtacatcacggtggccacggtgatcgggtacaagcaccagacggacgcgtcggcgtcgggcgccgacgcggcgtgcggcggcgtgggggtgctgggcatcgcctgggtcttcggcggcatgatcttcgtcctcgtctactgcaccgccggcatctcggggggccacatcaaccccgccgtcaccttcggcctcttcctggcgcgcaaggtctccctggtgcgcgcgctgctctacatcgtggcgcagtgcctcggcgccatctgcggcgtcggcctcgtcaaggcgttccagagcgcctacttcgacaggtacggcggcggcgccaactcgctcgcctccggctactcccgcggcaccggcctcggcgccgagatcatcggcaccttcgtgctcgtctacaccgtcttctccgccaccgaccccaagcgcaacgcccgcgactcccacgtcccggttctggctcccctccccatcggcttcgcggtgttcatggtgcacctggccaccatccccgtcaccggcaccggcatcaacccggccaggagcctgggcgccgccgtcatctacaacaaggacaagccctgggacgaccactggatcttctgggtgggccctctcgtgggcgctgccatcgcggccttctaccaccagtacatcctccgggctggcgccatcaaggccctcggctccttcaggagcaacgcgtgatgagcggggcttggctgtggagcaatggcgggcgacctacgggcgggggaagtcgtgagcgaggagaatgacatcatcgatcgacttgggtgccggtggttggttcgggtcgccttttttgtttcagcagctgctgcgttgcgcgcgtgcgtgagatttggtttggtttcgttcccctgcaatgtaatcatgtcgtgactctcaagggattattccgctctgctcttatggtctctgttttctatttaatgattgttattaccatgtagcagtaaccatcg

SEQ ID NO: 27383 - DNA, 838 bp, Zea mays
  Clone ID: LIB4738-003-F8_FLI
ccgggggttctccgtccggtcagaccaatcaacaaagtgacgcgagcacgagcatccatcgtttccccttcttccccatcgcgtgccctcgccgcagccatcttccatggcggaccagctcacggacgagcagatcgcggagttcaaggaggccttcagcctcttcgataaggatggcgacggctgcatcactaccaaggagcttggaactgtgatgcgctcccttggccagaaccccactgaagcagagcagaacctgatggcaaggaagatgaaggacaccgactccgaggaggagcttaaggaggcctttcgcgtcttcgacaaggaccagaatggtttcatctcggctgctgagctccgccatgtcatgaccaacctcggcgagaagctgactgacgaggaggtcgacgagatgatccgtgaggccgatgttgacggcgacggccagatcaactacgaggagttcgtcaaggtcatgatggccaagtgaggagcgatccccgttatctatgaatgaattgaagtgaaatatcaggcacacaagctgtactttgccatgtcccttttgagtacacatcagtatcatgcaggaggtaatgtctagtagtggtcggtttaggtggtgtagtcatgggaactcgacatcagatacctggtctcttttgattgtgatgttatcttgcattattgctcctgctggagcttttaggatttttgtaagctcatattttcagggggttttggatcttttgtgcgagtcttgtatctcgtgtacgttgcattgcattgttgtgttatgcttctgctggcttgtaccgccttgttatgtgaaaag

SEQ ID NO: 27384 - DNA, 1015 bp, Zea mays
  Clone ID: LIB4738-042-E6_FLI
tcgaggccggccgggctgcgcctgccctcccctcctgcagcgcccgtcgcctccctttccccttccctccctccctctccccgcgggccgccagaggcaatttcgccctcgattcgaccccgattcgtccgcccgcgaccgggattccctccgccaagcgcggatctgaacgctgcgctccgtgtcgccgctcgaatccgccatgaagggggccaaatccaagggcgccgccaaggccgatgccaagctggcggtgaagagcaagggggcggagaagcccgccaagggcaggaaagggaaggccggcaaggaccccaacaagcctaagagggctcccagcgctttcttcgtgttcatggaggaatttcgcaaggagttcaaggagaagaaccctaagaacaagtctgtcgctgcggtggggaaagctgctggcgacaggtggaaatccctgagcgggtcggacaaggctccctatgtagccaaggctaacaagctcaagctcgagtacaacaaggccatcgctgcctacaacaagggcgagagcactgcagctaagaaggctcctgccaaggaggaagaggaggaagatgaagaggagtctgacaagtccaagtcggaggtcaatgacgaggatgatgaagagggtagtgaggaggatgaagatgatgacgagtgatggagctcctcgagacaatggaccgtgcttcatccaacaatggagcggctacacaaggccccgtggcgatcacaaaaaaggagcctatatccatgtactagaattattcagtttcactccacatcgtgatgttttatttttacttttgtcgtgctataacggatagcgctcctcgttggcgccactggcgggtggttctgcctctggtctggtgtgtttgtgtgtggtcacacctgccagccagcagaggcgcctgcttgtacctagattactgtttccattgtcgtcatcattggctaacattgtcataatgtcagtttgggtaatgttagattaagt

SEQ ID NO: 27385 - DNA, 1014 bp, Zea mays
  Clone ID: LIB4738-044-H12_FLI
ccggggcggatcccctcttctgattcccgtctcttcttgcaagagggtgtaagaaaaccaagccgccgccgggatactacactacccagctcctctccagtctcaacccagcccgcctctcgaactctcgctacctgcggctgctatctctttcatctagaggagagtgtaagggcactagatagagagtgatggcttctcctgatccatcggcggcagatgccggcaccgggggcgagtcgacgagccaggcggcggccgtggaaccgatccggatgccgacggtggaggagatcaaggggcaggacatctggaacaactgcgccgttcgcagcgtcgtcagtggcgtcatgggaggcggtcttggtgtgcttatgggacttttctttggagctttggaaaatccgataatggcagagcagatgacagcaaggcagcaaatagtatacacagcaaagcagatgggtagtagaagtataagtaatgccaaaacctttgcagtcatgggtctgattttctcagcagctgaatgtaccatagagaaggttcgggcaaagcatgacactaccaatacagcggtagctggctgtgtcactggaggagctttagctgtaaaaggtggccctaaagctacatgctttggatgtgtggggtttgctgcgttctcagtggcaattgagaagttctttgatcggcatacttgaaagccatgttcgtttgatcccaaaaccatagggattgaggtggattggaagggattaaagaggattttgacttgtaggggatttgatccccctcagtccctatagatcagcacaaaacgaacatgccatgttctgagcatgagcacgttggcagaagaacctgattgtttgcaacatccagtcatgtacaactcatgaaggactgtaatctaaatttttttacttattcccagtggattcgtaattactgaactaccggaacgcctaagagatctaccctgatcaatatcgatgcacgatgacattgacc

SEQ ID NO: 27386 - DNA, 1252 bp, Zea mays
  Clone ID: LIB4738-045-C7_FLI
ccgggatctcctctcctcgtcaccatctcgatcgagctccagagctaaagcagatagaaagctcagagtgagagagcagcatctgatcgatcgaccaattgttcaccttcgtcatgaggtcgacttggttggcatttgccttgtcggcgctcgtcgtcgtctcctcatcagcggcacacgcacacgcctcgccggggaagcttgaggtcggtttctacgagcactcctgcgcacaggccgaggacatcgtgcgcaacgccgtccgccgcggcatcgcccgtgagcccggcgtaggcgcggggctcatccggatgcacttccacgactgcttcgtccggggctgcgacggctccatcctcatcaactccacgcctgacaacaaggccgagaaggactccgtggccaacaaccccagcatgcgcggcttcgacgtcatcgacgacgccaaggccgtcctcgaggcgcactgcccgcgcaccgtctcctgcgccgacatcgtcgcgttcgcggcccgtgacagcacctacctcgccggcggcctggactacaaggtcccgtctggccgccgtgacggccgcgtgtccaaagaggaggaggtgctcgacaacaatgtccccgccccgactgacgaggtcgacgagctcatcgagagcttcgagcgcaaggggctcaacgccgacgacatggtcacgctctccggcgcgcacaccatcggccgctcccactgctcctccttcacgcagcgcctctacaacttcagcgggcagctggggcagacggacccgtccctcgaccccgcctacgccgggcacctcaaggcgcggtgcccttggccgtccagcgacgaccagatggatcccacggtggttccgcttgacccagtcacgccggcgaccttcgacaaccagtactacaagaacgtgctggcacacaaggtcctgttcatctccgacaacacactgctcgacaacccatggacggccggaatggtccacttcaacgccgcagtcgagaaggcatggcaggtcaagttcgccaaggccatggttaagatgggcaaggtccaggtgctcaccggtgacgagggagagatcagggagaagtgcttcgtcgtcaacccacaatactagtcaagtttaattatctaattaccccgcgcgtgttatgtttgtttatacgttccatacatcaacattatgtagagtgtttttcgttctcttcaaggctgtgaaatcaaacaagtttatcaaat

SEQ ID NO: 27387 - DNA, 1957 bp, Zea mays
  Clone ID: LIB4739-002-A9_FLI
ccgggataacagcacctctcgagtctcgacacatagcagctgcttgcctctgcacacgcgctcagtaaggcacatcaggcatccccataagtcataggatcgagctcctgcgcggctccgctgcgtggatccggccatgggctgtccaccgcggctcctctgctgcctcttcctgtcgctgtcgctggcagcggtggtcgcgcgcgccgccacgcggcaccaggagtgggagatcagctaccagttcaagagccccgactgcgtgcggaagctggcggtgaccatcaacggggagacgcccgggccgacgatccgcgcgacgcagggggacaccgtggtggtccgggtgaagaactccctgctgaccgagaacgtggccatccactggcacggcatccggcagcgcggcacgccgtgggccgacggcacggagggcgtgacgcagtgccccatcctccccggggacaccttcacctacgccttcgtggtggaccgcccgggcacgtacatgtaccacgcgcactacgggatgcagcgctccgcggggctcaacgggctcatcgtggtggccgcggcgcccggcgggcccgacgccgagccgtttcgctacgacggcgagcacgacgtgctgctcaacgactggtggcacaagagcacctacgagcaggccgccgggctcgcgtccgcaccgctcgtctgggtcggggagccgcagtcgctgctcatcaacggccgcggcaggttcgtcaactgctcggccgccggggcctgcgacgccgcgcacccggagtgcgccacgcccgtgttcgccgtcgtgcccggcaggacctacaggttccgcatcgccagcgtcacctcgctgtcggcgctcaactttgagatcgagggccacgaaatgacggtggtggaggcggacgggcactacgtgaagccgttcgtggtgaagaacctcaacatctactcgggcgagacctactccgtgctgatcaaggcggaccaggaccccaaccgcaactactggctcgcctccaacgtggtcagccgcgagccgggcacgccggcgggcaccgccgtgctcagctactacggcgggcgcagcagcccgcgcaggtcgccgccgacggcgcctcccgcggggcccgcctggaacgacaccgcgtaccggttccggcagagcgtggcgacggtggcgcacccggcccacgtcgagcctccgccgccgcgcgccgaccgcaccatcctcctgctcaacacacagaacaagatcgacgcgcacatcaagtgggcgctcaacggcgtgtccttcacgctgccgcacacgccctacctggtggccatgaagcgggggctcctggacaccttcgaccagagcccgccgccggagacgtacgcgcaccgggggtacgacgtctacgccgtcccgcccaaccccaacgccaccaccagcgacgggctgaaccgcctgcggttcggctccgtcgtcgacgtggtgctgcagaacgccaacattgctggcgcccaacaagagcgagacgcacccgtggcacctgcacggccacgacttctgggtgctgggctacggcatcggccgcttcgacccggcggtgcacccggcgtcctacaacctcagggaccccattctcaagaacaccgtcgcggtgcacccctacggctggaccgcgctgcggttcagggccgacaaccccggcgtctgggcgttccattgccacatcgagtcccatttcttcatggggatgggcatcgccttcgaggaaggcgtcgaccgcgtcgctccgctcccgccacagatcatggggtgcgggaaaaccaggggtggccactaactgatgttgttcagaagctgaactgaaccaccgttgatgatccatttcgttcttttgtttcttaattattacaatccatctaataagatttgtatgggcattttttttatcag

SEQ ID NO: 27388 - DNA, 1663 bp, Zea mays
  Clone ID: LIB4739-002-B6_FLI
ctcgaggccggccggggtctgcaaccttcactcccgactccacctctctccgatcgtctcatcttcttccttctcttccaccacatccttggcatctcatccggatcgaccagtacacgccccagtagtactaaagaaccagtttctgagtaaaacatggcggcgtcgccttccccgtccggcagcggcggcggcaaggccggcgtggaccggatcaagggcccctggagccccgaggaggacgaggccctgcagcgcctcgtgcgccgccacggcgcgcgcaactggtccctcatcagccgctccgtcccgggccggtccggcaagtcgtgccgcctccggtggtgcaaccagctgtcgccgcgggtggagcaccgccccttcacgcccgacgaggacgacgccatcctccgcgcgcacgccaggttcggcaacaagtgggccaccatcgcgcgcctcctctccggacgcacggacaacgccatcaagaaccactggaactccacgctcaagcgcgagcgcgagcgcgagcgcgagtactacgccgatgcgcgccccggccccggcgaccagcgctcgctcaagcgcaccagcagcgacgggccccccggaagcccgtccgggtccgacctcagcgactccagccaccagagccttcccaccgtgatgccgtcagccgcttctaccgccgtcacctcccagcagcagctacaacacgtgtactaccgccccgtgccgcgcgcgggcggcgtggtcctgctcccggtggcgccgccttctccgcaggctcctccagcaacctccttgtcgttgtccctctccctgccagggctggaccagcagcccgaaccatccccgccgccgccgccaacacctcaagcacaagcaagctcgccgttgagcgcggagttcctgttgatgatgcaggagatgatccggatcgaggtccggaattacatgtccgggtcgggcttcgacgcacgcgccgtgatgggcatggccgagatcgactagtttcagcggcaggggtcccaagacaacgaatcgccgatcgatcccagattcctttgttaatcagcagagcagaggccttcgttccatgctgctgctgtgctgcctgctggtggtactcagtataaccagtagagtttagagtacagtaccagagagacggacggacggacggcgagacctccgatatcgtcatgctgttcttgtacaggagacagcaaaaaagggatcgagaagatggaccagggagaagagagaggactcactcgtgtttcttggctcgtgcagatttgccttttggtttcgagtgcaaaattggaccactaagataaaaaggggtctcttcgattggcgggctcaaaaatttggtcgttcttagattattaggctagatgttgggattttatttcctaggtagtaagttttaaaaatatggattaaattttagtttagtgtgtcctaacacccactgaccaccgtgcacacacagaaccgtacggacaacactagaatggtctgcctgggagctgaggagctctttttttttgtagttgtggaccactgctgagctacttctagatggtatggtatggtatggatggatggaaggaaaggacgaagagaaaatatatggccatgatggctggcagac

SEQ ID NO: 27389 - DNA, 1077 bp, Zea mays
  Clone ID: LIB4730-010-H6_FLI
ggtcgtacactcgtactccggcccggcccggtccggcctaaacacgcattcttccttctcccaacgacggaagaaacttcctgcctggatatccatccatccaaccgctcctccctcgtccggcaggcgacgactcgattccttcctcccttcctcctcctcgtctctttcatcggcgactccgatcttctctgccgtcgccgccgccgccaagagatcgacccgaccccgagcgcccgacccgaccccccaatccaaccaccaaccgccggcgcgcgcggaagattcagatttggcccctcgccggtaagggagaaagcgaggatgggtgcgtggatgtcgcgcgtgtggttcctcatgttcccagcgcgggagtacaagctcgtcgttgtggggctcgacaacgcggggaagaccaccacgctctacaagctccacctcggcgaggccgtcaccgccgcgcccaccatcggcagcaacgttgaggaggtcgtcttcaagaacctgcgcttcgaggtctgggatctaggagggcaagaaagcctgcgcacttcgtgggcgacgtactaccggggaacacacgccgtgatcgtggtgatcgacagcacggaccgcgcccggatcaacaccatcaaggacgagctgttccggctgctgcagcacgcggacctggagggcgcggtggtcctggtgttcgcgaataagcaggacctgaaggacgccatggcacccgcggagatcaccgatgccctctcgctccacagcataaaggaccacgactggcacatccaggcctcgtgtgccatcaccggcgatggcctctacgacggcctgggctggatcgcgcagaaagtcgccggcaaggcgaccgcgagctgacgtgcaggagagcagtggttgtgtgttcatgaacggattggatttgttgaagggtaggggtggtggcagggcgggtttgtttcttcctcggcgtcacgcccaatgcttatttatgtttttttaagaaaagtggcttgaaactttgtgtctgtattccaatcaatatgaatatatgaaaattgggaaatttgcatgctc

SEQ ID NO: 27390 - DNA, 1357 bp, Zea mays
  Clone ID: LIB4730-011-D6_FLI
ctcgaggccggccgggactccaattccaaacactcgcccgtccccgtcgccccccatcccacaccaaccctctgtgcctcggtccctccgcccgtacgcgcgacgagagacacgatgcggcggtccctaccccttctcctcgcgcggcaggtggcgcggcggcggcggctgagcaacgtgccggagtccaccgtctacgggggcccacgcccgcaggagtcctcggcggcgcggcgcgtgacggtgaccacactccgtgggaagcaccgccgcggggagcccatcaccgtcgtcaccgcctacaactacccctcggcggtccacgtcgactccgccggcatcgacgtctgcctcgtcggggactccgccgccatggtcgtccacggccacgacaccacgctccccatcacgctcgacatcatgctcgagcactgccgcgccgtggcccggggcgcgccgcgcccgctcctcgtcggggatctcccattcggctgctacgagtcctccgccgcccaggctgttgactcagccgtgagggtcctcaaggaaggtggaatggatgcgatcaagctggaagggggtgccccatcgaggatcactgcagccaaggctattgtggaggctggaatcgctgtcatggggcatgttggcctcacaccgcaagctattagtgttctcggtggatttaggcctcaagggaagacggttgacagtgctataaaggttgtggagacagcacttgccttgcaggaggctggatgcttctcggttgtgttggagtgtgtgcctgctccagtggcagcagctgcaacatcagcattgaaaatcccaaccattggcattggggctggaccattctgtagtggccaggtcttggtgtaccatgacttgttagggatgctgcaacacccacatcatgccaaggtcacaccaaaattctgtaaacaatttggtaacgtgggcgatgtaatcaacaaggcgctatcagagtacaagcaagaagtggaggctcaggctttccctggtccaagccacacaccgtataagataactcccacagatgttgacggctttgcagatgcactgcagaagatgggtttgagtgaagccgcagatgccgcagccgccgctgctgaaaacagggagaaaggtggagaaccaaaaggagagtagctaatctaataatgtctgttgttttcagcagatgcacctagacctaaagtagagaatgtgagggcagattacctagcatattaacggtgtcctgcactagaacaatttttgccagattgcagccacataaagtcagacagactgcaggtcatacagaatcgtttggctttggatagcctccgag

SEQ ID NO: 27391 - DNA, 1309 bp, Zea mays
  Clone ID: LIB4730-012-A2_FLI
ctcgaggccggccggctgcctactctactcccggtaccggaggccggagctatccaattcccttcccacccagaccgcgatccctaaccctacccaatgtcctcgccgccgccggcttcgcccatggccgccgagaatgaggcctgcgactgggcggagatgccgtcggacgcgctcgcggccgtgttcgcgaagctggacgtggccgagatcctgtccggcgccgggctggtctgccgcgcgtggcaccgtctcgcggcctcggaccctacgctgtggcgccgcgtcgacatgtgctaccagggggaccagctgcagaccgaggaggtcgaggccatggcgcgcgccgcggtcgaccgctctgcgggcaccatggaggcgttctgtgccgagaccttcgtcaacgacgacctgctccgctacatctctcagagggccccctcattgaagagcctccatctctgcctgtgccattacgtcactaatcaaggttttgcagaggcagttaattgcttccctcagctcaaggagctagacattacattctgctcattgtatggcatcgtgtgtgagactgctgggagagcctgcccgcagcttaaatgcttcaggttgaatgagcgctggtctattcttcaaagcgagtttgcaccctacgagggcatggatgatgacacggaagcattagggatcgctagcaccatgcctgggctccaagaacttcagttgatcggtaacaacctgaccaatgacggactcgtggcaatccttgaccgttgccctcgccttgaatcccttgacattcgccaatgctacaacatacagatggacgacgcactgagatcgaaatgcgctaggatacgagatctgaagcttcctcacgactccatctccgacttcaagtatcgggcttacatcgtcagcagcatagccaactcgggctctgattttgaggttgatatgtatgatgatctgctggatgtggtcactgaagatgatgatgctgatttcgatgacatggatgatttcgatgatacagtctcagatggaggcatgtacgatgatgacttggatatctgaaattaggaatcggttcaaacagcttttccgtggaccatgtaagtgctgttagctggaatggtttcccgtcccttttctttgagattcgggtagctatgatggaatctccctgatgttcatacttctgcgcctctccatttgttaagaagctggagtagctgaactggttctaatcgatgtacaactgttgtttttttattctgaacctttgttaattggtattttaacg

SEQ ID NO: 27392 - DNA, 1005 bp, Zea mays
  Clone ID: LIB4730-012-A5_FLI
ccgggcctcacactcccatccagccgccaccaggtgcagagtctttcgtcatctcttctccggcgaagaacccccagtcgcccaccagatcacttgttaaactttgttgaggggtgatggcggtttctttcgcaaacctcaactccgaggcagggcttaaaaagcttgatgagtaccttctcactcgcagctacatcactggctaccaagcttccaaggatgacttggctgtctacacttcgttttcggctgctccctcgtccaagtatatcaacgtagcaaggtggtttaaccacattgatgcgctcgtgaggctgagcggaattactgcagagggccaaggtgtgaaggttgaatcctcagcagttccttcagccccaactccagatgttgctgaagcacaggccccagttgctgaggaggacgacgacgatgatgttgacctttttggtgaggagaccgaagatgagaagaaggctgctgaagagcgtgctgcagctgccaaggcttctggcaagaagaaagaatctgggaagtcatcagttttacttgatgtgaagccatgggacgatgagactgacatggccaagctcgaggaagctgttaggagtgtccagatggaagggctgctctggggcgcatccaagcttgtcccagttggatatggtatcaagaagctgcaaatcatgatgaccatcgtcgacgaccttgtctctgtcgacactctcattgaggactatctgtgcgctgagccagtgaacgagtacgtgcagagctgcgacatagttgccttcaacaagatctaggcgtgacttccgatcagtccttctcctggggtgctggcgatggtggtggctgggcaatgcaccagcctaatttatccatagctatatgtctgctttgtgtggccagtgatattgccgtgagtatttttggatcctattcgagtcgaatgtaccagtaccagagttaatttgctttaattcgaaacaccgttccagttgg

SEQ ID NO: 27393 - DNA, 864 bp, Zea mays
  Clone ID: LIB4730-012-B6_FLI
ccggggccccggtgtgttccccacctaaccccaccccgaatccaccatggccgccggctctggccccgccccgcccgcggaagcgcagcccccgccgccgatccaccatctgccgccggacgcgctccacaacgtgctgctccgcctgcagctgcgcgacgccgtcgtgtgccgccccgtctcgcgcctcttccacgagaccctctcgccgcagctcctcgcgctgctccccagcctgcgcctcctcctcctccgccacccgcgtcccgacggcggcggctgcctccacgccttcgaccccgcgcgccgcacctggctccgcctccccttcgcccacttcctcccctaccactccttctcccccgtcgcctcatccacgtccctcctctacctctgggtcgagacctcctcctccacctcgcccctggcactccccccgtccacctcctccgcgtcttccgcctcgcccgtgcacccgcccaaatcgctcgccgtctgcaaccccttcgccggcacgtaccgcctcttgccccagctcggatccgcctgggcgcgccacggcaccgtcctcgccggccccgccggcacggtgctcgtcctcaccgagctcgccgcgctatcctacaccccctccggatccgccaagtggatgaagcatcccctctctctgccgtccaagccgcggagccccatactggcctccgacgccgtcttcgcgctctgcgacgtcggcacgccgtggcgcagccagtggaagctcttctcctgcccgcttgccatgctcacggggggctgggcgcccgtggagcgagcggcgtggggagacgtcttcgaggtcctcaagcgtccccggctcctggctgg

SEQ ID NO: 27394 - DNA, 600 bp, Zea mays
  Clone ID: LIB4730-012-H12_FLI
tcgaggccggccgggctagctagcgcgggcgccgcagacccctccccttcgctcccttccctagcgccgacgcccaccagacgagatggccccgaagaaggacaaggccccgccgccgtcgtcgaagccggccaagtccggtggtggcaagcaaaagaagaagaagtggagcaagggaaagctaaaggagaaggtaaacaacgcggtgctgttcgaccaggctacctacgacaagctgctctcggaggtgcccaagtacaagcaaatcaccccttccatcctctccgagcgtctgaggatcaacggctcccttgctcggagggccatcaaggacttgatggtctcggtccactcaagccagcaaatctacaccagggcaaccaatacataaggatggggaagaggtctaaaatgcattgtctgccctctctgtgccctctctgcaggaggagcttgtctttagaacagttgccatctttgtcaagagttgccaatgttatgttactggtgatgagttccaggtgaccgcaacattttagagattttgagtatttctattagttgggtactatggtttgccaattataagttacttggcct

SEQ ID NO: 27395 - DNA, 1303 bp, Zea mays
  Clone ID: LIB4730-012-H2_FLI
ccgggattccccgtttgccttgtttaccattcctccccaaaacacatcctgcgatcctcgaagcctccgccgagcatcgatcatgtcggcctactgcggcaagtacgcggatgagctcatcaagaatgctgcctacatcggcacccctggcaagggtatccttgctgctgatgagtcaactggcaccattggcaagcgcctttccagcatcaatgtcgagaacgtggaggagaaccggcgggctctccgtgagctcctgttctgctgccctggtgccctccagtacatcagcggtgtgatcctcttcgaggagaccctctaccagaagaccaaggatggcaagccttttgtcgatgtcctcaaggagggaggcgtcctccctggcatcaaggtcgacaagggcaccattgaggttgttggcaccgacaaggagaccaccacccagggccacgatgacctcggcaagcgctgcgctaagtactacgaggccggtgcccgctttgccaagtggcgtgctgttctcaagattggccccaacgagccgtcacagcttgccattgacctgaatgctcagggtctggctcgctacgccatcatctgccaggagaacggtctggtgccaattgtgagcctgagatccttgttgatggccctcatgacattgatcgctgcgcttacgtcactgagacagtccttgctgcctgctacaaggctctcaacgagcaccatgtcctcctggagggtaccctcctgaagcccaacatggtgactcctggctccgactctaagaaggtgacacctgaggtgatcgcccagtacaccgtccgtaccctccagaggaccgtccctgctgctgtgcctgctgttgtcttcctctccggtggacagagcgaggaggaggccaccctgaatctcaatgccatgaacaagctcagcaccaagaagccatgggccctgtccttctccttcggccgtgccctccaggcgagcaccctcaaggcctgggctggcaaggtggagaacgtggagaaggctagagcggccttcctcgccaggtgcaaggccaactccgaggctaccctcggcacctacaagggtgatgctgccgccgacaccgagagccttcacgtcaaggactacaagtactgagttgcttctctttgcgatcccgttgttttggaactcctgcctgcgagtaggttgctgagtgttgtttgcttgttagagcttttatattcggacatgaaaaaaacatgcttcctatgtggatgatggttatctttatattcgtatattaactacg

SEQ ID NO: 27396 - DNA, 934 bp, Zea mays
  Clone ID: LIB4730-014-B1_FLI
ccgggacaaagagcatggccgggaaggagatgacgccgaactcgaaggcggcggcgccaccggcgacgatacgcctcgtgaacttcatctccgaagaccagcttgacgaggtgaagcggacacgaggggagcgtgtggaggacggcaccgcgcagcgcgacaaacccctcttccagatcctacaggagaacaaggagaagaaggacgccgagttcaatgagcgtttcaagcacagacctccaaaggctttggatgaggatgagacagagtttcttgataaattggctttgtcaagaaaggaatatgaacagcaggtggccaatgaagaagcagaacagctccgcggtttccatgaggctgtagctgcacggtccaccgttgttcatgaactcgagactcctacagtatctagacctgaggagagcagacctaagccacctacaaagaggagccagcctgcgctcctgaagaacataataatttccgtgaagccgcatgccaagaaaccaaaggttgagacggaagctaaacctgctcccgaggagcggcggccttcagataggcacggctcagatcagaagcaaccagacgacacaaaggcaacgcttggctctctagtggcttatgacgacgacgacgacgaaagtggtgaggacgttgactgacagtggcggcgtttgagaattcagctgtggataacccgcaagatgatggataactgcgttcgagtgttcaggtatggatatggataccgcaagaggttactgggagagatgctgcagccttttgggttttcctcgaggagaggcacttctattgcattctaaaaatcggaagcctttacagaaattttcttgtatgtattgtacaatttgaaaacgagccgggaacattactaatggttggtacgtacgttggtaccacgttgttgacg

SEQ ID NO: 27397 - DNA, 543 bp, Zea mays
  Clone ID: LIB4730-014-D6_FLI
ccgggatccaacccacacacaggctgaccccaccaacagcaagcgaaaatctcccgatcccctctagtctccgcggcgaagatgtcggggcgcggcaagggcgggaagggcctgggcaagggcggagcgaagcgccaccggaaggtgctccgcgacaacatccaggggatcacgaagccggcgatccggcggctggcgcgcaggggcggcgtgaagcgcatctccgggctcatctacgaggagacccgcggcgtcctcaagatcttcctggagaacgtgatccgcgacgccgtcacctacaccgagcacgcgcgccgcaagaccgtcacagccatggacgtcgtctacgcactcaagcgccagggccgcaccctctacggcttcggcggctaggctaggccggtcgcgcctcgttgtcgtcgctgcggttctattgtttttgcaattcgcaagttgtggctgggtggcgaaaatgctggttactgtaccactagatcaagcatgctgtgcgtgtctgaagaaatgccaattgtgacttgctgc

SEQ ID NO: 27398 - DNA, 1719 bp, Zea mays
  Clone ID: LIB4730-014-F9_FLI
attccctcccgccgccgccgccgctggagacgctgaaccacgacagcttcccagggttcgtcctcccgctggaatagtaagtgaccggagaaaagcagcacaagagagatgtggtacctatgcgtcttctaccacaggctcctggactaccggcgaccggaggtggagtccctcgccgagctctttgccggcgcaggcgcccgtgaatccgtcgaatggcgcatgccggagaaccaccacgtagactcacccttccacctcgttcgcctccctggagacgagcgcctcgccgctcaggtcgccaaccgcagcttgttggtgaagggggtctacgagctctggggctatggcactacctacgaggagctggagaagtcggtcagggagtaccccgacgagaggaagcttccgttcctggtcccggaaagcagcttcaagatcgttatcgacagcttcggcaaggtgatcagctcccaagagcagaacgagatcatacagagcctcacttacataccattcaagggacgtgttaatttgaagaagcctgatcacagattctttgtcatggagaccgatgactatgggtcgaacaatggtctcccaccggttgtcaagaggtcgatattctttggccgggaggttggagcagctgataggcatctcctgccaacataccagctcaagagtaggaagtacattggccccactgcaatggatgctgaaatggctttcctcatggccaatcagggtctggcctcgcctgggaagcttgtctatgacccttttgttgggaccgggagcattttggttgcagctgcacattttggagctatgacgatgggtgcagatatcgatataagggttgtaagggatggtcgtggccccgattgcaacgtttggagcaactttgagcagtataagttaccagagcctttgtgtttgctaagggcagacaacaatctcccaccctggcgtcctggattgaaggagatgttcgatgcaataatttgtgacccaccatatggagtccgggccggtggccggaagtctggtggccggaagctcataaaaggcgtcaaaggcccttacacagtgcctgatgagaaacgggacaatcacatcccatcaaccgccccatatagcctcgcagagtgcgtccatgacctcctccaccttgccgcaaggatggtagtcatgggtggcaggctcgtcttcttctaccctgtactgcgaggtgaagatggcactgcgaacccgcagttccctgagcacccctgcttcaagttaatcacctcctctgagcagatcctgagctttcggtacagtcgggttctgctgaccatggtgaaggttgcaccttacaccgaggagatcgagaagttggccgcagagcggcaccgggagctcagggagaaccaccagaagtggatggaggagggcaacctccattccgccgtgttcgagccagcccaggatgggaagcctgatagagactccaagcccaaatacagaggcaagtatgtgtagcagcgcagatactaacttgttgaatttagtggaaacacatttttggtggtttcctgttctgcatcctgtaccaaattttatgagctagtgtgttggcaggcgctgcgagatgtaccactgttccagagtaccatccaaatcttgtcagtccacttgatggatgaggaagtgtaattgcagcttaattgaccg

SEQ ID NO: 27399 - DNA, 1175 bp, Zea mays
  Clone ID: LIB4730-015-C4_FLI
ctcgaggccggccggaccaacaaaaaacctcggagctagcagcaagatcttagcacaaacaccacaccccacaggctgattaatcactccaagactaatcaaacgaacgcttagctaatagcgcgcgatctttttttcccctccccctcttgagcgtgcgagaagagatggcgctgaacggcggcaagacgttggtgcaggacgaggagaagcagcagcttctcctagagaagcacaccgagaagcacttcaccgccggcgaggtggtccgggacatcatcatcggcgtctccgacggcctcaccgtgcccttcgcgctcgccgcggggctgtccggcgccaacgcctcctccgcgctcgtgctcaccgcggggctcgccgaggtcgccgccggcgccatctccatggggctcggagggtacctggcggcgaagagcgaggctgaccactacaaccgggagctgcagcgcgagcaggacgagatcgacaccgtccccgacgtcgaggccgccgagatcgccgacatcctgtcgcagtacgggctgggcccggaggagtacggccccgtggtgacctccctccgtaacaaccccaaggcgtggctggagttcatgatgaagttcgagctcgggctggagaggcccgagccccggcgcgcgctggtgagcgccgccaccatcgcgctgtcctacgtcgcgggcgggctggtgccgctgctcccctacatgttcgtgccggaggccgcgcgcgccatggccgtgtccgtcgccgtgacgctcgcggcgctgctcttcttcggcttcgtcaagggccgcttcacgggcgaccgccccttcttcagcgccgtccagaccaccgtcgtcggcgcgctcgcctccgccgccgccttcgccatggccagggccgtgcagtccatatgaagactggtgtgatgcagctaaaatagtgaagcaggccggtcgccgcatgccccatatcaatcatcaccggccggctaggttggcgagggaaaataagtgcagctatatatgcatacgtggctacggtcactgctttctttgtttgatggctgcgtggtgtactattgtcagatgtggattatttaggtcaagtcgattccaaactgtggcccgctgggctttggatccatttgttttatctatgtactggtaagc

SEQ ID NO: 27400 - DNA, 1302 bp, Zea mays
  Clone ID: LIB4730-015-F2_FLI
ccgggatggacgcacgcctcccggcgcgcccaccccgcccgcgtgcgcgtgcccctgtccgcctcccgtttgccgcctccaccgcaacgcggcgcgcggggtggtggtgccctcgcggtcctcgtgtcgatcccagcggcaggggtgcctgtgcctttgcttcccctggccgttgcccgcgcctcgcggtcgcgcacctgaaccggagccccgcgtcaaatctagggttgcatccgcgccgccccctcctcccgagactcccagcggctggaaccagaacgagggtgacaggcgacgaaagctgcgacggacgccccctcgtcgaatgcactggcgaccgttccgtcgaggagcagccggagcacgcaggaggttagtttagttgagggaaaagctttgaaaatgtcatccaccgtgccgaagtcatcaaatatcttctggcatgattgtccagttggcaagactgatcgccagaagctactcaagcagaaaggctgtgttgtctggattacaggccttagtggttcaggtaaaagtaccttggcatgtacattaggccgtgagctccacacaagagggaagcttgcatatgtccttgacggtgataacttaaggcatggtctgaacaaggatcttggcttcaaagctgaagaccgtgctgaaaatataaggagagttggtgaagtagcaaagttatttgcagatgcgggccttgtatgtattgcaagtttgatatctccatataggagagaccgtgaatcttgccgtgcattgttgtctgatagtagcttcattgaagttttcttgaacatgtccttggaattatgtgaagcaagagatccaaagggcttctataagctcgctcgtgcaggaaaaataaagggttttacaggaatagatgacccttatgaagcaccactgaattgtgagattgagatcaaagaggtagatggtgtatgccctccgcctgctgagatggcagggcaagttgttacttaccttgaggagaaaggcttcctgcacgagtaggctgaatccaagcaacatctggggaagatttcagtaagactagcgcagaataagtcaaaggcgctggcagttacggtatagcagttgcatagattggcctcaatgccttagtattttctttccgtacttcctctgccacaggccccatgcaatttcattcagatgagcctggatggttcctaatttctttgacctctagagtagattacttgtaatgcaactctgataaccacttggggcagtatcaatgtggcaatcgcaatcctcacggac

SEQ ID NO: 27401 - DNA, 668 bp, Zea mays
  Clone ID: LIB4730-015-G8_FLI
ctcgaggccggccgggtgtaaaaccgtccgacgcgagccccacctccgcgctcgcacgcggaaggagagggacgagggagccaccgtcaccgagcgcggttacaagaaaatccaatctctcccccacgctcgtttcgactcgcgccatggaggcgcaggcgcaggacaacagggcggaggatggggacggcgcgcggcaacacgtagccggcggcgtcgcggcgacggggatggctatgggcgcgatccccatgcacgggttcatggtcccgaagccagagccggtggagttcttcggcgggatggccgtggtgcgaagcaagccgccgccgcggaaccgcgaccggcacaccaaggtggagggccgggggcggcggatccgcatgcccgcggcgtgcgcggccaggatcttccagctgacgcgggagctagggcacaagtccgacggcgagaccatccggtggctgctgcagcagtcggagcccgccatcatcgccgccaccggcaccggcacggtcccggcgatcgcgaccacggtggacggcgtgctccgcatccccacgcagtcctcgtcgtcctccagcccctcgtccctcaccaccgtggtcgacggcgacgaggcgtccgccaagcgccgccgcaagctgcagccgacgcgagcggccctc

SEQ ID NO: 27402 - DNA, 1631 bp, Zea mays
  Clone ID: LIB4730-015-H5_FLI
actccccttcgtccctttctctctcttcacactcgcctcgccattaaagctccaaaaaagaaaaaaaggctgcgaaaaaaatcatcttctcttctcctaaaatcttccaccttgaaccgtccctgtccgcgaatttctagatgccccgatcgcttccgatttttttctggatttctccgattttttgaagtatttttccttgtggacggtttcattgccattcctcgacggggttagggtttgcggggatgagggtgcacggcgaggtgtcggacgatgaggcggccgtggctgtggttggggaaacggtgccctcctcgccgcctcccgcctccgtggtgcagccgctggtggtggggtacgccctcaccaagaagaaagtcaagagcttcctgcagcccaagctgctcgcgctggccaggaagaaaggcattcatttcgtatcaattgatgagacttgccccctctctgaacaaggtccatttgacatcattttgcacaagcttactagtaaggagtggcagcaagttttggaggactatcgtgaagagcatccagaagtgactgtcctcgacccaccaaatgctatccaacatttgcacaatcgccaatcaatgctacaagaagttgctgatttgaacctgtccaatggttatggagaggtttgcgctccacgacaactagtcatcatgaaagatccgtcttccatacctgatgcagttgccaaggctggactaaccttgcctttggttgccaaaccattggtcgctgatggtacatcaaaatctcatgagctatcccttgcatatgtggaagcatcattgcctttgcttgaccctcctttggttctccaggaattgtcaatcatggtgggatcctatttaaggtatatattgttggtgaaacaatacaggtagtccgcaggttttcacttcctgatgttaatacatatgacctgggaaacaatgacggtatctttcgattcccaagagtttcttgtgctacaaataatgcagaagatgcagatgttgacccttgtattgcagaacttcctccaaagccacttcttgagaaacttggccgggagcttcgacgccggctgggtcttaggctgtttaacatagatatgattagagaacatggaagaaaggaccggtactatgtcattgacatcaactattttcctggatatggcaagatgccaggatatgagcacatattcactgacttcctgctaagcctcgtgcaaagcaagtacaagaggctaagtgggagctgaagcgtagagaagatttactttcgatggagactattaacagatgccagctagcctggccatataacagtggcagctagaaaggtcttccaggttgtacatagcaagggggtgggtcttagcatgaatgcggtgtttgggccggggccttgactgaaggcgcatagcagaactaagataaaaaatgcagtgtttgggccggggcagtatctgaagaaaggttttggctccgtgcccagcctactgtgtaattcgtttgaccgagtggccgacctgtgtaaatcgttttaccgagtgccgacctgggcttctttagtttcaaaaacaaacaaacaaaacctttgcttcgttttcg

SEQ ID NO: 27403 - DNA, 1407 bp, Zea mays
  Clone ID: LIB4730-016-A3_FLI
tcccgctcccgtgcacttgtcactgcgcctagcccgctcgctcgctcgctcccactcccgtacccatgtatcctctcaaccgtgaccagcctgtgccgcaacgttcttgcctctgcctcgtcgcgccatgtacagagcgaccccattcaacgacgggtgaagaaattgggttgtggaatgcatctgcagagattcccctttcgcagttagcgtcaggaaggctagatccggaggcacaccgcccggagggagagctggaacaatccaacgtcgattagatgcatcggggtgtgcttcgtcccataagattcgaagtccaaatgccagaggatctgaccaattctactcaaatcgacggggaggaggcgtagatgggtgagatgctgattgcaattattatatgtagatccacacctacagctgccacagcgggtggtgcttagcttaggctagcctagctgcgcctgcgcatgctcgtgaccaatggcgtccagcaaggtgccactgttcctcgtcctcaacctcctgctcttcgcggcggccaacgcctgcccttactgcccgggcaacaatggccacggtagcagcgggcaccatggcggcagtgggcatggcggcggtggcaccggcggttccggtggcggcagcgggccaggtgggggcagcagcggcggagggtacggtccgatcggtggtggtggtggcagcggcggcggaggagggtacggtccgatcggtgatggtggcagcggcggtgggatcggacccatcggaggcggcagcggggggatcggacccataggaggtggcagcggtggtgggtacggccccatcggtggcggtggcggtggaggtgggagcggtggcggtggcggtggcaacgatggcacgagcggctggtacggccattgcccgacaaacgcgctgaagctcggcgtgtgcgccaacgtgctggatctgatcaaggccaaggtcggcgtgccggtggacgagccgtgctgcccgctgctgaacgggctcgtggagctcgaagccgccgtgtgcctctgcacggccatcaaggccaacgtgctggggctcaacctcaacatccccgtcaacctcagcctcgtcctcaacttctgcggcaagggcgtccccacgggcttcaagtgcctttaaccatgcatgcacatcatgtgtgcgtgcgtgcacgtacgtacgtagtatccaagaccacgcgatgcgtgagtatgacgaagaatacgcgcgtgcgccatgcttgccggccggggatacggtgtttgtggtaatgctgttagtttcgtttcttcagtgtagtatgtagccagggcatgcatgtgtccaagtccaagttcgactttgggttgcttgtacttctccatttcataattgaaatcatattcc

SEQ ID NO: 27404 - DNA, 1233 bp, Zea mays
  Clone ID: LIB4730-016-F2_FLI
ctcgaggccggccgggagatctcccccatttctcctccacgccgccccctccgcatttcccgtgctcctcttgttccggcatggcggagcagacgcagccacaaggggaaggcggcgctagccccaagcacgagtccctgatggagaagctcgccgacaagctccacgtcggcggcggcaaggccgactcctcctcctcctcggactccgacagtgacgagcggccccgcccctcggcaccgcctgccgacgagctcaagcagtcctccttctccgacgccgccgccacggcggccgccgaggccaaagccaaggtgttccgccttttcggccgcgagcagcccatccacaaggccctcggtggcggcaagcctgctgatgtgttcttgtggaggaacaagaacatctctgctggaatacttggtggtgccacagcaatctggatcttatttgaattgcttggctaccatcttcttacttttgtttgccatggtctcatattcaccctgggtgttctctttctctggtccaatgcttcatcgtttatccacaaggctccaccaaagatcccagaggtgatcattcctgaagatttagttgtcaacattgcgctatccactcgttacgagatcaacagagcctttgccaatctccgccagattgctcttggccgggacctaaagaagttcctaatggttattgctgggttttggttgctttctgttcttggaagctgctgcaacttcttgaccttagtttacattgtctttgtggtgctgcacacagtacctgtcctgtatgagaagtacgaggatcagattgactcgtatggcgagaaggggtgggttgaaattaagaagcagtatgccgtgttcgatgagaaggttctgagcaaagtacccaggggtcctgcgaaagacaagaagcactagatgcaagtgattcgaagtccctgttagtagggaatgctagcaaaaccggttcgagtttctccggaggggcagcacttgtgggtgtgagcaccagtttgccacctgtgcattacgttgcgtatggctgcttagttgtttggtcttgatgggagtaagccgaattgctagctttgcgcttcatcagtgatgcagatgcagcatacgaatttctgtagtgctgtttgagtttgatctgtgttgtatgatgtgtgcagactgtgcttgcgacacttttttggtacttataatcgatgcattttgg

SEQ ID NO: 27405 - DNA, 1609 bp, Zea mays
  Clone ID: LIB4730-017-C4_FLI
ccgggacatcccgtcgcatcccatcccactaccacccatctcgtcgtccgccgattcgatccggttcttccaacccaggggcagtgatggcgacgaagaggagcgtgggcaccctcggcgaggcggatctgaaggggaagaaggtgttcgtgcgcgccgacctcaacgtcccgctcgacgatgcccagaagatcaccgacgacacccgcatccgcgcctccgtccccaccatcaagttcctcctcgagaagggcgccaaggtcatcctcgccagccacctgggtcgtccaaaaggtgtcaccccaaagtacagcttgaagcctcttgttccacgcttgtctgagctccttggagttgaagtcgtgatggccaatgattgcattggtgaggaagtcgagaagttggctgccgctttgccagaaggtggagttctgctcctagagaatgttagattctacaaggaggaagaggagaacgaacctgagtttgctaagaagcttgcatctgttgctgacctttatgtcaatgatgcttttggcacggcacacagagctcatgcttcaaccgaaggagttaccaagtatttgaagcctgctgttgctggcttcctcatgcagaaggaacttgactaccttgttggagctgttgccaacccaaagaagccatttgccgccattgttggtggatccaaggtctcaaccaagattggtgtcattgagtcgttgctggcgaaggtcgatatcctcatccttggtggtggtatgatctacacattttacaaggcacagggatattctgttggaaaatctctcgtggaagaggataaactcgagctcgcaacttctcttattgagaaggcgaaggcaaagggggtttctcttttgcttcccactgatattgtagtagcggacaagtttgcagccgatgctgagagcaagattgtccctgccactgctatccctgatgactggatgggtcttgatgttggccctgatgccaccaaaacattcgacgaagcattggacaccaccaagactgttatttggaacggccccatgggagtgtttgagttccagaagtttgcagctggcaccgaggcgattgccaagaagctagctgagcttacaaccacgaagggtgtcactaccatcatcggcggtggcgactctgtcgctgccgtcgagaaggctgggctggccgacaagatgagccacatttcgaccggcggcggtgcgagcttggaactcttggaaggcaagactctacctggtgtccttgccctcgatgacgcctagatccgctgctgctgctgctactcaggttctgccagctttgcgtgtcatcttgtttcggaccttggtgtagcactgcaaggctaaggtttactcctccacacatggactttcgaggataggcttgccaccgtgttttgctagatgagtcgtgaaataagcttttacttcctcgctgctgtgggtgaagtgactggaattcggaaatttggaactaacaaaaccccccgtggatttgtatgatatgttttgttcgacagtttgcgtcccatctttcactgtggtatctggtatggtatgttcttattttttgtccc

SEQ ID NO: 27406 - DNA, 1014 bp, Zea mays
  Clone ID: LIB4730-018-B2_FLI
acttgcttcaatactagctcgctcaccactcaccagtcaccagtccagcaagcaacaacagaggcgtaggaggaagcttgttttggaccgagcaagcgagccagccgagcgtgggagagagagaaagaggaattaattgatgggcgaggaggccagctgcgacgccgtcagcctgacggaggccggcaccaacgccaagccggtgggcaaggaggtcggccgcgagccggctgcagcccccgccgccgcggccgacccccggctgcagggcatttccgacgccatccgcgtcgtgccgcacttccccaagcaaggcatcatgttcaacgacatcaccacgctgctgctgcgccccagggtgttcaaggacgccgtcgacctgttcgtcgagcggtaccgcgggatgggcatcgacgccgtcgccgggattgaggccaggggcttcgtgttcggcccggcgatcgcgctggctattggcgccaagttcatacctctgcggaagccaaggaagctcccaggtgaggtgatctccgagaagtacgttctcgagtacgggactgattgcctggagatgcgtgtcggggccatcgagcgatccggcgagcgggtgctggtcatcgacgacctggttgcgaccggagggacactctgtgctgcgatcaggcttctagaacgtgctggagccgatgtggtcgagtgcgcgtgtgtcattgggctcccgaaattcaaggatttgtacaagttgaatggaaaacctgtatacgtgctggttgagtctcgtgaataatcggagaaatgacaacttattctcaggtgtcagagtgatcagggatattggctgtttactccttgctactgcgattgaacagtggagggacgacatggacaaggacaagtatattcggtgcatcactaagtcttggtgaggggagagattgtagtgttttaggctgagtagtgaagagcctgtagttctgcacggaacatgcatgatggttattagtcgatgcaacg

SEQ ID NO: 27407 - DNA, 1644 bp, Zea mays
  Clone ID: LIB4730-018-H11_FLI
aagaggaggggacaccgccgctccactctctgcagctcagcagcagcagcagcagcatctctgagagagcccagagagtaggcaactaggcatggagatcgagacggaagctccgggtagcgagaaggcgaggagctggagagctaatgcggcggcggcgcagcaagtctctaacacgacgaagcctgacggcggtgaccagccgatgaaggagcctgcatggaagaggttcctggctcatgttgggccagggtttatggtgtcattggcatacctggatcctggcaacttggagacggacctgcaagcaggagcgaaccaccgatacgagctcctctgggtgatcctcattggcctcatcttcgcgctcgtcatccagtcgctagctgctaatctcggagtggtgacagggaggcatctcgccgagatatgcaagagcgagtaccccaagttcgtgaggatttgcctgtggatcctcgcggaggtcgcggtgatcgccgccgatatcccggaagttatagggacagccttcgctttcaacctcttgttccacatccccgtgtgggtgggggtcctcatcaccggctccagcactcttctgctcctaggcctacagagatacggggtgcggaagctggagttcctgatctcgatgctggtgttcgtcatggcggcgtgcttcttcggggagctgagcttcgtgaagccgccggcggtggacgtggtcaaggggctcttcatccccaggctcaagggcgacggcgccaccgcggacgccattgcgctcctcggagctctcgtcatgccgcacaacctgttcctgcactccgcgctggtgctgtcgaggaagacgccgtcgtcggtgagggggatcaaggacgcgtgccggttcttcctctacgagagcggcttcgcgctgttcgtggcgctgctcatcaacatcgccgtcatctccgtctccggcaccgtctgcttctccggcaacctgtcgccggaggacgccgacaagtgcagcgacctctcgctcgactcttcctccttcctcctcaagaacgtgctgggcaggtcgagttcgatcgtgtacggcgtggcgctcttggcgtctgggcagagctccaccataacaggcacctactccggccagtacatcatgcagggttttctagacatcaggatgaagaagtggctgaggaacctgatgacacgctgcatcgccatcgcgcccagcctagtcgtctccatcatcggcggctccagtggcgccggccgtctcatcatcatcgcttcgatgatcctgtccttcgagctgccgttcgctctcatcccgctcctcaagttcagcagcagcagtagcaagatggggccccacaagaactccatctatatcatggtgttctcgtggctgctggggctgatgatcatcggcatcaacatgtacttcctgagcaccagcttcgtggggtggctcgtccacaactcgctccccaagtacgccaacgtgctcgtcggcctgctcgtcttccccctcatgctcgtctacgtcgtcgccgtcatctacctcaccttcaggaaggacaccgtcgtcaccttcgtcgccgactccgcccagctggccgtggtcgacgccgagaaggccaaggcggc

SEQ ID NO: 27408 - DNA, 1402 bp, Zea mays
  Clone ID: LIB4730-019-C11_FLI
ctcgaggccggccgggatcccaccccgaagggcgtcgccgagctagccattgccgcctcccggctcgcgactcgcgagtcacaggcgcagccgagcgttccttggggacgaggctacatcgcgatgtggtggagggcggtgaggcgccggtgggtcgcgacggcgcggcccgcgtcctccgcggcggcgggggcggagaagagctgccgcgccgtggtggtgccgcgtttcggtgggccggaggtgctcgaggtcaggcagggcatgcctgtgcccgatctgaagccgcaggaggtgctcgtgcgcgcacgcgctgtctctatcaaccccctggacctccgaatgcgatgtggctatgggcgctccatattcgaaccactcctacctctgatcattggtcgggacattagcggtgaagttgcggccaccggaactttggcatcgtctttttctattggccaagaagtgtttggttcgttgcatccaactgctctcagagggacatatgctgattatgctatcctgtcactggacgagcttactctcaaaccatctacactcagtcatgtggaggctagtgcaatcccgtttgctgctttgactgcatggcgcgctttacatggtacggctcgtatttctgaaggacaaagagttcttgtgattggtggaggaggagcggttggattagctgctgttcaacttgcggtggctgctgggtgtgtggtttctgctacctgtggaacacaaagtattgagcgagttatgggagttggtgctgaacaagctattgactacactgctgaggatactgaagcagcaattaaaggaaagtttgatgctgttttagacaccataggagtacctgagacagaaagaattggcatcaatgttcttaggagaggtggacactatatgacccttcagggagaagcagctgccctagcagataggtatggattggctgtagggcttcctgctgctactgctgttttactaaagaaacagatgcagtatcgttattctcatggaatagagtattggtggacatacatgagagctgacgccgaaggccttcacgagatccaaaggctatctggagctgggaaactacagatacctgtggagaagacctttcccatcagccatgtaagagaagctcatgcggccaaggagaaaaagttggctcctggcaaggtggttctggaattcgattaatgttattaagattttgtccattgggacctgaagggctgtgcgtttgcaaatcatgatagttttttttgtaaaaaaataaatctgaatctctctgccgacttcaggttccgttttatcgttccgtttcagtagaaatacggtaaataatcatatcagctatggcctatgggcacgattttcctgatga

SEQ ID NO: 27409 - DNA, 993 bp, Zea mays
  Clone ID: LIB4730-019-C3_FLI
ccgggaacccaacaagtctctcggccaggtctccctctccccggctctccgccttcctcttccgtgtgggccctagatcccgatggcctcgcgccgccgcaccctgctcaaggtcatcatcctcggcgatagtggggttgggaaaacttccttgatgaaccaatatgtgaacaagaagttcagcaatcagtacaaggctacgatcggcgcggatttcctcaccaaggaggtgcagttcgaggacaggctcttcactctgcaaatatgggacactgctggccaggaaaggtttcagagtctcggcgttgcattctaccggggagcagattgttgtgtcctagtctatgatgttaattctatgaaatcatttgacaacctgaacaactggcgagaagagtttctaattcaggctagcccatcagatcctgataatttcccttttgttctattgggtaacaaagttgatgtagatggtggcaacagccgcgtggtatctgagaaaaaggcaaaggcatggtgtgcttccaaagggaacatcccgtactttgagacgtctgctaaggacggaacgaacgtggaagacgccttccagtgtatcgtgaagaacgctctgaagaatgagccagaggaagaactgtatgtgccagataccgtggacgtggcgggtggcaaccgggcccagagatcatccgggtgctgttaaggcacgaggcatcacgaggcgttgtgaccatcatcgtcggttatgcagtgaccaaacaataccttagcattgctgggtttccgtggttatctacgtatccgtattccatttgttacctttccagtctcactgctatgtacccaagggcgcctgtcaattcggtggactttgtgcagtttcatcagtagcgtcataccttgtgaatacaattggccaaaataagaggaagtgtaaactaaagttcatgctttatggttttgtgttgtattaactcgtccgccttttcctag

SEQ ID NO: 27410 - DNA, 600 bp, Zea mays
  Clone ID: LIB4730-020-B1_FLI
taccctcgaggccggccgggagcatacgatctgacgctcatcccacatcagtagtcgaccaagcacaagcagcagagccggccggaatatgtggacgatcaggaaggtggcgacgccgcaggtggccgtcctcctgctgctcctcatcgtcgttgcgcaggaggcggcgccgttggcggaggcgcgcgtgtgccggcgccggagcgcgggcttcaagggggtctgcatgtccgaccacaactgcgcgcaggtgtgcttgcaggagggctacggcggcggcaactgtgacggcatcatgcgccagtgcaagtgcatcagggagtgctagctagctatatataccggcctttaattaaattaataaggatcgacgtcgcggtcgatctcggtcgctaaatatgtactactatacgtctacactacatgcaataatgcaccacatgtacgcgtacgcgcgccgagctagcacggccatcgttcctacgtcgtcgtctgtcgttcgagtactcatgagctgtgtcgtcgacgtccacccatgctccgccacgctttgatgatgatcatatgacatcttgacaataaacacgtgcatgcagtagg

SEQ ID NO: 27411 - DNA, 632 bp, Zea mays
  Clone ID: LIB4730-020-B4_FLI
ccgggacaccgcaatcttcaatctccccagcaatccctagcagaagccttccatcctcactcgctcgatggcccgcacgaagcagacggcgaggaagtccaccggcggcaaggcgccgaggaagcagctggcgactaaggcggcccgcaagtctgcccctgcgaccggcggagtgaagaagccccaccgcttccgccccggcaccgtcgcgctccgggagatccgcaagtaccagaagagcacggagctgctgatccgcaagctgccgttccagcgcctggtgcgggagatcgcgcaggacttcaagaccgacctacgcttccagagctccgctgtctccgcgctgcaggaggcggctgaggcctaccttgtcgggctcttcgaggacaccaacctctgcgccatccacgccaagcgcgtcaccatcatgcccaaggacatccagcttgcccgccgcatccgtggggagagggcctaagcatcatatattctgtcatcagtgcccgatcagaagatgtagagatgtgctgggttctgtagtttgggttactgtcgaatcatcgagtagttggttgttcactgctgtaacttattatcatgatgcatatgaaatggcaatgaactatgttatc

SEQ ID NO: 27412 - DNA, 999 bp, Zea mays
  Clone ID: LIB4730-020-C12_FLI
ccgggccccatttcgaagcccaccgaattccctgcgattcctctcccctcgcctcctcgtctccccctaggggatcgtcggagaggaatcgcaaagagggccgtctcatccgagttaaggaagccatggagcacaaggaggctgggtgccaggcccccgagggacccatcctctgcatcaataactgtggcttcttcggcagcgcggcgaccatgaacatgtgctctaagtgccacaaggagatgataacgaagcaggatcaggccaagctggctgcctcctctatcgacagcatcgtgaacggcagcgacgccgtcatggagccggttgttgctggcagcaacacggtagtagctgttgcccaagtcgagttgcaaacaatgaacgtgcagcagcccgctgatgttgccggacccagcgagggggtggcggcgatctccaaaggggggaaggtagggccgaaccggtgcagcgcctgcaggaagagggttgggctcacgggattcaactgccggtgtgggaacttgtactgcgcgctccaccgctactccgacaagcacgactgcaagttcgactaccggactgctgccagggacgccattgccaaggctaatccggtggtgaaggcagacaagctcgacaagatctagggggggttccctacggttggtgtcaggaagattgtaaaccgcggtaactcgtcatgcggaactgctgccttgccccccgcgcctttctcttccatgtttgctgctacaatcttgttgttgggcattgcagtgcacggtgcacacttgtgtagcccgcctccgagaattctcctgcctctgcatctggtcagttcaaaaatgatttgcatgttggctatgttgtgtaagctctatttatggtggtctcgctgagacgggtatttggcttcgcagttatctagctatgtgatgtactgttgtcttgtccctgggtattatatggtacactgcagccagtaatagtaatctg

SEQ ID NO: 27413 - DNA, 1007 bp, Zea mays
  Clone ID: LIB4730-020-G10_FLI
ccgggaaaaatcgaatgcccctccgtcttcctcccttttgttctcccacaacgaactcggggctcgcacccagaagggagagaactcgtcgcgacgaggagagaagaacctgaggtggtcccgaatcagacgcagaagagggtgggttcaggagcaagccagcctgccgccaccatgaggcgcgcctcgaagaaatccttgtcgtctgccgcgaccgctagcgctggccctactaaagcagtttccaaggaagtagaacggattgatcaatttttctatacttatgccgataactcatctgtcatgattgacccagaaggcattgaaacactctgttctcaccttgaagttccccacaccgacgttaggattctaatgttagcatggaaaatgggctgtgagaagcaaggttattttaccttggatgaatggagagctggtttgaaagctcttcgagcagacagcatcagtaaactgaagaaagcatttcctgaactggttcaagaggttacaaggccgtcaaatttccaggatttctacatatatgcatttcgttattgcctcacagaggataagaagaagtgtatagaaataccagttgcttgtgagttgctgaatctagtattaggcttgcagttccgccctcaggttgacaagcttagtaattacctcaagtaccaaaatgactacaaggtgataaacatggatcagtggatgggatttatgcggttctgtaatgagataaacttcccatcacttgacaattatgattcagaccttgcttggcctttgattctaggcaattttgttgagtggctaagagaaaataaaagctagatcttctattcatgtggtggtgaagttgtcattcaaaatgtaatattcaagaatgtaggtgactatatatatcattgtttacatttgtaagaccattttttgcccacctacttgtatatactgtcagtaatgcaaacttaggctccaataaacctactatttcacctctt

SEQ ID NO: 27414 - DNA, 1214 bp, Zea mays
  Clone ID: LIB4730-020-G2_FLI
ctcgaggccggccgggatgaaaacatgcgacacggaatagtagaaactcacctcaagcagcaagcacccgagctgccagctccagccccaccagagacatacggcgtaaacgccgccgggaccaacccaggcgaccggggtgcctagctcgccgtttcttttcgccttctccgcaatttcttaggatcaacgccctactacacgacggggggtttccccttcggctgccactccgtcctttcgcagcctgccgccggcgccatgctgtacatcgtgggcctcggcctgggcgacgagcgcgacatcactgtgcgggggctcgatgccgtacgcagctgctccaagatatacatggaggcatacacatccctcctctccctcggcctcgacccggccgcgctcgccaacctggagaagctgtacgggaaggagataacggtcgccgatcgggagatggtggaggagcgtgtcgaccaggtgctaagcgaggctgccgacactgacgtcgccttccttgttgttggcgacccgttcggggcaactacacatactgatctggttgttcgtgccaagagaatgggagtagaagtgaaggtgatccacaatgcatctgtcatgaatgcaattggagtttgtgggctacaactttaccgctatggagaaactatctcaataccattcttcacagacgaatggagaccagatagtttctatgagaagattcagaacaatcgccagcttgggctgcacacactttgcctgcttgatatccgtgtcaaggagccaacatgggaatctttagccagaggaaagaaagtctatgaaccaccaagattcatgactgtaaacactgcaataagtcagctttttgaggtggaggaagcacgtgggggatatgcatatcgcagggaaacattgtgcataggagtggcacgacttggaagtgatgatcagaagattgttgctgggcctatggagaagctactagatgttgattttggtccaccccttcactgcctgatcatagtgggagagactcatcctttggaagaagagatgctagagttttacatgatcaagtagtgatatacacaccctacacatgtgagttttcacttgtattgactaagggaatgcttagacttctgtccttgtcaatattggattgttgaatacttagccatttggatgtagaaccccaggaaatggtgcag

SEQ ID NO: 27415 - DNA, 630 bp, Zea mays
  Clone ID: LIB4730-021-E10_FLI
tacggccgccgccagcagcaagctccctgctccccgaccaaaccctacctgtacccgccgccgccgcagcagcagccatgccgcccaaattggacccctctcaggtggtggaggtcttcgtccgcgtgacagaggcgaggtcggcgcggcgtcgtcgctggcccccaagatcggcccgctcggtctctccccgaagaagattggtgaggacatcgccaaggagaccgccaaggactggaagggcctccgcgtcaccgtcaagctcaccgtgcggaaccggcaggccaaggtctccgtcgtcccctccgccgcggcgctcgtcatcaaggcgctcaaggaacccgagagggacaggaagaaggtcaagaacatcaagcacagcgtcgggtgcaccgtcgatgggaaggaccccaaggacttgcagcaggagatcgatgatggtgaggtcgagatcccctcagcttaaaggctatacaactagaaatcatcggacactattaaagtgtggtgttttgttccaagtgcagttcctgcacctcaatcgcctattattgtctgctttagttccttcaagtcttgtgagagacctaatcagtaccttgtgccttataaaattacatcttccgatac

SEQ ID NO: 27416 - DNA, 2897 bp, Zea mays
  Clone ID: LIB4730-021-G12_FLI
ccgggacggagccacaccgcacaccccatcccgcccggagcagcaaagcataggtgctcgagcgctccctccagagctccccgcctgccgccccgtcctcaccctcctcggtcgcctcccgccgaggctcggctcccatccgcagccaccacgtgcgacctcccctcccctgttcctgagagtaagatcctctctccagtcccgtgcttcggctcctccggtaccctgaatttcgcgggctcagcgggtctaacggctacgtcgctgctgctgcgcgcgcagatctccgtaggtcggcatggggtgaccagatcggtgctctccagctgaattctgctcgcggctcgtctcggaggcagcggagatggcgagcgccggcgtggcgggctgctcagggagtgctggcgatgctttgttcagggaactctggcatgcttgtgctgggccgttggtcacagtgcctcgccaaggcgagctggtttactacttcccacagggtcatatggaacagcttgaagcatctacagatcaacaacttgatcagcacttacctttgtttgatctaccacccaagattctctgcaaggtggtcaatgtagaacttagagctgaaactgattctgatgaagtttatgctcaaattatgctgcaaccagaagcagatcaaagtgagcccaccagcccagattctgagccaccggagcctgaaagatgcaacgtctattccttctgcaagaccttgactgcttcagatacaagtacacatggtggattctctgtcctcaggaggcatgctgaagaatgtttgccccaactggacatgactcagaatccaccatggcaagaactgctggctaaagatctccatggaaatgaatggcatttccgtcacatctttcgagggcaaccaaggaggcatctacttacgacaggttggagtgtttttgttagctcaaaaagattggttgctggtgacgcgtttatctttttgagaggtgagaacggagagctgagagttggggtaaggaggctcatgaggcaactaaataacatgccatcttcggttatctcaagccacaacatgcatcttggagtcctagcaactgcatctcatgccatctccacaggaactctcttttctgttttctacaaacctagaacaagtcgatcggaatttgtcgttagtgtaaataagtaccttgaagctaagaatcacaaggtgtctgttggcatgaggtttaaaatgagatttgagggtgatgaatctcctgaaagaagattaagtgggacaattattggtctgggaagcatgccagctaactcaacttctccatgggctaactctgattggagatctttgagggtccaatgggacgagccttctgctattctgcgtccagatagagtttcaccatgggaactagaaccccttgatgcaactaatccacaaccacctcaacctcatttacggaataagcgtgcacgaccccctgctttactttctattgctccagaacttcctcaagtttttggttttttgaaatccccagctgagcctgcccaagctttctcattttcaagaccgcagcaaactcaggaattataccattcaaatcccagttcaatcttctcatcatcgttgaatgtaggattcagttcaaagaatgaccgttctactccaatcaacagtcatttgtactggacaatgaggcagacaagaactgaatcctactctgctagcgttaacaaagctcctactgaaaagaagcaagaatctgctacttctggctgcagattgtttggcattgagataggttctgcagtatcaccagtggctactgttgctagtgttggccaggatcagccacctgctctctcagtagacgttgaatctgatcagctgtcacagccatccaatgccaacaaaacggatgccccagtggcaagcagcgagcgctctcttaacgagtcagagagccggcaagtcaggagctgcaccaaggtaatcatgcaaggaatggcggttggcagggcagtggacttgacaaggttagatgggtatgctgatctccaccgcaagttggaggagatgtttgatatccagggagagctttctgccaacctcaagaaatggaaggtcatttacacagatgacgaggatgatacgatgctggtcggggacgatccatggaatgaattcctcaggatggtaaaaaggatatacatttactcttacgaggaggccaagtctttgactcgcaaggcgaagccgccggttgttggtgacaccatcaagccagacccaaacaaattgccaccggaatctgacgtgccacatgactcaaacaacaatgctcccgttgctgctgattatcaggactgatggatgctaacttggctcctaccttttctttcccctcttggatgtcggtcatgggaggcaatgcacgctccttgggacttgtaagagttatctgttttgttgcttcgcgggcccaaaggacgcttccctgcaccatctgcctttgtttggaacggcttggaccgccgtggtccttttacctgcagcaaggaaaggaatggctgggagggaatggatactggtatcgttccgtgtgtggcaccccgtgatctgtttgccgtgctttgtaggaggcatggcgtattgccgggtactttggttttggagactgctactgactgctgccgtcgtcgggccgctcctctcacctctggtaaataggactttgtacacaattattttgttagtagcagtatatgtacatcatcggtcgtgttgcttgctacatgtactcctatgtagcatcctcccctgcattttagtcctggctaggtatcagatgctctggtgcaaaaatgtctctgcttgttccaac

SEQ ID NO: 27417 - DNA, 877 bp, Zea mays
  Clone ID: LIB4730-022-A8_FLI
ctcgaggccggccgggacgcagtttctcgcgccatctgagtcagctggggcgacgaagaaatatcctctagcgatcaaaacccagctgccacacccgcgtcgtcgggccccgccgagccctcgccgccgggcaggccaacggcggtgtcctcgcgtgtcctcgacatgggcgcgcagctggcgcaggcgctgaagccggtgcggcagatgaagcagcacgcgtgcagcttcgcgctgtacgcccacgacttgcaccgccaggtggaggtccaccacttcgtcgcccggctcaaccaggacgtcctccagtgcgccgtctacgacttcgacaagccctcggcccgcctcatcggcgtggagtacatcgtctccgacaccatcttcgagggcctggccccggacgagcagaggctgtggcactcgcacgcgtacgaggtgaaggccgggctgtggaccgacgtcggcgtgccggaggcgctgcagagctcggagatggcgagcctcgcgaagacgtacggcaagttctggtgcacctggcaggcggaccgcggcgacgcgctgcccctcggcgcgccggcgctcatggtgtcgccgcaggccgccgagcccggccgcgtgcgcggcgagctggtgcgcggccgtgacgagaggtacgggatcgacagctcggcaggggggctcaaggcggcgagggtggagatggacgagccggagtggatcaacccgaacgccgactactggcggctgcacggcaaggggttcgcggtagacgtcgtcccggccgagatgaagcgccacgcgcccttcccgtgagctgcctgccggtcttcgttgttgtgacacgtgcgtaaggagcataaagatcgttcttgtagct

SEQ ID NO: 27418 - DNA, 2115 bp, Zea mays
  Clone ID: LIB4730-022-B2_FLI
accgcaccgcatctccctcccattccactccagtccaccaccgctcccattccccagccgccgtcgccatggccagcgccgcccactcccttctgcacacaccggaggcccacagggccgccacccgctcgcccttctctcctcccgcgcccactcccttcctccatctccgccctcaccgcctccccctccgcctccgctccacctccccgaccgcctccgacctcaccgccttccccccgaacccgaacgggatctttgcgtccgaccggcccatcgacgtggacgccgccacggaggccgagctgcgggagaacgggttccggagcacgcgccgcaccaagctcgtctgcaccgtgggccccgccacctcgcgcccggaccagctcgaggcgctcgccgtcggcgggatgaacgtggcccggctcaacatgtgccacggcgacagggagtggcatagggccgccatccgcgccgtcaggagcctcaacgaggagaagggcttcgccgtcgccgtcatgatggacaccgagggcagcgagatccacatgggggacctcggcggcgcatcctcggtcaaggcggaggatggagaagtatggacgttcagtgttagatcatttgaattgcctctcccagaacgaactattaatgtgaactatgatggatttgctgaagatgtgagagttggtgatgagctccttgtggatggtggaatggctcggtttgaggtgattgagaagataggaccagatgttaagtgccgttgcacagatcctggtttattgttgccacgtgccaatcttacattctggcgtgacggcagtatcgtccgtgagaggaatgctatgcttcctacaatttcatcaaaggattggcttgacatagactttgggattgccgaaggtgtagatttcatcgctgtttcatttgtcaagtctgcagaagtaattaggcacttgaaaagctacatagctgcaaggagccgtggaagtgacatggcagtcattgcgaaaatcgagagcatcgactctctaaagaacctggaggagatcatccgagcgtcagacggcgccatggtagccagaggggacatgggggcgcaggttcccctggagcaggtcccctcgatacagcaaaagatcgttcagctctgcaggcagctgaacaagccggtcatcgtcgcctcccagctcctcgagtcgatgatagagtaccccacgcccaccagggccgaggtcgcggacgtctccgaagccgtccgccagcgcgccgacgccctgatgctttccggcgagtcggcaatggggaggtacccggacaaggctctcagcgttctgaggagcgtcagcctgaggatcgagaagtggtggagggaggagaagcggcacgaggcgctggagctccggagcgtctcgtcctccttctccgacaagatatcggaggagatctgcaactcagcagctaaaatggctaatggcctgggagtggacgccgtctttgtgttcaccaagaccgggcacatggcctccctgctctcgcggtgccgccccgactgcccggtcttcgccttcacgacgtcgacgtccgtcaggaggcggctgaacctgcagtggggcctgatccccttccgcctcgccttctcggacgacatggagagcaacctgaaccgcaccttctccctgctcaaggccaggggcatgatccagtctggggacctcgtgatcgccctctcggacatgctgcagtccatccaggtgatgaacgtaccctgaggtagaagagccttacctttacctccatgccgcacggtcccgtatcggaaggaacacgcgtgttatcggcaccttggaaggacggtttcttccttccctgcgcctaaatcgctgccctttgttttcgctgtatcagatgctgctatgctatgctaggctctagtctggcccagggaactgtggcaataatctgtggctttcaggctggtgttagaactcttgtactacttgtaggcttaggtgatttttatcgtgcaagtagttggtttgatgtttttgtgtggtataaaagcgactcaagctatgggcctaggcctctttggtataccttttttttctg

SEQ ID NO: 27419 - DNA, 703 bp, Zea mays
  Clone ID: LIB4730-022-F9_FLI
ccgggaaaaaaagcaacagccaacatatctcctcgcattttccttgcaaccgattgcctatccccctcccaacccaagaccgatggcgcccaaggccgagaagaagcccgcggcgaagaagccggcggaggaggagcccgcggcggagaagacgaccgccgggaagaagcccaaggcggagaagcgggtccccgcgggcaagtccgccggcaaggagggcggcgagggcaagcgtggcaagaagaagggcaagaagagcgtggagacgtacaagatctacatcttcaaggtgctgaagcaggtgcacccggacatcggcatctcctccaaggccatgtccatcatgaactccttcatcaacgacatcctcgagaagctggccggcgaggccgccaagctcgcgcgctacaacaagaagcccaccatcacgtcccgcgagatccagacctccgtgcgcctcgtgctccccggcgagctcgccaagcacgccgtctctgagggcaccaaggccgtcaccaagttcacctcctcctaggctgcacgctcgctctttgtaggcttctcttgtgttgatgttccccttgtgttgtagttagatgttgctggtttctctgtcggcgctgctctgcttctgtaggaactgcgtcatgtaacccagcaaggacttgtttatttgtgaatcatcaacactttgttgttgatt

SEQ ID NO: 27420 - DNA, 2230 bp, Zea mays
  Clone ID: LIB4730-023-A3_FLI
gggatacagccgccgccgtttcttcatctcccatcttcatagtcgcgctaggcacacaggcgtcggcggcggcgctcaggctcgggatctcagctacaggaaatggcagggcaagcagggaacccagtaaaccaccctataagtccccacgtgataagtggcgctttcgttcagcaatattaccacattttacacgaacaaccagatcaagtgcacaagttttaccaagattcaagtattcttggtcgaccagattccaatggaattatggcatatgtaaccactatgcgtgatattaatgaaaaaatcatgtctatggacttcaggaactgcttaacagagatagagactgcagatgcacaattatctcacaaggatggggtgctcattgttgttactggttccttgacttcggatgaaggcgttttccgtaggtttacccagtcattcttcctagcaccacaagaaagtggtggctattttgttctcactgatgtatttagatttatttcggaaaggaaaccagctgagataaatcaagttgctactcaagaaaatgaaatcagtcagaatgttagacctgcatctgaaacatgttcagcactaccagaacctattccagctgatgggagtgtgatctcagaccatgtgacagctgatagtaatgtcacggagaagcaaattagtgatctttctgctaatgggactgccattgaaagtaatgataatacccagccacctgtgcaagtgcccaaagaggatccaaagaaggccctacttgttgctcctccccctccaactcagatggatgttactaagaaatcttatgcatccattgtcaaggtcatgaaggagggcccaccaactccagttgtcaaaacaacatcgtcagtttccaaacagaagccagctcctaaaccagtgtccacggctgtcgaaggcctagagaaaccatctgagaaacctacccaggctattggaaccggtgatgggattgttgcccaaaacaactcttctcgcaatgagcaaggctattcaattttcatcaagaatttgcctttccatgccaatattgaaatggttgaggaggaatttaagaaatttggtactataaagccaggtggtgttcaagtccggcacaataaggttgatcgatttggttttggttttgttgagtacgagtcccagcagtctatgcaagcagcaattgaggcatctccgattcgtatggcggacaaagaagtcggcattgaggcgaaaagagccaattcacgaggtggccgtttccaatctggcaggggagtgtaccatggtgataactttagagggcgaggaagtggctatgtggacaacacaaactacagaagcagcggcagcttcaaccgccagaatgaaggggagatgtacaaccgcaggaatgaaggggagatgtacaaccgcaggaatgaaggggacttctacaaccacaggaatgagggggagttctacaaccgacggaatgatggcggcgagaactacaaccggcgcaacgatggtggcgagaactataaccggcgcaatgatggtggcaagaacttcagccgcaggaatgacagtggtaccgagaacttcaaccgcaggaatgacggtggcggcgagaacttcagccgcaggaacgatggtgttggcgagaacttcaacgtcaggaatgacggcgttggtgagaacttcaacaggaggaacaacttcagaaatcagaatgacttccctggacgaggacggggttcacctacaccagggaacagttactaccagaacgggaatgggaggttcagtcgcgtgaacaatggcgccaagcaagctcctgtggccgcgtagaggcatcaaggcggtaggcttacatcaaactaggaagcataaggctacattcaagtgagctgagtgcaaggattattcttagtaggagcattgctgtcagacagcttggttatttttttttgtgccgtgttgggtcgctaagagattagtagttgcagtcgtccgtggatggtaggtgaattttgttgccgttgatgagcttgtcaactgggtgttggaccatggttcgtaactttgtgtcatctgccaatcaggattggtgggaggttagacactaatcttatgaagcggtgactgcaaaaatcagtgtccatgttaaatgctattattgtcatggtattcgataatgcgaagtgtgtccatgtttagtgcg

SEQ ID NO: 27421 - DNA, 701 bp, Zea mays
  Clone ID: LIB4730-023-A7_FLI
ccgggaaaatttccctctcagccgcacccccacgcccctccgtgttgctcgccgcacccccacgccccgccgtgttgctcgccgccaccgccccgccggcagccaaaatgccgttcaagaggttcgtggagatcgggcgagtggcccttgtgaactacggcaaggagtatggccgcctcgtcgtcatcgtcgacgtcgtcgaccagaacagggctcttgtggatgcccccgacatggttcgttgccaaatgaacttcaagcggctttccctgactgacatcaagattgacattaaacgtgtcccaaagaagactacactgatcaaggcaatggaggaagctgatgtgaaaagcaagtgggagaatagctcatggggcaagaagctgattgttcagaagaggagagcatcactcaatgactttgacaggttcaaggtcatgttggcgaagatcaagaggggtggtgccatcaggcaagagcttgctaagcttaaaaaggtggctgctgctgcttagattgctttggtggttcctctatgcttcgatctcttgaaatgtaatgcacgaattactttgacagttagcttgtcaagatgtcaattttaaactggcttattttgatattttgtccaaaatgctattctgaatctgagatagtgttgtattctgatatctatcaagtgttgcattgttgttacattc

SEQ ID NO: 27422 - DNA, 1370 bp, Zea mays
  Clone ID: LIB4730-023-D3_FLI
ccgggaccctcacttcccctactgcgcgtctcgtctgcactaggattggattgaatccagaaccctctcctgcagcctgcaggttgtcgtcgccctcttcctcctccttcgctgttgctgttgcttccgcttccgcttccgccgccgccaccgccgcggaaatcaaactaatctggtaacggaaaatctctcctcttccacttcctcgccacacacaatacttatcctgtgtgtcattcccctccccttcgtccgggatcttgctacttcttctttgcttagatcgagaccacaccgttccagagagatcccccaaacaaaaaaagagcacgggatcgaaatggagctcgacggcaagtacagcaaggaccagagcctcaaatgcgaatgcctcctcttcgacctcgatgacacactatacccgttcaactccggcattgctgccgacataaagaagaacatccaagactatatggtgcacaagctcggcgttgacgaggccataagcttggacctatgcgtcctcctctacaagcagtacggaaccaccatggctggcttgagggctgttgggtaccagtttgattacgatgactaccacagctttgttcatgggaggttgtcttatgacaaaatcaagcctgatcctgtgcttaggaacatcctcctcagcttacccattcgcaaacttgtgttcacaaacggtgacagaacacatgcttcaagggccctcaagaggcttggcattgaggattgtttcgaaggagtcgtgtgctttgagacactgaacctgacatctcctcctcctcctgtcccagctcaggaacttgaaatctttgatctaatgaagcatctggctcatccacagcccgcggtgcagctaccaaaatcacctatcctatgcaaaccgtcaagggaggccatgctgcaggctctcaaggtcgcctccattaatccacagacaactatattgttcgatgacagcttcaggaacattgaagctgcaaagcaaattggaatgtgtactgtcctggttggaacatctgagcggaaaaagggtgctgaccatgccttggaaagcctccacaacatgaaggaagcactgccggagctgtgggaggaagctgagaaggatgaagatgtgaggaattcgagcaaagccggaatcgagacatctgtgatcgcgtaatcttttttgttccttggttacaaatgtagccccttctgttttccttggaggacaacacgaggtggtggtgtatgaaaaaagaggagacctcctcaaggggtgggggggactgactgatactacgaccactgatgttacaccccgtaaactattactatccaataagaatgttttcttcttc

SEQ ID NO: 27423 - DNA, 1095 bp, Zea mays
  Clone ID: LIB4730-024-B9_FLI
ctcgaggccggccggggaagctgccgctaaaccctaaacccagcaccagcgcccccaatcctccaacttccactcgagtagggttctgccggccgtttcctcgtcgtcgcaatggagttctggggtgaagaagtgaagccaggagccacggtttcttgcaaagttggtgatggtttggttatccacctttcacaggctgccctaggggaaccaaagaaagcgagtgagaatgccattgtgtctgtcaaaattgatgataagaaactagtgcttggaaccttatcagttgagaagcatcctcaaatctcttgtgatctgaataatgaaattaaaatttctactgcaaaggttcccgtgaaggttggtatacaaaatgctgatgaagatgaaacttctagtggtgatgatgatgatttcactgatagtgatagtgaaatgtctgaggaagatgagtccagtgatgaagatgaagtgtcaagcgatacagatactagtgatgattctggttcggaagaacagacacctaccccaaagaagactgaggtagtagttggcaagaagagggcaattgaagctgagacaccttctggtaagaaggctaagtctgaacaatctgctcagaaaacaggcgacaaggtctcaacttctcatcctgcaaagcagtccagcaagactcctgcagacaaatctacaaagacccccacagctgacaagaagtcccccaaatctgggagccatgcctgcaagtcatgcagcaaatctttcggcagtgcgtcagcacttgagtctcatcagaaggcaaagaagcatgaagcctagagcacgtgctataccatctactcgttatcaaaatcagtggtcttatttttgaacttgaaaatgtccaagtttggaacttgcccagtagtcatctgattagtggtgttatttttctttgaacttgggaattgtctagtttgggacatacgcggtatgcctggttaagaacatgggaaatgtcaggttagaacaggtcctgctggcccagttttggtcgtcgtcgaatgttgctaatgttggaactgattattgtgacccgtaaggccgtaagggagt

SEQ ID NO: 27424 - DNA, 1236 bp, Zea mays
  Clone ID: LIB4730-025-A10_FLI
ccgggaggctcccacccaccagacgacctccccttgcattctcagtttctcacgcccctgcgctgtcccgtcgcgagatagataaccctagctcccttccttgcttgccctcttccccaacctctctccagatctctataaaagaccagaatttcgaattccccctcgaacccgtgacacgcgcgctcctttcccgcccatttaggcctctgattcggcgcggattcgcggcgcggagccgccgaggttgcgtgcgtgattcggatggcggagccggggctcgaggacagccagccggtggatctgtccaagcacccctccggcatcgtccccacgctccagaatattgtatcaacagttaatttggattgtaaacttgacctcaaagcaatagctttgcaagcaagaaatgcggagtataacccaaagcgttttgctgcagtaatcatgagaataagagaacccaaaaccacggcactgatatttgcatcgggtaaaatggtatgtactggagctaagagcgagcagcaatctaagcttgcagcaagaaagtatgctcgtattattcagaaacttggttttccagctaaattcaaggactttaagattcagaatattgttggctcttgtgatgtcaagtttccaattaggcttgagggccttgcctattctcatggtgccttctcaagttacgaaccagaactctttcctggccttatctatcggatgaaacaaccaaagattgttcttttaatttttgtttcaggcaagattgttttgactggagcaaaggtgagagaggagacctacactgccttcgaaaacatctatcctgtgctggcagagtttagaaaagttcagcaatgatgacctgttgtgaaggtcacatccttctaattacaagcttccttgattttcgtgtgaccataaattctaactgtgtacataaaaagtctggcggaatttatagcatcttgtaatttctgtgagctgctgtctggcatgattgggtgggcttgtcgtggtagctggtggaattgtcaagatgatccgtttgggtagaggccctggtgaacacggacaccacattatgtcgcagtgtgagtagtttgtgtgagctgcagggtacatgcttgtcccatgtggttgcagcgttaacttgagtgctaacaagagtagataaattttggcctgcttcgtctttgatacacgagtccttcaaagtctcttctgact

SEQ ID NO: 27425 - DNA, 1049 bp, Zea mays
  Clone ID: LIB4730-025-D10_FLI
ccgggaacaagcatactacacacccctcctccctccccatccttcataagctctcatacgtctctctctctctcccttcttcaaaacaccccaccccatccaaaacctagaacacacacaacaccagagggctttacaaccgcgcacatgatcatgcaggcaatgtggaagccaggatggctagaggcccttgacacacagaagttcttcgtagcatgctctttccatgagcatgccaagaagaacgagaagaacatctgttgccttgactgctgcactagcatctgcccacactgtgtggcagcacaccgtgcacacaggctcctgcaggtgcggcgatacgtctaccatgacgttgtccggctggaggacctggagaagcttattgattgctctagtgttcagtcttatactattaacagctctaaggttgttttcctgaagaagagaccacagaataggcaattcaagggttcagggaatatctgcacctcctgcgacaggagccttcaagaaccgtatttccactgctctctggattgcaaggtagagtatatactacgacagaagaaaaaattgtcagcatatttgcgcccatgcaagaccttgcagcttggccctgatttcttcattcctcatgatgctgatgacgacacaactcactcaacccttgttgatgttgatgagcccatgggatcatcggactcggagaatttgagtgtgccgtgcacaaattttgttcggaaaaaacggagtggaccatatatttgtgcacggtctgcaaacagagtgtctgaagaagacatggccacaaatatgagcagaaggaaaggggttcctcagagatcgcctttgtgctaataaattcaatagttaattattttcccttttctttacttctttcatgttctttatctcttggactaaactggtgcaacaatgatagaattttgtctcagtactaccatgtgattaaaatacatcactagaggcaattgtactcaattcttcaagttggtgcaccagtttatatatatgtatgctttaat

SEQ ID NO: 27426 - DNA, 710 bp, Zea mays
  Clone ID: LIB4730-027-B6_FLI
ccgggctagccgcctgcctctcctcctccagagctcgtcgccaccggccaccgccaccctcgatcacgccgtccgtcgaggtaaagttagtctccacgcccctttccctccgccctagtcctccgtagctctccgccgcgtcgtccgtcgaggtaaggtaaggtcagcatggtgagggtcagtgtgctcaacgatgcgctcaagtccatgtacaacgctgagaagatcggcaagaggcaggtcatgatcaggccgtcgtccaaggtcatcatcaagttcctgacggtcatgcagcgccacggctacattggagagttcgagtacgttgatgaccaccgatcgggcaagatcgtggtcgaactcaacgggaggctgaacaagtgcggcgtcatcagccctcgctttgatatcggcgtgaaagacattgagggatggactgcaaggctgctcccgtccaggcagttcggatacatcgtcctcacaacttcggcaggcatcatggaccacgaggaggcccgccggaagagcgtcggaggcaaggttctaggtttcttctattgaagaagctgagaatctttgttatggcctgcctgcctgtcttactctctcagactagagtacctgttattttactttaatatgtctctctcagactagagcgccttcttttacttgaatattggtgactgcattggtctttcactttaaag

SEQ ID NO: 27427 - DNA, 1652 bp, Zea mays
  Clone ID: LIB4730-028-D4_FLI
ccggccgggaccctagcccagcaccgcagaggcgcagagacaggcgtcttcgtactcgcctatctccgcgactcaaagcttcttccatttcctaccgccgccgctgcagctccaccccattccgtcgacaccatgagggagtgcatctcgatccacatcggccaagccggtatccaggtcggaaacgcgtgctgggagctctactgcctcgagcatggcattcaggctgatggtcagatgcccggtgacaagaccattgggggtggtgatgatgctttcaacaccttcttcagtgagactggtgctgggaagcacgtccctcgtgctgtttttgttgaccttgaaccaactgtcatcgatgaggtgaggactggcacctaccgccagctcttccaccctgagcagcttatcagtggcaaggaggatgcagccaacaacttcgcccgtggtcactacaccattggcaaggagattgttgacctgtgccttgatcgcatcaggaagcttgccgacaactgcactggtctccagggcttcctcgtcttcaacgctgttggtggaggaacaggctctggccttggttccctcctcctggagcgtctgtctgttgactacggcaagaagtccaagcttggtttcactgtgtacccatccccccaagtttcgacctcagtggttgagccatacaacagcgtcctgtccacccactccctcctcgagcacactgatgtggctatcctgctggacaacgaggccatctatgacatctgccgccgttcccttgacattgagcgcccaacctacaccaacctcaacaggcttgtgtcccaggtcatatcatccctgactgcctccttgaggttcgatggtgctcttaacgtggatgtgaatgagttccagaccaacttggtgccctacccgaggatccacttcatgctttcctcctatgctccagtcatctctgctgagaaggcctaccacgagcagctgtctgtggccgagatcaccaacagcgccttcgagccatcctccatgatggccaagtgcgatccccgccatggtaagtacatggcctgctgcctcatgtaccgtggtgatgtggtccccaaggatgtgaatgctgctgtggccaccatcaagaccaagcgcaccatccagtttgtggactggtgcccaactggctttaagtgcggtattaactaccagcctccaagtgtggtgcctggtggtgacctggccaaggtgcagcgcgctgtgtgcatgatctccaactccaccagtgttgtggaggtgttctcccgcatcgaccacaagttcgacctcatgtacgccaagcgtgccttcgtgcactggtatgtcggtgagggtatggaggagggcgagttctctgaggcccgtgaggatcttgcagcgctcgagaaggactacgaggaggttggtgctgagtttgatgagggtgaggaaggtgatgatggtgatgagtactagaagtatcctgatgctgtcatcgtcaggcttgtgtgctgctcttgtccccgttgtggtttgcaacacctgatgttgtaagactttctggttatgtccgccccgctttgccactgggttattaagaacgtcgttatggatggttgtctacattattgcttctcgat

SEQ ID NO: 27428 - DNA, 898 bp, Zea mays
  Clone ID: LIB4730-028-E2_FLI
ccgggaggcagcagcagcatggcggagtgcaaggacgacgacagcggccggcggtctccgtcgtcgtccatggacagcagcacccaccccccggctctctccaccgcgtcctcggcctcccgccacccggcggagaggagggaccagctcagcgccgacctgcagctagggctcagcctgtcgccggcgtcctccgccctcctggtcgcggagaccaacaacagcatcgtcccttctacgccaaggaaccaagcactcccggattggcccccgatcaaaccgttccttagaagcgccctgacagcctcggcacgccgacggcgaacgttgttcgtcaaggtgtacatggaaggcgtcccaatcggccggaagctggacatgctcttgctggatgggtacagcagcctcctagcgaaactttgccacatgttcaaggcatctatcacttatgctgacgctgtggagtaccatcagcgggttcctcacgagaaggccgcgcatgttctcacctatgaagaccatgatggagactggatgatggttggggatgtaccgtgggagctctttctcggaagcgtaaagaagctgaggattgcgagaacagacagatgctagatagcaaactttttcatgcggtggatcgcgactctgtttctttttttttaatatatattaggttcagtaggaaagattttgctgaacagagtggagtcgtgatgctgaggctatactaaccgtgtacagtgtactgaagaaacgccagccttgctaccatccctgcaaaattaaattttggtattttatgtttcctttcctgtttctttgactgccttgtaaataccatggttatttgttaaagaacaagcaatttgcatggaaaatattatagttccaagcg

SEQ ID NO: 27429 - DNA, 1186 bp, Zea mays
  Clone ID: LIB4730-028-F3_FLI
ccgggacttcccacaccgtctgcggtctgcctgaccgaaaccgaaccccccagcctacaccacccgctgtcctgatggcgacggaccccgcgccggtgccggcgatgcgctgctactcgctgccgccagtccgcctccccgcggaggacattctcttctgcgtcgacgttgacctcgaggcccgcgccgagatgaagtccgccgccgccgccgcagcgtcctcgggctccacctccaccgcttcgccgcagccgacgcagcccgcgggggccgggggtgccccggcggcggggccccggaccgtggtcaggcggatggacgcggtcaggcaggcgctgctgctgttcgtccacagcaagctcaccatgtgcccagagcaccgcttcgccttcgcctccctcggcgagacgttctccatggtgaagaagggcttcagcagtgatgctggtttcgcaatggaggcaatccattccttgtctgcttcagaaacaagatatgctatggctgatctgacccagctctttatgacagcttgccaggaagggaaaagagcagaatcgcaaggccggattctccgggtggtgctcatatactgccgttcctctacaaagccacagcatcagtggcccgtgaagccaaagaatttcaccctcgacataatctatctccacgacaagccaaatcctgacaactgcccacagaaggtatatgatgccttggtcgatgttcttgagcatgtcagccagtatgaggggtacattctcgagactggtcaagggcttgctcgcgtgctctttcgtcagatgtgcattcttgtatcccatcctttgcaacgttgcatgcaagatgaccttgatattcccaaacaagtcgctaagaaaatcgtggcagccgaacctgcacagaatgaagatgccgctccagtctccagccaacagtagggtcttctagttgaacggtatgcaaacatgaagttactcgcaagcggttggcattaccgttctactagatcagaatgcctgttctgtgtgatggagattccatcccagaatttgtgtactatgctttaactgtccaaggagtcatcctcttgcccccgtcccttgtttgcttgggtattcagcatgtagttgcacatgatacaaataactcaaatctttggcacttgaatttcatttgtttgcgt

SEQ ID NO: 27430 - DNA, 1211 bp, Zea mays
  Clone ID: LIB4730-029-D6_FLI
ccgggaaaaatcccaatcgaacccgtccgcctatcgccccaaaccctcgcccagctcgaggtcctcgccgccggtcgccggccgccgtctccgtccgaccgccgccatggctcgcaacgaggagaaggcgcagtcaatgctgaaccgcttcatcacgatgaagcaggaggagaagcgcaagccccgagagcgccggccctacctcgcctccgagtgccgcgacctcgccgacgccgagcgctggcgctctgagatcctccgcgagatcggcgccaaggtcgccgagatccagaacgagggtctcggcgagcaccgcctccgcgacctcaacgacgagatcaacaaactcctccgcgagcgcggccactgggagcgccgcatcgtcgagctcggcggccgcgactactcccgcagctccaacgcgccgctcatgaccgacctcgacggcaacatagtcgccgtccccaacccctcgggtcgcggaccggggtaccgctactttggcgcggccaggaagctccctggcgtgcgggagctcttcgacaagccgcctgagatgcggaagcgacgcacccgctacgagatccacaagcgcatcaacgccgggtactacggatactatgacgatgaggacggcgtgctagagcgccttgagggccctgccgggaagcgcatgcgggaggagattgtttcagagtggcaccgtgtggaacgggtgcggcgggaggccatgaagggggtgatgagcggtgaggtggctgcggctggagggcgcagcggggaggctgctagagaggtgctgtttgagggggtggaggaggaggtcgaagaggagaggaagcgtgaggaagagaagagggagagggagaaaggcgaggaagttgggagggaattcgttgcacatgtgccgctacctgatgaaaaggagattgagcgcatggtattagagaggaagaagaaggagctgcttagcaagtatgccagtgattccctgctggttgagcaggaggaggccaaggagatgctcaatgtccgacgctagaagacggtctgtcctcgatttccatgtctccaatgaaagttattaactgatgtagtgctcctgacttaaagtactatagagttaagcagatgagtgttcttgtttttgttgcattcaaaattatttcttccattactgttggtaccgactgctgcaaagaattcagact

SEQ ID NO: 27431 - DNA, 1070 bp, Zea mays
  Clone ID: LIB4730-029-E11_FLI
ctcgaggccggccgggcggtacggcgatagggcgggacaaaaaaagaggagtgacccggtctaccggagcgtacggtgccgatcccgtcgccgccgctacccctcaatcgcgagcaacttcttccggattcgcaccaagctctccacaattctatcgctatgctgcggaaggccgtcgtcgccttcatcgcctgcaccgccttcttcctcgccttctctgcctactcccgtcgccagggcgttgcagaggttcaattaccagcagttactcacagggtctacctagatgtagaaattgatggccaacacataggtagaattgttattggtctctatggggaggtcgttccaaaaacagttgaaaacttagggctctttgtacaggtgaaaaaggtgtcgggtccaatggcaaacctcttcactataagggaacaccattccatcgtattatccctggcttcatgattcagggcggtgacatagttagaggcgacggtaaagggagtgagtctatatatggaggcatcttcccggatgagaatttcactgtaaaacatacacatccaggggttgttgctatggcgaattctggacttgattctaatggatctcagttttacataactactatcaagacaagctggttggatggggagcatgttgtcttcggcagggtgatccaaggaatggataccgtgtacgccatagaagggggcgctgggacttacaatggcaagccaaggaagaaggcggtgatcaccgacgctggtgagatacccaaggagaaatggggtgatcaggaagcgtagggtgttttctacttcttgtcaccttcaaatcaggtagccatgtacttcttttttccttgacctccatggtgtgccacggttcagcaagacttccggaatgttgtatatcgtagctagcttatggccagtcgaattgactctgatcccttgagttgtgatgtggagacgcatacatctgaaaaatctttaggccatgttcggttagggtggagtgaaggggattaagtttccttccattcaaatttgaatttaaatttcaac

SEQ ID NO: 27432 - DNA, 1445 bp, Zea mays
  Clone ID: LIB4730-029-F4_FLI
ccttcgatcccacgtcttctcaaccttccttcttctctcctcgagaaccccaatccaaacccccaaccgccaaaattcctacgagatatatcacagaaatatcgtcttggctcagatcgtgcccgaggtgatccagatctctactggttcattttcctctcgtcgtaacctggtcccgttaccattacctgtttttggattgcatcagtgaggaggcagtgagttttgaggggacgcaggatcatggcgtcgtcgctggccgaggaggaggaggccttcgagcacacgcttctggtggtgcgcgaggtgtcagtgtacaagatcccgccgcgcaccaccagcggcggctacaagtgcggcgagtggctgcagtcggacaagatctggtccgggcgcctccgcgtggtgtcctgcggtgaccgctgcgagatccggctcgaggacccggccacgggggagctctttgccgcctgcttcgtgctgccggggcagcgggagagcgccgtcgagaccgtgctcgactcctcccgctacttcgtgctccgcatcgaggacggcagggggaagcatgccttcgtcgggctcggcttcaacgagcgcaacgaagcattcgacttcaacgtcgccctctctgaccacgagaagtacgtcaagagggagcaggagaaggagaccacgggcgctggcggcgaggagactggcggcggtgagattgatatacatccggctgtcaatcgccgactcaaggaaggtgaaaccattaggataactgtaaaaaacaagccatcaactggaagtggtatgctttcagctgctggtttatctggagggaccactgcaaaacccaagacaagcatgcttcttgcgccacctccaggcgcagctgggaagcttagatctccacttccaccaccacctaacgaccctgcagctgcaaggatgaattctggacatactgcaggaatcagggctccaaaagaacccaccaagagaaataacgatcctttttcagatctttctgctataaagcaaaatctaccttcatctgctgaacccggacaaacaaagagcacaggagctggatgggcagcattctgacgatggatgcatgatctactgctactattggcatttgtttatctgaagaaggggaatgggtagttgaagcaccgaacaaggatctggaactgctggatgcctctacccctttcgaaactgaatggttaaaatgattgatcaacctaccagttccagttgtcacttgtcagtcgagaaataaacctttcccagagttgtattacccgtctcaccacatgaatggatgctcacattttctggatttagatacagcgtcccatcttgtttttatgttattcgtgctatgtttcacaaagcaataccagaatcatactgacctcgatgtgtattttgcggcgaaagattag

SEQ ID NO: 27433 - DNA, 673 bp, Zea mays
  Clone ID: LIB4730-031-E5_FLI
taccctcgaggccggccgggtctaatcttcgggttcgcgtcgcagtgtcttccgcccgggctaccaccatgccgaagcagatccacgagatcaaggacttcctgctgactgcgcggcggaaggacgcacggtcggtgcggatcaagcgggccaaggacgccgtcaagttcaaggtgcgctgctccaggtacctctacaccctctgcgtccacgacgccgacaaggccaacaagctcaagcagtcgctcccgccaggtctgactgtccaggagatttaaggtatcaagccacaaactgtgctttttttgcggtgtcagggacgtttgctccagtgttactttagtttgtaggtgggctccattgctgtgtttgaatgaattatgaagtttgagtttgggatgcgaatgatgtgtcgaacctatgagcctgtgttgtaatggttaccccagaccgcaaaggatggcaatctatcataagttaaactgatttccgtgattttcgcttcccccccttttgtctgattcctttgttgtttttcgcctgagcctttttctgccacagcaattgcgaactttgacgtggcaatggtggaatgagttatgttgtatcatctttcttgcctgctcgtatttgtaatattgaacagatagcagctgaaaattttgtagataag

SEQ ID NO: 27434 - DNA, 636 bp, Zea mays
  Clone ID: LIB4730-031-E7_FLI
ccgggaccgcaatcttcaatctccccagcaatccctagcagaagccttccatcctcactcgctcgatggcccgcacgaagcagacggcgaggaagtccaccggcggcaaggcgccgaggaagcagctggcgactaaggcggcccgcaagtctgcccctgcgaccggcggagtgaagaagccccaccgcttccgccccggcaccgtcgcgctccgggagatccgcaagtaccagaagagcacggagctgctgatccgcaagctgccgttccagcgcctggtgcgggagatcgcgcaggacttcaagaccgacctacgcttccagagctccgctgtctccgcgctgcaggaggcggctgaggcctaccttgtcgggctcttcgaggacaccaacctctgcgccatccacgccaagcgcgtcaccatcatgcccaaggacatccagcttgcccgccgcatccgtggggagagggcctaagcatcatatattctgtcatcagtgcccgatcagaagatgtagagatgtgctgggttctgtagtttgggttactgtcgaatcatcgagtagttggttgttcactgctgtaacttattatcatgatgcatatgaaatggcaatgaactatgttatcagttcg

SEQ ID NO: 27435 - DNA, 694 bp, Zea mays
  Clone ID: LIB4730-033-A10_FLI
ccaggccatcattccatcgtctttgctcgaggagtcgaggttcaggttccacggtgcggcgagagctagctcgcagccatggagagcaagagcccatggtcgctgcggctgctaatttgctgcgcggcaatggtggccatcgcgcttctcccccaacaaggaggccaggccgcttgtttcgtgccgacgccgggtccagctccggcaccgcccggctcctccgcgacgaacacgaacgcctcctccgctgctcctcggccagccaagcccagcgcattcccgcccccaatgtacggtggtgtcacccccggcaccggcagcctccagccccacgagtgcggcggccggtgcgcggagcggtgctcggcgacggcgtaccagaagccgtgcctcttcttctgccgcaagtgctgcgcggcgtgcctgtgcgtgccgccgggcacctacggcaacaagaacacctgcccctgctacaacaactggaagaccaagcggggaggccccaagtgcccctagtagccctccctctcggtctacttgatgagatcttctgttcaaaaaatcaaaaggaataagaatctgtttaactatctttagatttcacaaataaaacaggtttcaatttatctttgtagtgaaacgcttgcagctcatgtgtgaatctcatccaatattagtgtcagatccctagctg

SEQ ID NO: 27436 - DNA, 1759 bp, Zea mays
  Clone ID: LIB4730-033-G11_FLI
ccgggagagactcagagctcgcaactcgcaccaggcaccagcacagcagcaccggcagcaccaccaaccccagggcagccgcgccgccagccacgacgagcttagcagcccctcgcactcgctagggtatttattggtacaatcgggtgatctgcgtgccgcatcgcgccgggacacgggagacaatggcgttcacgacgctcggcggctgtggggcgcaggcttcagtgcggttggctccccagaatggaatccttggatctaattcgaagccattcgcgggcatcatactcaagaaacctcagcaggttggatccctgcccctccgtgcaaggggatccattttttcttcaccacgcaggcttttctcccctaaggcagcagcccctaaatcaggggattccatacgcattgcagtgctaggggccagcggttatactggagctgagattgttcggattctagcgaaccaccctcagtttcatataaaagtgatgactgcagatagaaaagctggcgagcaatttggatcagtatttcctcacttgataacacaggacctgccgagactggtcgcaataaaagacgctgacttttcagatgttgatgctgttttttgctgcttgccacatggtacaacccaggaaattatcaaaagcttaccccgacacttaaagattgttgatctctcagcggacttccgactacgcgacatcaatgagtatgctgagtggtatggacattcccacagggcaccggaacttcagggggaagctgtgtatggtttgaccgaacttaaacgagatgacataagaaatgcacgcctggtagcaaatccagggtgttatcccacatctattcaacttccgctcgttcctttggtaaaggcaaaactgatcaagctaaccaacattattattgatgcaaaatctggagtcagtggtgcaggacgtggggctaaggaagcaaatctttacactgaaatcgctgagggtatccatgcttatgggataacaagccatcggcatgtgcctgagattgagcaaggacttacagatgctgctgaatcaaaagttactatcagctttactccacatttgatgtgtatgaaacgtgggatgcaatctactgtgtatgttgaattggcatctggagtgactcccagggatttgtatgaacacctaaagtctacttacgagaatgaagaatttgtcaagctgttacatggtagcaatgttccttgcacaagccatgttgtgggatcaaattactgcttcatgaatgtctatgaggatagaatacctggaagggccatcatcatctctgtcatagataatcttgtgaagggagcatctggtcaggctttgcaaaatcttaatctgatgatgggactgcctgagaatatggggctgcaataccagcccctgttcccttgatcttttgtgtcattatctattattacattatttaggagtccagaaaccaaattatcattactgtcaagaggtggcaaggagcctgacatcagaattcagtcaagtcgaagttagacagttagtgtagcttggtctgtgttgttttagctttattaaaccattaagagaataatgatgatggcaatttagcagtacaatggtagtattatgtgggcagcttggttccaataaaatcataagtctatacacatcttgtgcccgcaatgttgtttgctattttgatcacgaaatcaatattgagcttgaattcagttcaaaaaaag

SEQ ID NO: 27437 - DNA, 1281 bp, Zea mays
  Clone ID: LIB4730-037-F1_FLI
ccgggactcatccattccatcatcccctttgcaagtatagtctctctgctaagcgaagcgaagcttcaagctagtctcggcggctctagaagacgatgggcaaggacgacgtgatcgagagcggcgctggcggcggcgagttcgctgccaaggactacacggaccctcccccggcgccgctgatcgacgcggcggagctggggtcctggtcgctgtaccgcgccgtgatcgccgagttcatcgccacgctgctgttcctgtacatcacggtggccaccgtgatcgggtacaagcaccagacggacgcgtcggcgtcgggcgccgacgcggcgtgcggcggcgtgggcgtgctgggcatcgcctgggccttcggcggcatgatcttcgtcctcgtctactgcaccgccggcatctcggggggccacatcaaccccgccgtcaccttcggcctcttcctggcgcgcaaggtctccctggtgcgcgcgctgctctacatcgtggcgcagtgcctcggcgccatctgcggcgtcggcctcgtcaaggcgttccagagcgcctacttcgacaggtacggcggcggcgccaactcgctcgcctccggctactcccgcggcaccggcctcggcgccgagatcatcggcaccttcgtgctcgtctacaccgtcttctccgccaccgaccccaagcgcaacgcccgcgactcccacgtcccggttctggctcccctccccatcggcttcgccgtgttcatggtgcacctggccaccatccccgtcaccggcaccggcatcaacccggccaggagcctgggcgccgccgtcatctacaacaaggacaagccctgggacgaccactggatcttctgggtgggccccctcgtgggcgctgccatcgcggccttctaccaccagtacatcctccgggctggcgccatcaaggccctcggctccttcaggagcaacgcgtgatgagcggggcttggctgtggagcaatggcgggcgacctacgggcggggggccgtgagcgaggagaatgccatcattcatcgatcgacttgggtgccggtggttggttcgggtcgccttattttgtttcagcagctgctgcgttgcgcgcgtgcgtgagatttggtttggtttcgttcccctgcaatgtaatcatgtcgtgactctctcaagggattattccgctctgctcttatggcctctgttttctattttaatgattgttattaccatgtagcagtaaccatcgtcatcagtgagaaccttgtagcttct

SEQ ID NO: 27438 - DNA, 638 bp, Zea mays
  Clone ID: LIB4730-045-B3_FLI
ccgggaccgcaatcttcaatctccccagcaatccctagcagaagccttccatcctcactcgctcgatggcccgcacgaagcagacggcgaggaagtccaccggcggcagggcgccgaggaagcagctggcgactaaggcggcccgcaagtctgcccctgcgaccggcggagtgaagaagccccaccgcttccgccccggcaccgtcgcgctccgggagatccgcaagtaccagaagagcacggagctgctgatccgcaagctgccgttccagcgcctggtgcgggagatcgcgcaggacttcaagaccgacctacgcttccagagctctgctgtctccgcgctgcaggaggcggctgaggcctaccttgtcgggctcttcgaggacaccaacctctgcgccatccacgccaagcgcgtcaccatcatgcccaaggacatccagcttgcccgccgcatccgcggggagagggcctaagcgtcatattttctgtcatcagtgcccgatcagaagatgtagagatatgctgggttctgtagtttgggttactgtcgaatcatcgagtgttggctgttcactgctgtaacttaattatcatgatgcatatgaaatggcaatgaactctgttatcagttctcg

SEQ ID NO: 27439 - DNA, 911 bp, Zea mays
  Clone ID: LIB4730-045-D8_FLI
atcaacatcaccgagacctatagccgcagaaccaccgaatccagggcatcggagagtgtagaggttagtactaggcggaggtcaagatggtgtgcatccggcaggcgactatcgacgacctgctggcgatgcaggcctgcaacttgatgtgcctgccggagaactaccagatgaagtactacctctaccacatgctgtcttggccgcagctcctcttcgtcgccgaggactacggcggccgcatcgtcggctacgtgctcgccaagatggaggaggacccctccgagccctgccacggccacatcacctccctcgcggtgctccgctcccaccgcaagctcgggctcgccaccaagctcatgtccgccgcgcaggcagccatggaccaggtcttcggcgccgagtacgtctccctccacgtccgccgatccaaccgcgccgccttcaacctctacacctccactctcgggtaccagatccacgacatcgaggctaagtactacgccgatggagaggacgcgttcgacatgcgcaagcctctccggcagccgcaacctaagaagcaccaccatcaccaccaccacggccccggtgggtgctgctcccacgacgcacctacggcgacgactggttcttctcttcagtcttctagttcgccggataagaaggctaacacttgacggatgaagcatatctacagagaggagtcaccaagcccattggacttccgatacgcagctttttctaatagaatgggaaacgaattgtactgtaattgtttgtgtactttactttggctcaatcgtccgaccgtatctttgtaatcagtgagaatggcaagcaaatgtccttgacatctattgttattgtaaaaacatgtgttataacgctgattctcagattacatttgg

SEQ ID NO: 27440 - DNA, 685 bp, Zea mays
  Clone ID: LIB4730-048-E2_FLI
ccgggattcgtgtcctggcatccgcagagagcttgttccgtccaggcaaccaaaaagcaagttgccccgccgcgcagaggaagaagagagcagaggaggatggctcgtacgaagcagaccgcccgcaagtccacgggaggcaaggccccccgcaagcagctcgccaccaaggcggcgaggaagtcggcgccgacgaccggcggcgtgaagaagccccacaggtacaggcccggaaccgtggcgctgcgcgagatccgcaagtaccagaagagcacggagctgctgatccgcaagctgcccttccagcgcctggtgcgcgagatcgcgcaggacttcaagacagacctccgattccagagccacgccgtgctggcgctccaggaggccgccgaggcctacctcgtcggtctcttcgaggacaccaacctctgcgccattcacgccaagcgcgtcaccatcatgcccaaggacatccagctcgcccgccgcatccgtggggagagggcctaggcgtcgtcgcggtggaggtggaagtagtagtcgcagtttctgtcatcactgtctggctagaagttgtagagatgtgccggtttatgtagtttgggttattggtcgaatcattatgtagttgggtcttcactgctgtaatttaactatgactatgcaatggcaatgaagttctcgg

SEQ ID NO: 27441 - DNA, 1468 bp, Zea mays
  Clone ID: LIB4730-048-H3_FLI
ccgggaaaccctacccgactccgccgccgcccgccgctccgcctcagcgcatagcccgccgcgacctcatcgatcaccttcaactttcaatcatggcggacgtcgatgtcgaaccggaggttgccgccggagctcccaagaagaggacgttccgcaagtacagctaccgcggcgtcgacctagatgcgcttctcgacatgtccacggacgacctcgtccagctcttccccgcgcgcgccaggagaaggttccagaggggtctgaagaggaagcccatggcgctcatcaagaagctgcgcaaggcggtcagtttccaaccgcttagttttcattaccactttttgttagcgtgttccgatcaagataagtgcgtggatcgttatgctgtcatgatttacccgtacgatatgaggtgtgatcttggtgtcaaaattttgatcaaatctcagcgcctattgttgtttagtgtaaatatcgtcttgaaagaagatgcaattaatcaaccagaagactgtttacttgaatgcttggcaaggttgctagtatgagtgttgcaattacaaatgtcgtagcaaggttgctagtattgactgtagcaattacaaatgttgaatcttgttatctatgtctagaaggagaatttgttgtattttgtagagctcctatatcatttgttctctcttttctctagacaaataaggttgttggtttagaaattgcttactgaatggtgcatacttctccattttctttgttatgtagtctgctgttttgtgacctgccttgtatcaatcataccattgttgtgtctgccgaatactattgggatattgataaatcaaagtttctatcctgaatgtacagtatgctagctgcagtgccttctgttctgtgccaggtagatgcggtcaatgcaagattgtgtttatcggttatcatctgtggaagtttgttttcttatacttgttactcaatttcctcacgagctatatcccactgtcctgaacagaaaaaagatgctcctgctggtgagaaaccagagccagtcaagacacatctccgtaacatgatcattgtccctgagatgattggaagcattgttggtgtctacaacggcaagaccttcaaccaggttgagatcaagcctgagatgatcggccactaccttgctgagttctccatctcctataagccggtcaagcatggcaggcccggtatcggtgccacccactcctcgcggtttattcctctgaaatgagctgttacccggctctgtagtctcccaagagtcagttggcaatgttcgttcagcttttctacttgttttgaacaagttaaatgcccaagatattttgttttgttccattccagctcaagaattcaaagctaagcattgcacaattatgctgttttgttggaagtttttgagttaatcatatctaagctgagttgctattttgggttgttt

SEQ ID NO: 27442 - DNA, 1087 bp, Zea mays
  Clone ID: LIB4730-051-C9_FLI
ccaaaacactggccgccagctccagtccgacttccctctctctattttgttcttttttttcgtcgcttggcaaacagcttcgtctggcttccttgcctcggctaacggctaaaaaaaccagcgagcacgatttctcctctctctctctgctggccgactaaggagggcgtcgtgggcctcaccgccggcgagtgcgtccctgcgggtgggcacactgccgtcggttgtccagcacagctacaagttgaggagctctgcagtaaaggaagtgtgtagtcaccatggtccatttcaagaataggtatatggtggtggagatctttatagatgcaggtagaggtgaacaggaccctataatcctcacccaatttaatataacaaaagttataaaagacagcattcagctcaactttggtgagtgtggcctagctggatctcttggatcattgcaagttaagtatgtcaatcctgtaacgaagctctgcattgtccgcgtgtctcgcgaagaccaccagaaagtttgggctgctatgacgatggtgcggtgcattgggaagatccccgtttcgttcaacttgctcgacatgagtggaagcatcagggcttgcaagaaagctgcattggagtgcgatgaagcgaaatttgagcaatacaagctggttgctggtgattgtatcacggcagagatcacccagtctgtagagaagtgctttgagaagatcagaggactagagagctaagcagaagaattgacatcatgtccacccacactcggatcctaaaacctgctgaccctgcaccacatccgtgatcacgtcacaccacaagttgtgtgtccagcgcccaccacagcaacggcctcttgctgccagcagcctccgtgcctccagcagctctcctctccaaggaaaagtctgaagtccgcaaccaaacaagtgttctgcagctgctctttgccgttggttgaagtctgcaaccaaacaagtgttatgcagctgctctttgccgttggttggagttcttggctccacactttcagaaagaattcatgtatacataaaatttattatatagagagtttgcttcg

SEQ ID NO: 27443 - DNA, 1512 bp, Zea mays
  Clone ID: LIB4730-052-B11_FLI
cgctgcaccaccaccgttcatcgaggaggaggggggacggagaccacggacatggagagatctcaacggcagtctcctccgccaccgtcgccgtcctcctcctcgtcctccgtctccgcggacaccgtcctcgtccctcccggaaagaggcggagggcggcgacggccaaggccggcgccgagcctaataagaggatccgcaaggaccccgccgccgccgccgcggggaagaggagctccgtctacaggggagtcaccaggcacaggtggacgggcaggttcgaggcgcatctctgggacaagcactgcctcgccgcgctccacaacaagaagaaaggcaggcaagtctacctgggggcgtatgacagcgaggaggcagctgctcgtgcctatgacctcgcagctctcaagtactggggtcctgagactctgctcaacttccctgtggaggattactccagcgagatgccggagatggaggccgtgtcccgggaggagtacctggcctccctccgccgcaggagcagcggcttctccaggggcgtctccaagtacagaggcgtcgccaggcatcaccacaacgggaggtgggaggcacggattgggcgagtctttgggaacaagtacctctacttgggaacatttgacactcaagaagaggcagccaaggcctatgaccttgcggccattgaataccgtggcgtcaatgctgtaaccaacttcgacatcagctgctacctggaccacccgctgttcctggcacagctccaacaggagccacaggtggtgccggcactcaaccaagaacctcaacctgatcagagcgaaaccggaactacagagcaagagccggagtcaagcgaagccaagacaccggatggcagtgcagaacccgatgagaacgcggtgcctgacgacaccgcggagcccctcaccacagtcgacgacagcatcgaagagggcttatggagcccttgcatggattacgagctagacaccatgtcgagaccaaactttggcagctcaatcaatctgagcgagtggttcgctgacgcagacttcgactgcaacatcggatgcctgttcgatgggtgttctgcggctgacgaaggaagcaaggatggtgtaggtctggcagatttcagtctgtttgaggcaggtgatgtccagctgaaggatgttctttcggatatggaagaggggatacaacctccagcgatgatcagtgtgtgcaactaattctggaacccgaggaggttttcgctttccaggtgtcctgtcttgggtaatccttgatctgtctaatgccacagtgccactgcaccagagcagctgagaactttcttgtagaaagcccatggcagtttggcgttagacaagtgtgtcgatgttctttaattctttgaatttgcccctaggctgcttggctaacgttaagggtttgtcattgtctcacttagcctagattcaactaatcacatcctgaatctgaagtggttgtgcttgtgcagg

SEQ ID NO: 27444 - DNA, 859 bp, Zea mays
  Clone ID: LIB4730-054-E2_FLI
ccgggagatcacaccacagccgcggatagagaaggaaaaatttccccaaaccctagcttcggatctcgatggcgaacccccgcgtcttcttcgacatgaccgtcggcggtgccccagccggccggatcgtgatggagctgtacgccaacgaggtgcccaagaccgcggagaacttccgcgcgctgtgcacgggcgagaagggcgtgggcaagtccgggaagccgctccactacaagggctctaccttccaccgcgtcatcccccagttcatgtgccagggcggcgacttcacccgcggcaacggcaccggcggcgagtccatctacggcgagaagttccccgacgagaagttcgtccgcaagcacaccggccccggggtgctctccatggccaacgccggccccaacaccaacggctctcaattcttcatctgcaccgtggagaccccctggctggatggcaagcacgtcgtcttcggccaggtcgtcgagggcatggaggtcgtcaaggccatcgagaaggtgggctcccgcagcggcgccacctccaaggaggtgaaggtcgctgactgtggccagctctagatctctggtctgtccggctgccctccctccgtcatcgtcgactccgcctgcgtccgtcccttttcatttccttcgatctgaataagatgatggcgatctgagtggtggtcttagttgagtcttcaagtcgtttgtgtctgtgtccctcgcggttttaatttagcggtttaggtgtggatctgtgaatcccgtggcgcctctgcttaatccttgtttcagctgttatgttatgggatccatgataatgctataaaactgaaattccgtttcgtgct

SEQ ID NO: 27445 - DNA, 1651 bp, Zea mays
  Clone ID: LIB4730-059-A1_FLI
gtgccacacatccatccccgttcgcctcttctcctccctcctgccgggtccttaataaagagcagcagcgcaagaggttggtagagcgagcgagaagaaggcaatggcggcggagagcttcctgttcacctcggagtccgtgaacgaggggcacccagacaagctgtgcgaccaggtgtcggacgcggtgctggacgcctgcctggcgcaggaccccgacagcaaggtggcctgcgagacctgcaccaagacgaacatggtgatggtgttcggcgagatcaccaccaaggcgagcgtggactacgagaagatcgtgcgcgacacctgccgcgagatcgggttcacctccgacgacgtggggctcgacgccgaccgctgcaaggtgctggtgaacatcgagcagcagtcccccgacatcgcgcagggcgtgcacgggcacttcacgaagcggcccgaggagatcggcgccggcgaccagggccacatgttcgggtacgccaccgacgagacccccgagctgatgccgctgagccacgtgctggccaccaagctcggcgcgcgcctgacggaggtccgcaaggacggcacctgcgcctggctcaggcccgacggcaagacccaggtgacggtggagtacgtgaacgagggcggcgccatggtgcccgtccgcgtgcacaccgtgctcatctccacccagcacgacgagaccgtcaccaacgacgagatcgccgccgacctcaaggagcacgtcatcaagcccgtcatcccggagaggtacctggacgagaagaccatcttccacctcaacccgtcggggcgcttcgtcatcggcgggccccacggggacgccggcctcaccggccgcaagatcatcatcgacacctacggcggctggggagcccacggcgggggcgccttctccggcaaggaccccaccaaggtggaccgcagcggggcctacgtcgccaggcaggccgccaagagcatcgtggccagcggcctcgcccgccgctgcctcgtgcaggtgtcctacgccatcggcgtgccgtagcccctgtcagtgttcgtcgactcctacggcaccgggaccatccccgacaaggagatcctcaagatcgtcaaggagaacttcgacttcaggcccgggatgatcaccatcaacctcgacctcaagaagggcggcaacaggttcatcaagaccgccgcatacggccactttggccgtgacgacgccgacttcacctgggaggtggtcaagcccctaaagaaggcatccgcttaagaatgtattgggaagttcactggacatgaggttcatcttcgtctggctctgctgatacctgcaaggattgctgctgctgctgcccctggatgtgtgtttgatcagtgactggctgctctgctccatagaagacgaatgaagagagacagatggtgaagaaggctgcggcaattggcaattgccgcagcaagccatgtcggcgccaccgaccgccttagtgattggtataatttggtgtggcagcagccaggattaatgcgctggtcttttatctttactactagtttggtctcgtccggtatcttatttttctttccccttttcgagtctgtactgaaactgctgagagatttgcagttttgatctagc

SEQ ID NO: 27446 - DNA, 897 bp, Zea mays
  Clone ID: LIB4730-061-D3_FLI
ccgggaaaaaaagacttgaacacggccagcgtctcatcggctgggcgtggtctactgcacgcacacttaccaccagccaccgcaagtgaatcgctagtcggaagaccatgtcctcagaggccagcagcgtcgtcgtcgccgacgagaatggagcggcggagacggtcggcgtcggacggtacgtggaaatggagaaggaccaagactcgagcgcagccaagtcgcggctctccggcctgctctggcacggcggctccgcctacgacgcttggttcagctgcgcgtccaaccaggtggctcaggtgctcctgaccctgccctactcgttctcgcaactggggatgctgagcggcatactgttccagctcctgtacgggctgatgggcagctggacggcgtacctcatcagcgttctctacgtggagtaccgggccaggaaggagagggagaaggcggacttcaggaaccatgtcatccagtggttcgaggtgctggacgggctgctcgggaggcactggaggaacgtcggcctggccttcaactgcacgttcctgctcttcggctcggtcatccagctcatcgcctgcgcaagcaacatctactacatcaacgacaagctggacaagcggacgtggacgtacatcttcggcgcctgctgcgccacgacggtgttcatcccgtcgttccacaactaccggatctggtcgttcctgggcctcgtcatgaccacctacacggcgtggtacctcgccgtcgcgtccctcatccatggccaggttgatggcgtgaagcactccgggccgaccaagatggtgctctacttcaccggggccacaaacattctctacactttcggagggcacgctgttaccgtggagatcatgcacgcgatgtggc

SEQ ID NO: 27447 - DNA, 665 bp, Zea mays
  Clone ID: LIB4730-062-H4_FLI
ccgggaggggccaccaaagcaatcttgcaatccacccctcgaaagaaaacctcaatcaacaccagcagctctcgatcccaccgaggaagaagagagaggaatggcgtccgaggaggaaggagtcgtgatcgcctgccacaccaaggccgacttcgacgcccacatggccaaggccaaggaggccggcaagctggtgatcattgacttcacggcctcctggtgcggcccctgccgcttcatcgcgccactgttcgtcgagcacgccaagaagttcacccaggctgtgttcctgaaggtggacgtggacgagctgaaggaagttgccgcggcctacgatgtcgaggcgatgccgaccttccacttcgtcaagaacggggtgacggtcgagaccgtcgtcggtgccaggaaggagaacctcctggcccagatcgagaagcactgcgccgcggccgtgcctgctgcgtctgcgtagagaggatggaccagcacgtggcggtggcggtggcggttgtcttgtcgttttcagtttgggcttgtcagctgtggctgggtggttgattgtgaactggagcatgcagttttactctgggagcccatcatttggttggctcaggtgtcaataatctgtataccttaatcatggatagttgttgtgagttgtgact

SEQ ID NO: 27448 - DNA, 790 bp, Zea mays
  Clone ID: LIB4730-064-H11_FLI
cgggtggtgcgggagctcctgcgctcgatgggtctcggtgagggcgagtacgagccccgcgtcgtgcaccagttcctggacctggcctaccgatacgtcggagacgtgctaggggacgcccaagtctacgccgaccacgccgggaaggctcagatcgacgccgatgacgtccgcctcgccatccaggccaaggttctccttgagctggcccgcagccgaaacagaatgccgctgcccaaatcaattgctcctcctggctcaattccgctcccgcctgagcaggacacactgttggcccagaactaccaactcctgcctccgttgaagccgccacctcaatttgaggaaaccgaggatgagaatgaagaatccaacccaagtctgacaccgaacccggcaaattctaatccaaccttctcgcaggatcagcggagtaacgagcaacagcacactccccagcatggccagagggtttcgttccaactcaatgctgtggcagctgctgctgcaaagcgacctcggatgaccgtcgaccagctgaacatcggctaaccagttatcgttggttagactgtagtatcattttccccatcttttagtctggtgaatcatgtttcgaagagatttagtgttgtagtggtatgatcttatttaccacccacctatttaaccacgagatgtgcagtacagcagcagcatcataaagtttctgactgcaagaacgttgatgtagggaaggaaagtaactgtgctagtagtgtacttgcttacttcaaggttaatatctgat

SEQ ID NO: 27449 - DNA, 772 bp, Zea mays
  Clone ID: LIB4730-065-H1_FLI
ccggcacttttccggcctcccattcctcgcgcggcgaccacccgattcgaagcgtgcggagagaccgaagaagcgggagagatggctcgtaccaagcagactgctcgcaagtccacgggagggaaggctcccaggaagcagcttgccaccaaggctgcccgtaagtctgcccccaccactggtggagtgaagaagcctcaccgctaccgccctggaactgttgccctccgtgagatccgcaagtatcagaagagcactgagctgctgatcaggaagctgcccttccagaggctcgtcagggaaattgcacaggacttcaaaactgatttgcgtttccagagccatgcggtgcttgccctccaggaggctgctgaggcataccttgttggcctgtttgaggacaccaacctgtgcgccatccatgctaagcgtgtgaccatcatgccaaaggacattcagctggcaaggaggatccgcggcgagagggcctaatcgccacctcaaacatcgtgacaaaaacatgaagtcctggggttattgttaatctggtgccattgtaaggacatatgagtagggtttgttttgtggatcgcaagtttctcttctgctactgttgctgctacctttgctggtgttattgctagggtcgaatacttaagttaactatgcgctgacagtctggactagcagtgttatgtgcgctgctggaccttgcgcgcaatgctgtggccgatttgttcgttaatgtcaagaattgtgttacagtgcgtac

SEQ ID NO: 27450 - DNA, 1080 bp, Zea mays
  Clone ID: LIB4730-069-B4_FLI
ccgggagtgaagttagccatcagtacgcggacacgctccatcagcgtcaggccacagccaccatggtgaagctggcgacggcgcgcgagtgccgcgcatacagcctcggcgccggcgcggggtccggcacggggttgcgcaaccggtgggagtacatcaacgccggggtgtacatcttcgcggcggtcctcctggtcggcgggttcctggcgcagctcctgccgtggggcgggcccagcagcccggggctcgtggtcgccgcgatcgggctcgccggcttgctggccgtcaacacgcacgacctcctcgcgcacgccgccggcgtcgattaccgcctcgggatggtggtcgggcttgacgcgcagatggggctcgtcgagctcggcgtccccgccgtgcagatcgttggcaccgcgctcatgctcgtcgctgtcgtcttctttgtgattcagatggagagaggctaccggcacagcctagccatgcacggcctgaacctgctcatagccgggccggcactgtggtgcctggggtctgtgcaaaacatctgccagttctacgagcgtgcgagcgggcacgtccagctcctgcagaagagcgtgcagatcccgctgctgctgggaagcaccctcttcctcatcgccggcatcgtcaaccggcacgaccgccgcagccgccactccggcttcgtgctactggggaggaactgggcgtggttctgcctgttcgggagcctcctcttccttgccggcggcccgctgaacctactcaaggtgttcaagacgcagcagatgggcggccggggcctggagaagctgcgcggtggctcgcaggagcggctggccttggagcgggagggcaaggtgccgctcatcctggagcacggacacggcggccggaggggccctgcgataccgccgccgccgcccgggtcttacaaggacgcgctcgtcagtagcgccagctaggaacagaaatggccttgtagatgctcagcattttacgttgaactgcatcctctgtttttaatcatcaatcacgttcacgcctgcttgaataagcttttactagccgtttgct

SEQ ID NO: 27451 - DNA, 560 bp, Zea mays
  Clone ID: LIB4730-073-E11_FLI
tttggatagaagtgcttggaaaaccatcgactcggcgagacatggcggactggggccccgtggtggtgggcgtggtgctgttcgtgctgctctcgccgggcctgctctgcgagctgctgggcacccaccgccacgtcgacttcggcggcttccacaccaacggcaaggccatcttcgtccacaccctcgtcttcttcgccgccttcaccatcctcacgctcgcgctccacatccacatctacaccggctagctagctagctagtgcggagcacatgccgccggtctggactcgcggaggtctcagatcagaaaggaacgccggccggcggcgcgtcctgtgttgctgctcttgttcctctgcagttcgatcgattcgacgaagtgcttgtaactgcctaagcttcctccttgctatgctagttactctctatctatcatgtaaaggccgccatggtcgtccatctgtagctgggcttgcagcaacaggaactagtgcgtgccctttaattaatcgaatctgttggttggttgcttaattaattcgcactctgttcatctc

SEQ ID NO: 27452 - DNA, 552 bp, Zea mays
  Clone ID: LIB4730-075-B10_FLI
tcgaggccggccgggatccaattcacaggctcaccacaccaaccagcaagcaaaaattccccaatcctctcgtctccgcggcgaagatgtcggggcgcggcaagggcggcaagggcctgggcaagggcggcgcgaagcgtcaccggaaggtgctgcgcgacaacatccaggggatcacgaagccggcgatccggaggctggcgcggcggggcggcgtgaagcgcatctcggggctcatctacgaggagacccgcggcgtgctcaagatcttcctggagaacgtcatccgcgacgccgtcacctacactgagcacgctcgccgtaagaccgtcaccgccatggacgtcgtctacgcgcttaagcgccagggccgtaccctctacggcttcggcggctaggcctgccgccccgcgcctcgccgtcgctgcggttctggtgttgctgcagttcgcaagttgtttgtgtgggggaaatttgctagatactgtagaactgcagtgcggtatgctgcacatggtgtgtttgtctgaagaaatgttgtcattgctggcg

SEQ ID NO: 27453 - DNA, 681 bp, Zea mays
  Clone ID: LIB4730-075-E3_FLI
cctcgaggccggccggggttgaatcgaaagtggtggttcagccgttcaggagctaccaccggcactctccttcactccttccattattttatcggtgctcgaggttcaggtttcacgcagtgcggcgagagctggcagccatgaagagggggagcccatggtcgctgcggctgctaatttgctgcgcggcaatggtggccatcgcgcttctcccccaacaaggaggccaggccgcttgtttcgtgccgacgccgggtccagctccggcaccgcccggctcctccgcgacgaacacgaacgactcctccgctgctcctcggccagccaagcccagcgcattcccacccccaatgtacggtggtgtcacccccggcagtctccagccacacgagtgcggcggccggtgcgcggggcggtgctcggcgacggcgtaccagaagccgtgcctcttcttctgccgcaagtgctgcgcggcgtgcctgtgcgtgccgccgggcacctacggcaacaagaacacctgcccctgctacaacaactggaagaccaagcggggaggccccaagtgcccctagtagccctccctctcggtctacttgatgagatcttctgttcaaaaaatcaaaaggaataagaatctgtttaaccatctttagatttcacaaataaaacaggtttcaattg

SEQ ID NO: 27454 - DNA, 1621 bp, Zea mays
  Clone ID: LIB4730-075-G7_FLI
aacgcctcctctcgcccgtccccatttgagacaaatccacgtccgtccatctagagagagagagagagagagagaggaagcttctctgattccgcggttcggctcgcccggacatgatagagataaagcaatgattcgctccggctagcatcgcatctgatcgatcactctcaatcccctgcagctcccgcccacccacccacaggcgtcgctctgaggtcgctctcgccggagcagcagcgccgacgcgggcctcggcgcagcgggatctcccaccctccgcccaccatcgtcgcctcgccggccgacccagccaggatcggccacaaacaagaacgaccaaaaggcgcgcccctcaagcggcgtcgtcctcgtcctcgtccccgaggcggaggaaaaagtcaacccggatccatccacgagaagagatggggtcgttcaaggggcacgtgctgccgggcaccctgttcctggcggtggggctgtggcgggtgtggtcgtcggcggcgcggcacgccgcggacccgtcgtcgttccgggtgcgcgcgtggagccccgcgccggcgcgcgggccggcgcggctgctggagctctacgtcgtggcgggcggcgcgctggcggacatgtgcgtggaggtgctctactccacgcacctccggatattcgccggcggcgaggtcaacccggcgcacctcaacgacctcgagcacggcggcatgctgctcatgttcttcctcttcggcgcgctcgctctggcgtcccagctctggcccaggcacttcccgctgacggacggcgcgctgtgcctggtggcggcgacggcgttcacggcggagttggtgctcttctacttccactccacgacgcacatggggctggaggggtactaccactacctgctggtgctgctggtgggcctgtgcgtcgccgccgccgtcctcggcgcgctcctgccggagagcttcccggccgacctggcctcgggcgtcctcgtcgcgctgcaggggctctggttctaccagacggcgctggcgctgtacgggcccatgctgcccgcgggctgcgcccgcgacgccgacgcccacgtcgagtgccgctcgcgcgccgcgcaggagcgcgccgagcagctcgccatctcccagctcttcgccctcgtgctcctcgccttcctctacgcgctcgggtgctacgccgtcgccgccgcgaggtacgggcgacccccggagctgcccgcggtgcgtcacaggcgcgccgcggccgtggagttggagtgccggcagggtgatgacgctggcgcgatggaggagtgcgcgatctagtggtgctggctgctctggatggagtctgctggactctgccttttgggtttatttggtgtagtagccgtataggaatttcagagtacatgcgtggtcagaatcagaagtagcttggagttttcaggctttcgatatcagggagggcagggcagggcaggcagggagtgtacatgttcggattaactatcaccaaagcttttgggtttcattccacgagttgcttaacttatgctgtaactgttactcatgtcagaggagaggagcgatacatagaatgaaaggaatatacttgttcgttcgcg

SEQ ID NO: 27455 - DNA, 1777 bp, Zea mays
  Clone ID: LIB4730-076-H4_FLI
ccgggctcacttcgcgcatctcccccctccctgcgcacagccgcacaccaccaacacctttcaccagacgccgccgccgccgccgccgccaccccccatccctgtcccgtcccgcgcgcggccgccacatccgtccgggcctcctcgtctccccagccccgctgccgcagggttcatcagcagaagttgcttgctccgccgccgccgccctcttcctcctctactgattttgcttcggggttcggctaaatttcgtcggatggatatcgatgccagcgccagcgtcatgtgccagctgctgagccccgagggagaccctttaggctctgcgctctatctgccccagaacgtcgggcccccgcagctccaggagattgtcaatcagctcctccacaatgaggagaagatgccctatgcattctacgttggagacgaggagctctctgtccacctgggtgcttacatgcggcagaagaacgccaatgttgaggttactctgcgcatagtatgccaaccacaagcacttttccggatcaggccggtcaaccgatgctctgccacgattgctggccacacggaagctgtaattgctgtttcttttagccctgatggaaagagtttggcgagcggttcaggtgacaccattgttcgcttttgggacctgagtacacagactccactgttcacatgcaaaggacacaaaaattgggttctctgcattgcatggtcacctgatggaaaacatcttgttagtggaagcaagtcgggagaacttatattatgggacccaaaaactgggaaccaattgggcactccacttatgggacacaggaaatggattactgctgtatcatgggagccagttcatttgcagtctccgtgccgccgctttgtaagtgcaagcaaggacggtgatgctcgcatttgggacatcaccacaaggaaatgtgttatttcccttacaggtcacactagttcagtgacctgtgtcaagtggggtggagatggtttgatttatactggttcccaagattgtttaatcaaagtatgggaaacttctcagggaaagttggtcaaaacattgaagggtcatgggcactgggtgaattcacttgctttgagcacggaatatgttctccgtactggagcatatgaccacactggcaagacattttcaactgcagaggaaatgaaagaggctgctcttgcgagatacaagaagatgaggggtaatgctccggagagactagtttctggttctgatgattttacaatgtttctttgggaaccaacaattagtaaacaacctaaagctcgcatgactggtcatcagaagcttgtaaaccatgtttacttttcccctgatggacaatggttggcaagtgcatcctttgataaatctgtcaagttgtggaatggtatcacaggtaaatttgttgcagcattcagagggcacgttgcagatgtctaccagatcagctggtctgccgacagtaggcttctactaagtggaagcaaggattccactctaaagatttgggatattcgaacacacaagttgaaaatggacttgccgggccacgcggatgaggtgtacaccgtggattggagccctgacggtgaaaaggtggcgtctggtggcaaggatcgggtcctcaagctatggatgaactgattgattattatatatctatgcttgggcgaattatatattgtagtgatgataattttgaaggtatactgagatcaattaattgtacaagatccatgcttggcc

SEQ ID NO: 27456 - DNA, 1196 bp, Zea mays
  Clone ID: LIB4730-077-B2_FLI
acacacaaaccagtagccactactccatccatccaccacgagcgcgcgataaccctagctagcttcaggtagtagcgagagccaatggactccagcagcttcgtccctgccgccggcgcggagaatggctcggcggcgggcggcgccaacaatggccgcgttgctcagcagcaggcgccggcgatccgcgagcaggaccggctgatgccgatcgcgaacgtgatccgcatcatgcggcgcgtgctgccggcgcacgccaagatctcggacgacgccaaggagacgatccaggagtgcgtgtcggagtacatcagcttcatcacgggggaggccaacgagcggtgccagcgggagcagcgcaagaccatcaccgccgaggacgtgctgtgggccatgagccgcctcggcttcgacgactacgtcgagccgctcggcgcctacctccaccgctaccgcgagttcgagggcgacgcgcgcggcgtcgggctcgtcccgggggccgccccatcgcgcggcggcgaccaccacccgcacccccactccatgtcgccagcggcgatgctcaagtcccgcgggcccgtctccggagccgccatgctaccgcaccaccaccaacaccaccacgacatgcagatgcacggcgccatgtacgggggaacggccgtgcccccgccggccgggcctcctcaccacggcgggttcctcatgccacacccacagggtagtagccactacctgccttacgcgtacgagcccacgtacggcggtgagcacgccatggctgcatactatggaggcgccgcgtacgcgcccggcaacggcgggagcggcgacggcagtggcagtggcggtggtggcgggagcgcgtcgcacacaccgcagggcagcggcggcttggagcacccgcacccgttcgcgtacaagtagctagttcgtacgtcgttcgacttgagcaagccatcgatctgctgatctgaacgtacgctgtattgtacacgcatgcacgtacgtatcggcggctagctctcctgtttaagttgtactgtgattctgtcccggccggctagcaacttagtatcttccttcagtctctagtttcttagcagtcgtagaagtgttcaatgcttgccagtgtgttgttttagggccggggtaaaccatccgatgagattatttcatgcacgctttttagaccg

SEQ ID NO: 27457 - DNA, 1229 bp, Zea mays
  Clone ID: LIB4730-077-D4_FLI
ccggggtcgcatttcccgtccggtctttccgttacccggcggcttaaaccctagttcccattccatcttcgtttccgctccgccgccgtcgatggagttctggggtctcgaggtcaaacctggatccactgtcaagtgtgagcctggacatggctttatcctgcacgtttcccaggctgcccttggggaatcaaagaaaagtgacagtgccttaatgtatgtcaaagttgatgacaagaagcttgccattggaacgctctctatcgacaaatacccacagatacaattcgatttggttttcaataaagagtttgagctgtcacacacatcgaaaactaccagtgtatttttctctggttacaaggttgagcagccaattgagggagatgaaatggatcttgattctgaggatgaagaggaggagctaaacattccagtaatcaaggaaaatggcaaagctgatgggaaggaggagcagaaaaatcaagagaaggcagtagctgctacagcttcaaaatcaagtcttggccttgaaaagaaaagcaaggatgactctgatgattctgatgaggatgagtctgatgattctgatgaggatgattctgatgattctgatgagggcgagggattatctcctgacgaaggcgatgatgattcaagtgatgaggatgataccagtgatgatgacgaggaagaaaccccaactcctaaaaagccagaggcaggcaagaagagaggtgctgaaaatgctctgaaaacgcctctttctgataagaaagcaaaggttgccacaccgccagcccagaaaacaggtggcaagaagggtgccacccatgtggcaactccacacccagcaaaaggcaagacccctgcaaacaatgacaaattaacggagaagtctccaaaatctggtgggtcagtcccttgcaaatcatgcagcaagacattcaatagtgagatggctctgcaggctcactccaaggcgaagcatggggccaaatgagttgcaggtccaactgagtccatgaaggagaagcatggtggccaagtgagtcgcaggtccattcgagtccatgaaggtgaagcagggagatccaagcgagtctggaaagattgtcgatgttagtaggctgtccttattttgtttagagacttgtggctatgtgattgatgtagcgaaacaaggctgtgatgtgttaactttgccttataatattttggttgaacat

SEQ ID NO: 27458 - DNA, 837 bp, Zea mays
  Clone ID: LIB4730-078-F4_FLI
ccgggagattttcgtgggcggataagcacattcacgcacatccacccgccgccacgcatcgcacgaactcccggtccgaaaggcaaaccagccaccagtcccaccaccaccaccctctgtcttcgcctccgctgccgattcgaaagcacccgtcctgtcccctcgcaaaaccctagctccagccaccatgaagggcaaggctgacacctccaagaaggacgagggcaggctccgcgagcggcaagcccaagcgcccgccctccgccttcttcgtcttcatgtctgaattcaggcaggagtatcaggcgctgcaccctggcaacaagagcgttgcgaccgtgagcaaggcagcaggggaaaagtggcgtgctatgtcagatcaagagaagcaaccatatgtggaccaagctggacagaagaagcaggactatgagaagactaaggcaaactttgataagaaggagagcacaagctcaaagaaggctaagactgaggatgaggatggctcgaagtcagaggttgatgatgaggatggcagcagtgacgaggaaaacgatgacgatgagtaaacactgtctccaaggtcacgaggtagcaaatcgagtgttaggtccccaattagcttactgttttgctgcctttaaatgttaagttgtttcaaacaggtgtttatgaaggggatctattaatttcgcgatgtcgttagtttagtgcattagcaaagaaaaagccgaatgctgctagctgttctgttgcttttcttttgctaaccacttgtgtcacaactttctgtacctgcttcattgactaatctagtgactagtcagttattggttc

SEQ ID NO: 27459 - DNA, 1207 bp, Zea mays
  Clone ID: LIB4730-079-B5_FLI
aatatctcaaaaagcccatcttctcttcctctctcgcagcaccgcctctcaacctccgccgccgctcgcccggggcgtcacccacccgcgcagaaggcccccgccgctcaaactaccggtgccctaaaccccgatattcttcttcgcctccctttcctcctcagcacccaaaccccgaccttcagggttccgccgccatgccgcagggagaccacatcgagcttcaccagaagcgccatggcaagcgcctggaccacgaggagcgcaagcgcaagcgcgaggcgcgcgaggtgcacaggcgctcgaaggacgcccgcaatttgattggtgctaagggcaagaggttcgccaagaaacgctatgctgagaaggcgcagatgaagaagaccctgaaaatgcacgatgaatcaaataagcgacagaaggttgatgatgatgtccaagagggtgctcttcctccgtatctactggatcgtgatcagacacagcgtgctaaggtactcagcaacacaatcaagcaaaagaggaaggaaaaggctggcaaatgggatgttccgctgccaaaggtcagacctgttgctgaagaagaaatgttcaaggtgctacgaactggcaagcgaaaaaccaagcagtggaagagaatggttaccaaagccacttttgttggagctggatttacaaggaaaccaccaaagtatgagcggttcattcgaccaactggtctgcgtttcaccaaagctcatgtgactcacccagaactgaagtgcactttcaaccttgacataatttctgtgaagaaaaacccaaatggtccgatgtacacttctcttggtgttatgacaaggggaacaatcattgaggtaaatgtcagtgagcttggtctggtaactcccgctggaaaagttgtttgggggaaatatgctcaagttacaaacaacccggagaatgatgggtgtatcaatgctgttttgctagtgtagaaccatagtgagattttgtttatggtgatgaatcgtcccatttgtatctgctcttgataagatgctcccttttgaccgatctcatggctattcccaggagtttgttttgcaccgtggtccatgggcgagcattctatatccttgctatgtgcgacaagccgacaaatgacttggctattatagcctgctataaagttgactaatacaaattagcaacatttttctcg

SEQ ID NO: 27460 - DNA, 1052 bp, Zea mays
  Clone ID: LIB4730-079-D9_FLI
ccgggctagccaccgaacccctcctacataacccgctcttcccatttccctcgccctccgccgcctgcgtccacctccgctcgccgctctccccgcgtctccctatcatacgcagctcgtccagatgtcgtccgaggcgtcgaaggtggcggtgccggagtcggtgctccgcaagcggaagcgcgaggaacagtgggccaccgagaagaaggagaaggctctagtcgagaagaagaagtccatcgagagccgcaagctcatcttcacccgcgcaaagcagtacgccgaggaatacgatgcccaggagaaggaactggtgcagcttaagcgcgaggcccgtttgaagggtggtttctatgtcagtcctgaggcaaagctgctctttgtggtccgcatccggggtattaatgccatgcaccctaagaccaggaagatcttgcagcttctgcgattgaggcagatcttcaatggcgtgtttctcaaagtcaacaaggctactattaacatgctacgcagggttgagccatatgttgcatatgggtacccaaacttgaagagtgtcagggagttgatctacaagaggggctatggaaagctgaacaagcagaggatccctctgtccaacaaccaagtcatcgaggagggcttgggcaagcacaacatcatctgcattgaggatcttgttcacgagatcatgactgttggcccacacttcaaggaggcgaacaacttcctgtggccattcaagttgaaggcgccgctgggaggcctgaagaagaagaggaaccactatgtggagggcggtgatgccggtaaccgcgagaactacatcaatgagctcatcaaaaggatgaattaggttcacgatcaagctcattgatagtaccctgtgctctaagtgacttcttgtgctatccttattttatattagaaagttggatcgtggatgaatatgcatgcagttttgatgttttgaactagatgtgtatggaagaaatctgatcttctttccggaggtttggtattattatttaaagcatttcgtaagcaac

SEQ ID NO: 27461 - DNA, 550 bp, Zea mays
  Clone ID: LIB4730-079-H4_FLI
taccctcgaggccggccgggaaaaccaaacctgcctccgcacctaccatttcctcccccaaaccaccatggacttctccgccggagggagtgggagcggcggaggaggcggaggcgccggcgacggccgggcgcaggcggagcgctggctggagatcgccgagaagctcctcgcggcgagcgacctcgtcggctgcaagcgcttcgcggagcgggcgttggaggcggacccgctcctccctggcgccgacgagatcctcgccgtcgccgacgtcctcctcgcctcccagtccatgggcccctcgggccaccaggacccgctcgccatcctccagctgccgcctggggtcaaccccgaccaggcctccgtctcccgcgcattccgccgcctcgcgctactcctcgggccccgcaacccgcaccatggcgccgagatggcgctccgcctcgtcaacgacgcctacgccttcctctccgatccgtctcgccgcccccctccgcccgccaatcccgccactggtaccccttcctcctcccactatgcggccctc

SEQ ID NO: 27462 - DNA, 644 bp, Zea mays
  Clone ID: LIB4730-080-A7_FLI
ccctcgaggccggccgggacaccgcaatcttcaatctccccagcaatccctagcagaagccttccatcctcactcgctcgatggcccgcacgaagcagacggcgaggaagtccaccggcggcaaggcgccgaggaagcagctggcgactaaggcggcccgcaagtctgcccctgcgaccggcggagtgaagaagccccaccgcttccgccccggcaccgtcgcgctccgggagatccgcaagtaccagaagagcacggagctgctgatccgcaagctgccgttccagcgcctggtgcgggagatcgcgcaggacttcaagaccgacctacgcttccagagctctgctgtctccgcgctgcaggaggcggctgaggcctaccttgtcgggctcttcgaggacaccaacctctgcgccatccacgccaagcgcgtcaccatcatgcccaaggacatccagcttgcccgccgcatccgcggggagagggcctaagcgtcatattttctgtcatcagtgcccgatcagaagatgtagagatatgctgggttctgtagtttgggttactgtcgaatcatcgagtgttggctgttcactgctgtaacttaattatcatgatgcatatgaaatggcaatgaactctgttat

SEQ ID NO: 27463 - DNA, 585 bp, Zea mays
  Clone ID: LIB4730-080-D1_FLI
taccctcgaggccggccgggaaccccaccgcagcacagcgccggcaaccgccgccatcgatcgatcgcccggaaactgacctctaccgatgtctggagccggcgaggaggataagaagcccgcggagggcggcgcccacatcaaccttaaggtcaagggacaggatggcaatgaggtgttctttcgcataaagaggtccacccagctgaagaagctgatgaacgcctattgcgaccgccagtctgtggacatgaatgccattgcattcctgtttgatggccgcaggcttcgcggcgagcagacccctgatgagctggagatggaggacggcgacgagatcgacgccatgcttcaccagaccggaggcagcgttcctagcaccacctaaaagcagcagctgcggagcctctttttgctctccgccctgcgtagtactaaacaaaagggaaaaagtctttttaaggaacttgtgatgctctggctccttgtgccattgctgagggacatccttagcctttatttagtggtatggtttggtactttgttctgtcatcactcgtttatctatccctaatacatgccgcc

SEQ ID NO: 27464 - DNA, 903 bp, Zea mays
  Clone ID: LIB4730-080-E9_FLI
ccgggatctcgccctcgctcacctacagctccgtccgccagcgtcagccaggctgccccgggaggccgggaggaagcagatcggagaaggtgatctgttgtgatggctcgattgtacatcggcaacctggatccccgggtgaccgctcgggagctggaggacgagttccgcacgttcggggttcttcgcagtgtctgggttgctcggaaaccacctggctttgcgtttattgattttgatgataagagggacgcagaggatgcaatccgtgacctagatggcaagaatggatggagagttgagttatctcgtaatgccagcggtggtcgtggaggtcgtgaccggcatggtgggtctgagtccaagtgttacgagtgtggtgagactggtcactttgctcgtgagtgccgtttgaggattggttctggaggtctaggcagcggaaggcgccgaagccgtagccgtagccgcagtcgcagtcccagatatcgccggagtccaagttacggtagaaggagttacagtcctgcagcacgctctccaaggcgtcgtagcgtctcaccagctcgtggacgcagctatagcaggtcaccacagcacaagggtgcacgtgaagaatctccctatgataatggataccgccgcagcaggagctagagccagatccttgtatccgacgagcgttatgtgacagatattgggaaagatatggtcaataacctgcttgaaagatccttcgtcgactgcttgactttggttaaggttctcataacttatttctatatacctattatcttgtgtctactttataagtagcagtaaaaccttttgatgagtgtatttgttgaactaagacctactgtcttttcttgtgtggtaaaaaggcatcgtcctgcactgctt

SEQ ID NO: 27465 - DNA, 1121 bp, Zea mays
  Clone ID: LIB4730-080-H12_FLI
ccgggactgcactgcacgacgcccgcacggcaccgaccccgcaccaagccaacggaaaccgagcacccgcacccgcccggggtggaattgggaactgaggaaaaaaaaaacacccacacccacacccgcgtccgcgtgctctctctgccccatccgcgcgcccctcctcctccaccgcccgtcccactcccgccgccgccgccgcccggccgtctgctggcgatggcgtaccgggcggacgacgactacgactacctcttcaaggtggtgctcatcggcgactccggcgtcggcaagtcgaacctgctctcgcgcttcacgcgcaacgagttcagcctcgagtccaagtccaccatcggcgtcgagttcgccacccgcagcatccacgtcgaggacaaggtcgtcaaggcccagatctgggacaccgccggccaggaaagataccgcgctatcacgagcgcgtactaccgcggagcggtcggggcgctggtcgtgtacgacgtcacgcggcacgtcaccttcgagaacgtggagcggtggatgagggagctgagggaccacacggacgccaacatcgtcatgatgctggtagggaacaaggcggacctgcgccacctcagggccgtcccgaccgaggacgccaaggccttcgccgagcgccagaacgccttcttcatggagacgtcggccctggaggcgatgaacgtggaggacgccttcaccgaggtgctcgcgcagatctaccgcgtcgtcagcaagaaggcgctcgacatcggcgacgaccccgccgcgcctcccaggggccataccatcaacgtcggcggcaaggacgacgtgtccgcggtcaagaagtctgcctgctgctcgtcttagcttgggaggacaggatagagcgtgtacttgggtttggttgttgatacttcagcactagagggcacaggacgttattgcagtcattgtcctcgatctgtattcatgcgtttccaggtgtctcgttgattttgccatttgattcattcaggacctgggcctttctggtatagtgtagggataccttgttccttttatttcttgtacctgcatactgtcgcttctcttatcaaactagctgcattacttcc

SEQ ID NO: 27466 - DNA, 1303 bp, Zea mays
  Clone ID: LIB4730-081-D3_FLI
ccgggattccccgtttgccttgtttaccattcctccccaaaacacatcctgcgatcctcgaagcctccgccgagcatcgatcatgtcggcctactgcggcaagtacgcggatgagctcatcaagaatgctgcctacatcggcacccctggcaagggtatccttgctgctgatgagtcaactggcaccattggcaagcgcctttccagcatcaatgtcgagaacgtggaggagaaccggcgggctctccgtgagctcctgttctgctgccctggtgccctccagtacatcagcggtgtgatcctcttcgaggagaccctctaccagaagaccaaggatggcaagccttttgtcgatgtcctcaaggagggaggcgtcctccctggcatcaaggtcgacaagggcaccattgaggttgttggcaccgacaaggagaccaccacccagggccacgatgacctcggcaagcgctgcgctaagtactacgaggccggtgcccgctttgccaagtggcgtgctgttctcaagattggccccaacgagccgtcacagcttgccattgacctgaatgctcagggtctggctcgctacgccatcatctgccaggagaacggtctggtgccaattgttgagcctgagatccttgttgatggccctcatgacattgatcgctgcgcttacgtcactgagacagtccttgctgcctgctacaaggctctcaacgagcaccatgtcctcctggagggtaccctcctgaagcccaacatggtgactcctggctccgactctaagaaggtgacacctgaggtgatcgcccagtacaccgtccgtaccctccagaggaccgtccctgctgctgtgcctgctgttgtcttcctctccggtggacagagcgaggaggaggccaccctgaatctcaatgccatgaacaagctcagcaccaagaagccatgggccctgtccttctccttcggccgtgccctccaggcgagcaccctcaaggcctgggctggcaaggtggagaacgtggagaaggctagagcggccttcctcgccaggtgcaaggccaactccgaggctaccctcggcacctacaagggtgatgctgccgccgacaccgagagccttcacgtcaaggactacaagtactgagttgcttctctttgcgatcccgttgttttggaactcctgcctgcgagtaggttgctgagtgttgtttgcttgttagagcttttatattcggacatgaaaaaaacatgcttcctatgtggatgatggttatctttatattcgtatattaactac

SEQ ID NO: 27467 - DNA, 541 bp, Zea mays
  Clone ID: LIB4730-081-G6_FLI
ctcgaggccggccgggatcttctcccccagctccccagcaccagtccccaattatttggcctccgtcagagaggggagaaagacccgttcgaggcggcggcgatgtcggggcgcggcaagggcggcaagggtctgggcaagggtggagccaagcgccaccggaaggtgctccgcgacaacatccagggcatcaccaagccggcgatccggaggctggctcggaggggcggcgtgaagcgcatctcggggctcatctacgaggagacccgcggcgtgctcaagatcttcctcgagaacgtcatccgcgacgccgtcacctacaccgagcacgcgcgccgcaagaccgtcaccgccatggacgtcgtctacgcgctcaagcgccagggccgcaccctctacggattcggaggctaggcgcctcttcgtagctggggaatgcttagggggatacacgtctctgtcgctgtgggccatagtgttgctgcgttcctggatgtaatccatttatttttctgcaatgaagagatgctggcaagcatgc

SEQ ID NO: 27468 - DNA, 1396 bp, Zea mays
  Clone ID: LIB4731-001-E12_FLI
tcgaggccggccggggtccggtcgtacgtcgtacctcgtgtactcggctgtctcccccacaaccagtcgcctacccactgcctcgcatcggcatcggcgtgccggtgctgccaagctaaaattccccaactcgcgtcgcgtcgtcagtgtgcgtgccagtcctccggcccaaaccccccgcacccaacccccagccccggcaaccgatggcggggtccgcggccgacgcggagcaggagcaaaagcgggcagcggcggcggcgtacgactacgagggcgacgcgcgctgggccgagtactggtccaacgtactcgtcccgccgaacctcgcctcccgccccgacgtcgtcgaccacttgaagcgcaagttctaccagcgctacatcgaccatgatctggtcgttgagccaaggtcattcaccagttccactcaggccagcaggccagatgtaaggtcttcgtcttcgtcatccaccgagaacgtcagggagcgtaattcaggatctactgcaaggtcagcgcctccaccaccgccaccaacacatacagacagtgccgtcaaccctttacggttcgacgcacgcactatacatttctccatcaacgcatggatacttgtggttgctggtctgggaatgcttcctattttgccaaaacaccttgccgacagagcttgcaaactttcacttctgggaacaatattgtcatcagggtattctctatacagtacttatgggaaaccaagagcatggaacatgccagcaattcaagcttggttgcagtctatacttgcaacaaaggattttatccatttaatgttctcttctatgctcttcacatcccaattgcacttgaagattgctgcactacctgtgttttgctgggcgcttgaccatgttgccagattcttaaggcgtaattttgcgcgatcctctttctataggagatacctggaagaaccttgtctttgggtagagacaaataacactacactaagcctccttagttcaaatgcggagattgccttgggttttcttctgatcatatcactgttctcgtggcgccgtagcatagttcagacattcatgtactggcaggtgttgaagctgatgtaccatgctcccgtgacatccagctatcaccagagtacctgggcgaaaatcggccggattgtgaacccgtacatccaccgctacgctccgttcctccagacgcccatttctgcgatccaaagatggtggttcaggtagagagacaggccgagctgcaaacatagcacagtcgagtcgccgcgttcttatgtaatgctgtaaccttttcccagaattctggagggccattatcataacaagaaggtttttagctgcagggccaccaacgccgaattgcaaaacac

SEQ ID NO: 27469 - DNA, 1414 bp, Zea mays
  Clone ID: LIB4731-002-D10_FLI
ctcgaggccggccggggcccagtcgcccgcatctgcggcccgcaagagaagcgcaagcgctcctgcgccgccgtccaccgaatccccgaccgcgcccggcgcccctcgacctccgttctccatgtcggcgtgaaggctagctcctgctaggcgctgggtagcgggttaggcagtgctgtgcagatccacctgcgtcccgccttgttctgtgctgccgcttgtcgctgcgtcatttaccaagtgctcctgtgccagccggcctacggccagcaccacagttcgcagggccgctggtgttctctcttggctggccccagtcccctgctcgtcctacacagtctgccactgtccctcgctgttgcagtggccaagtaacgaatcactgtctcgttctcaatgggacacagtttcttttcgatgcacaggataacatctcgctcgatgttacagctctgccgtgaagggaggcacctcgatcgctggcgtatgtgacatcattgctgtcgcatctgggaaaggcggcgtaggcaagtccaccactgcagttaacattgctgtagcacttgcaaaggagtttaagcttcaggttggtttgctagatgctgacatctatggaccatccattcccacaatgatgaatctccatgccaagcctgaattaagtgaagacatgaagatgattccaattgagaaccatggtgtgagatgcatgtccattggttttcttgtagacaaagacgcaccaattgtttggagaggtaatgagtgctcttgagaagatgacaaggggagttgcttggggggaccttgatattcttgttgttgatatgcccccaggcactggtgatgctcaactatcaatgtcccaaaggcttcggttatctggtgctttaattgtttcaactcctcaagatattgctcttatcgatgctagaagaggagccaacatgttccgcaaagttcaagttccaattctgggattggtagagaatatgagttgctttaaatgctcaaaatgtggtgagaaatcttacatctttggggaagctggagcacagaggactgcagaggaaatggacatgaaattacttggtgatgtacctcttgaaatcagtatcagaacaggttcagatgaaggcaaccctattgttgtatcatcacccaactcagcatctgcgcaagcgtacgtaaatgttgcggagaaggtgactcaaaggctcaaggagttagcagaggagcgacggatgggcccagaaatcttactttgagaaattcaggctgcttttctcacacctttccctgtttgacgctacggcgccaaaacaatgtactgataagtagattgctgttggaagtaaactttaaatttcgtcactctgtctgaaaatttactcaaacaaacttctgctgctcc

SEQ ID NO: 27470 - DNA, 927 bp, Zea mays
  Clone ID: LIB4731-002-F2_FLI
ctcgaggccggccgggatctgcgcggcccagttactacagcgaataggcggcccatcaggtcacgttccgtcccgacgtagagtcgccagtcctcccacaatctccagccgccactacgcctccctctagctccagccgccactacgccggtcgcagagtcgccagctgcctagacgcccggaggcccgcgggcgctccctcctgggctgctggcctccttcacattattggagccagaggagcgggcggcggcttgcactccatcccatcgcttgggtgcgtcgccccgaatccaatcgcctggtcaagtctgttgctgccggaggtagacggacgccttatcgtgctcgtggccgcagctagcgcgccggagccacagctggagcgctcgccggcgacgagtcgccgccccgcaaggagcctacgcaggcacgcaccgccacgtctaggcgccaggcggagacgttattaccacaacattaaaggagatgccttcactccagaaagcattgcctccagaacttgctgataatgtgctcaggttatatcgtgaatgcttacggagggcgaagtatattggccatcagaaacacaatacagaacttttagtcgccatggtgagacaacaattcaagaaaaacatgcatgaaactgatccagagaagatacagaaaatgaaggacgatgctgcaaggggccttatcaatcatattctatatgagtccgagaagattacaggacgcaagttttcaggttaaaaacagaagttgaaactggacttacagtgtgtcgtgctgtatgaataatagtaaaaataatttactttcttgcctttgaatgattccggttctattgtacaaggacctgcaaatgttttttccttcggattgctgagtactcgagctattgcagcaatgattttcagg

SEQ ID NO: 27471 - DNA, 1581 bp, Zea mays
  Clone ID: LIB4731-003-A9_FLI
acactacagaccccgcccccaacctcggtcttttccagtcccagccgccaccgtgcgtctgtgcaagtggccttcggcggtgcgcagagcagagctggtgccgtggcccgtggtggtggcccgtggtgcgcgcttccctgcagcctcgaggtctgcacgccgccggcctccctcgtagcaccacgcgccgccggcctccctcgctcactaccggacttcgcacacgccggcgcggcggcggccgaccatcctcggaggtgcagttacgcgcgccgtaggaaggtttttcttccatcatttgtgcgttcgttcaactgagccgccatgcgccagccacggtccgggccggggaagaggcggggccgcggtccgcgcatccccgcggcgacgcttcagaagcagaaaacggcgttggcgaacgtcgaccagatcaccggcgccaagattccgaagagcttcgtattctcccgcggtaaactcccctccacgctccgccatcttcagcaggacctccgcaaggtcatgctcccctacactgctctcaatctcaaggagaagaaacgaaataacctcaaggattttgtcaatgttgccggcccgatgggtgtgacacatttcttaatcctctcaaacccccaaagcctgccacatttgcgctttgccaaatcaccgcagggcccaacattcacatttcagatagaggagtactcacttgcggcggacattgcaaactctcagaagcgcccaaggtgcccaccagggatattcaaaaactcaccactggttgtacttggtgggttgacaggtctcggcaaccctttcaggagtttggtcgaatacttccaacatatgttcccttccgttgacccaaccactgtcaagctggcaacatgccaaaggattctgttgttaaaacatgataaagagaaggatgttattgaattccggcattactccatcaagctccagcctgttggggtcagtcgcaggattagaaagctcatgcaaaacaatcaagtgcctgatctaggagaatttgaagatgttagtgagtttgtgaaaaaagctgggtatggatcagaaagtgaagcagacgatgaagcagcaatggtaagcttgccaagtgacattgacaaattaaaccgggcatccagaaaaagcgctgtcagactccaggagattggaccaaggatgactatgcgcctagttaaagttgaagctgggctatgttcaggagatgtcttatacccatggcctgtggaaaaggaagtggtgggaaagaaagggacagaaactggggaagtagaagggcaagaagacgattctgaggccacagatgagtccgaggatgagatggaggtgtaggatttcagatgttttggacaggcagacgcaggtgttttgacagtcctggatgtttcatgctgaaaccaacgggccctgtgcccaataacgtggtgcattcatgccaattttgtcactgaaggtgcattgcattcattgtaacgaagtgtaacattgttttgcggatggttacctcttttgtgttatgacaagtttggaggatagtttttggttcgc

SEQ ID NO: 27472 - DNA, 966 bp, Zea mays
  Clone ID: LIB4731-004-E7_FLI
ccgggatctcccatatcattagttaatccatcgcttataatattttgagcattcaaaaacacacaaagggaagtgcactagcaacttcctaacaacaatggctaccaagatattagccctccttgcactcctttccctttctgtgagcgcaacaactgcattcattactccacaatgctcacttgctcctaatgccattattccacagttcctcccatcagttacatcaatgggcatcgaacaccctattgtgcaagcctataggctacaacaagcgcttgcccaattacaacaacaatccttggcacatctaaccatacaaaccatcgcaacgcaacaacagcaacagtttgtgcccgcactgagccaactagccgcggtgaaccctgcctcctacttgcaacagcaactgcttgcatccaacccacttgctctggcaaacactgctgcataccagcaacaactacagttgcaacagtttctgccagctcttagtcaactagccatggtgaaccctgccacatacctgcaacagcaacaactgctttcatctagcccactcgctgtgggcaatgtggctacatacctgcaacaacagctgctacaacagatcgtaccggctctcagtcagctagctgtggtgaaccctgctgcctacttgcagcagcttcttccattcaaccaactagatgcggcaaactctgctgcgtacctacaacagcggcagcaactacttaatccacttgcagcgactaacccattggtcgccgccttcctgcaacagcaacaatttctgccatacaaccaaatctctttgatgaaccctgccttgtcaaggcagcaaccgatcgttggaggtgccatcttttagattacaaatgagatgtacttgataacattgccctcataccggcatgtgcaactttctataaataatcaatatattaattgagatttatcttgatc

SEQ ID NO: 27473 - DNA, 1534 bp, Zea mays
  Clone ID: LIB4731-004-G4_FLI
aagccgttggcagccttctgccccgcaccctccgcgtcgaacaccagatccggccaccgctccacctctgtccatctcacgccaacgcccactggcgtcctcgttcctccgtgccggggagcggcggagagctttccacctcgtcttagggacctctggcttccttccccctgcgggcgatcggcggaggtccgctgttctgacatcgtctcccgctgctgacttgtgaacaaggcagcagcatggttcagtttggaaacatgtcatcaaagaagatagagttggatcacaaggacatggtccatgattctgctatcgactactatggcaagcgccttgccactgcctcctcagactctaccgtgaagatcatcaacattggcgcggcaaatgccccatcccaggtccttgcaacgcttagtggccactatggtcctgtgtggcgtgttgcttgggcccatccaaagtatggcgctatccttgcttcgtgcagttatgatggccgtgtcattatttggaaggaggatgcacgaggcaattggtctcaagtccatgtgttcagtgacaacaagtcatctgtcaactccattgcatgggctccgtatgaggttgggctttgccttgcctgtgcatcttcaggtggaagaatatccatcttgacgatgcgagctgatgggggttgggatactgcaaccattgagcgagcacatcctgttggtgcgactgccatatcctgggctcctgcaacagattcaatagctggcacaggggtgtttgtttacaagcttgtctcaggagggtttgactcggttgttaaggtctggggattcaacaatggtagctggaagctggagagtgctcttatctctgacatgcacacagattgtgtgagggatgtcgcgtgggcaccagttttgggattggccaaatcgaccattgccagcgcttcacaagacaggaaggttgtcatctggaccaggggaaaggatggagacaagtgggagcggaagctcatgcgtgactttggttcccctgtctggagggtgtcctggtccttgactgggaacatattatccatagctgctggtgggaacaatataaccctctggaaggaagggtcagatgggcaatgggaggaggtgatgaaggttgaaacataggatgtccgtcaaggtttctgaagataaaatgtgttttactagtgtttcctgcagatccatgtttcgacgtggacaaagtttgccgttgtgtttcgacagaacatccaattcacttattttggtactttctgacgaggcaattatactcttggatggatcccgtgcgctttagagtggtaatttcagatcggtgagcctgtttagttctgtatatcctcaacttttttttggtggaacatcagagctgctgcaagtaatgttatctaataagaactgtagcaatttctaatgctgtttgtgctgcggctactgtagcgctgctcctgattctggtgcgcaccatcgtttgagttttattgatgtgttgtgcaagg

SEQ ID NO: 27474 - DNA, 802 bp, Zea mays
  Clone ID: LIB4731-006-F6_FLI
ccgggaccaccactggacgtcagcctagcaattagctcatcgactccagattggagaactcgacaccatgaaggtgctgatcgttgcccttgctctcctggcgctcgctgcgagcgccgcctccagtacaagcggcggctgtggctgccagacaccaccgtttcatctaccgcctccgttctatatgccgcctccgttctatctgccgccgcagcagcagccgcagccatggcaataccccactcaaccaccgcagctaagcccgtgccagcagttcggatcctgcggcgtcggcagcgtcggcagcccgttcctgggccagtgcgtcgagttcctgaggcaccagtgcagcccggcggcgacgccctacggctcgccacagtgccaggcgctgcagcagcagtgctgccaccagatcaggcaggtggagccgctgcaccggtaccaggcgacatacggtgtggtcctgcagtccttcctgcagcagcagccgcagggcgagctcgcggcgctgatggcggcccaggtagcgcagcagctgacggcgatgtgcggtctgcagctgcagcagccaggtccctgcccttgcaacgcagctgccggcggtgtctactactgaggaaactatgtactgtagtaataatgtaatggagccgctgactagctacctatagctagttcactcgtttagcggcgatgagtaacggagtgtcacccatcaccatgggtggcagtgtgagcaatgacctgaatgaaccattgaaatggaaaggaataatatataaggaaaaaagatgattag

SEQ ID NO: 27475 - DNA, 840 bp, Zea mays
  Clone ID: LIB4731-007-B12_FLI
ctcgaggccggccgggacccatattattgataccaactagcaacatatatagtgaagtacactagcaacatcttagcaccaatggcagccaagatttttgccctgcttgccctccttgctctttcagcaagcgttgctaccgcaactattattccacaatgctcacaacactacctctctccggtgacagccgcgagctttgaatacccaactatacaatcctacaggctacgagaggccatcgcagcaagcatcttacggtcgttagcattgaccgtccaacaaccatatgccctattgcaacaaccatccttagtgaatctgtatctccaaagaatcgcagcacaacacctacaacaacagttgcctccaacaatcaatcaagtagttgcagcgaaccttgctgcttacctccagcaacaacaatttcttccattcaatcaactagctggggtgaaccctgctgcttacttgcaggcacaacggctactaccattcaaccaacttgtcgggagccctgctgccttcttactgcagcaacagttgctgtcattccatctgcaagttgtggcaaacattgctgctttcttgcaacaacaacaattgctgccattttacccacaggttgtgggaaacattaacgccttcttgcaaccgcaacaattgctgccattctacccacaggatgtggcaaacaatgtcgccttcttacaacaacagcaattgctgccatttagccaacttgctttgacacatcctaccacctttttgcagcagcccaccattggtggtgccattttctagattttttatgttttatactgtaataataaagttctc

SEQ ID NO: 27476 - DNA, 685 bp, Zea mays
  Clone ID: LIB4731-007-B2_FLI
ccgggatttagccgcgcgcacgctcaccagcagctgcccccttgctgtcgccgcctctctccgcgcgaccgatctaccgccgccgccaccatgaagatcatgttcgccatgacctccataaagggtgttgggcgccgcttctccaacatcgtctgcaagaaggccgacatcgacatgaacaagagggccggtgagctgacgcctgaagagctggagcgcctgatgacggtcgtggccaaccctaggcagttcaaggtgccggactggttcctcaacaggaagaaggattacaaggacggaaggttctcacaggtcgtttccaacgccctcgacatgaagctcagggacgacctcgagaggctcaagaagatcaggaaccaccgtggtctgcgtcactactggggcctccgtgtccgtggccagcacaccaagaccactggcaggcgtggaaaaactgttggtgtctccaagaagcgataagctacatatctatcgacaaatctcagatgtactagtgttggttcttgttcaaactgtcttgatgaagggtttctgttgggacagtttcctgaaattatgttttgccctaggataatcttgcagttatggaaccttgttatattgtatcctgcaatttgttttttgcaacttataagagtaattttatttgatgagtcttatgctg

SEQ ID NO: 27477 - DNA, 804 bp, Zea mays
  Clone ID: LIB4731-007-G12_FLI
ccggaccaccaccactggacgtcagcctagcaattagctcatcgactccagattggagaactcgacaccatgaaggtgctgatcgttgcccttgctctcctggcgctcgctgcgagcgccgcctccagtacaagcggcggctgtggctgccagacaccaccgtttcatctaccgcctccgttctatatgccgcctccgttctatctgccgccgcagcagcagccgcagccatggcaataccccactcaaccaccgcagctaagcccgtgccagcagttcggatcctgcggcgtcggcagcgtcggcagcccgttcctgggccagtgcgtcgagttcctgaggcaccagtgcagcccggcggcgacgccctacggctcgccacagtgccaggcgctgcagcagcagtgctgccaccagatcaggcaggtggagccgctgcaccggtaccaggcgacatacggtgtggtcctgcagtccttcctgcagcagcagccgcagggcgagctcgcggcgctgatggcggcccaggtagcgcagcagctgacggcgatgtgcggtctgcagctgcagcagccaggtccctgcccttgcagcgcagctgccggcggtgtctactactgaggaaactatgtactgtagtaataatgtaatggagccgctggctagctacctatagctagttcactcgtttagcggcgatgagtaacggagtgtcacccatcaccatgggtggcagtgtgagcaatgacctgaatgaaccattgaaatggaaaggaataatatataaggaaaaaagatgattgg

SEQ ID NO: 27478 - DNA, 1707 bp, Zea mays
  Clone ID: LIB4731-007-G6_FLI
ccgggctccccaactcgccgtcgtcttctgcggttctgccgtctacgcctccaatttggcctctctcccttgcaagtttaagcttcatcttcagccatgggtaaggagaagtcccacatcaacattgtggtcattggccacgtcgactctggcaagtcgaccaccaccggccacctgatctacaagcttggaggcattgacaagcgtgtaatagagaggtttgagaaggaggctgctgagatgaacaagcggtccttcaagtatgcttgggtgctcgacaagctcaaggctgagcgtgagaggggtatcaccattgatattgctctgtggaagtttgagaccaccaagtattactgcaccgtcattgatgcccctggacaccgtgacttcatcaagaacatgatcactggtacctcccaggctgactgtgctgtccttatcattgactccaccactggtggttttgaggctggtatctccaaggatggccagacccgtgagcatgctctccttgcgttcactcttggagtgaaacagatgatttgctgctgcaacaagatggatgcaacgactcccaaatactccaaggcgcgttatgatgagattgtgagggaagtctcatcctacctcaagaaagttgggtacaaccctgataagattgcctttgtccccatctctggtttcgagggcgacaacatgattgagaggtccaccaaccttgactggtacaaaggcccgaccctgcttgaggctcttgaccagatcaccgagcccaagagaccttcggacaagcccctgcgtctccccctgcaggatgtgtacaagattggtggtattggaactgtaccggttggtcgtgtggagactggtgtcatcaagcctggtatggttgtcaccttcggtccaactggcctgactactgaggtgaagtctgttgagatgcaccacgaggctcttcaggaggcccttcctggtgacaatgttggcttcaacgtgaagaacgttgctgtgaaggatctcaagcgtggttttgtggcctcaaactccaaggatgaccctgccaaggaggctgccagcttcacgtcccaggtcatcatcatgaaccaccctgggcagataggcaatggctatgccccagtgctggactgccacacctcccacattgctgtcaagtttgctgaactcattaccaagatcgacaggcggtctggcaaggagcttgagaaggagcccaagttcctgaagaacggtgatgctggtatggtgaagatgattcccaccaagcccatggtggtggagacattctcgcagtatcctccccttggtaggtttgctgtccgcgacatgaggcagacagttgctgttggagtcatcaagagtgtggagaagaaggacccgaccggcgccaaggttaccaaggcagctgccaaaaagaaatgatgcaacctgtcgttaatcctgtatctgcttttgcaatacctgacttgtcactccatcccgaagttttgtatgcggttgttactgttattgtgtactgttaagctctgctgcggcgtgccctgttgtttgggtagcgtcaacgtcgagcgccactcgcgggtgtgcctttgtctgctatcagtagcggcaaaaattgaaagctctcgagacttatgtcccttttgggcgccgttgaactgattattttaaagtctgcccacattttct

SEQ ID NO: 27479 - DNA, 1044 bp, Zea mays
  Clone ID: LIB4731-008-G2_FLI
acaaaccacaaccagctcactcaagaacaaagaacccaacccatggcttctcccaagccgctcctcctgctcgccacctcgttcctgagctgcggcctcctggtggccgccgactacgccccaatgaccctgaccgtggtgaacaactgcccctacccggtgtggccgggcatccaggccaactccgggcacgacgtcctggagggcggcggcttcttcctcccgccgctctcccacaagtccttcccggcgccggcccacccctggtccggccgcatctgggcgcgcacgggctgcgcgggcgccggcgcgcagctccactgcgccacgggcgactgcggcgggcggctccagtgcggcgggctcggcggcgcggcgcccgcgacgctggcgcaggtgaacctccaccacggcaacgaccagacctcgtacggcgtgagcgtggtggacggcttcaacgtgggcctgtccgtgaccccgcacgagggccgcggcaactgccccgtcctcgcctgccgcaagaacctcaccgagacctgccccggcgagctgcagctgcgctccccggccggcagcgtcctcgcgtgcaagagcggctgcgaggccttccgcaccgacgagctgtgctgccgcaacatgtacaacagcccgcacacctgccgcgcctccaagtactcggagttcttcaagcgagagtgcccgcaggccttcacctacgcgcacgacagcccctcgctcacccacgagtgcgccgcgccgcgcgagctcaaggtcatcttctgccactagagctcggagctcggagggcgccgccgccgtcaacaagtgtcgctagtagaggtagtaggatttgcggtgcgtgtgttgtctagtgtgtgctggaatagctgtggctgtgttcccgtcgtgtctgtggcctgtgtaggctgtctgtagtatactgggttgttggatgtatgcgttctggccgcaagactgatgtcatgctgttgctgcttactacagtttgcagtctgaaataaaaacttgtttgatgagcactac

SEQ ID NO: 27480 - DNA, 1446 bp, Zea mays
  Clone ID: LIB4731-008-H2_FLI
ccggggcctgccttaaccattcctcccaacaccacctcgcctgcgatctccgtagcctccgtcgcgtcgagcatcgatcatgtcggcctactgcggaaagtacaaggatgagctcatcaagaatgctgcctacattggcacccctggcaagggtatccttgctgctgatgagtccactggcaccattggcaagcgcctttccagcatcaatgtcgagaacgttgaagagaaccgccgtgccctccgtgagctcctattctgttgccctggtgctctccagtacatcagcggtgtgatcctcttcgaggagaccctgtaccagaagaccaaggatggcaagccttttgttgatgtcctcaaggagggaggcgtcctccctggcatcaaggttgacaagggcaccattgaggttgttggcactgataaggagaccaccacccaaggccatgacgaccttggcaagcgctgcgccaagtactacgaggcaggtgcccgctttgccaagtggcgcgctgttctcaagattggccctaatgagccatcacagcttgccatcgacctgaacgctcagggtctggctcgctatgccatcatctgccaggagaatggtctggtgccaattgttgagcctgagatccttgttgatggccctcatgacattgatcgctgcgcttacgtcactgagaccgtccttgctgcctgctacaaggcgctcaacgagcaccatgtcctcctggagggtaccctcctgaagcccaacatggtgactccaggctccgactccaagaaggtgacccctgaggtgattgctgagtacaccgtccgtaccctccagaggaccgtacctgctgctgtgcctgctgttgtcttcctctctggtggacagagcgaggaggaggccacccgcaacctcaatgccatgaacaagctcagcaccaagaagccgtggtccctgtctttctccttcggccgtgccctccaggcgagcaccctcaaggcctgggctggcaaggtggagaacttggagaaggctagagctgccttcctcgccaggtgcaaggccaactctgaggctaccctcggcacctacaagggtgatgctgccgccgacaccgagagcctccacgtcaaggactacaagtactgagttgcttctctttgcgtgcccgttttggaactcctgcctacgagataggttgcggagtgtggtttgctcgttagagcttattttcggacatccaaaaaacatgcttcctatgtgggatgatggttatctttatatttgtatgttaattagtctctttgctgttaaatttcgtgtaagttggtcctgccgatggagaatcgagcagccccctttttttgttctatcaactatgctgtaatgctggctatgtatcggcaaaaacaattctatatgctgagttggagtcggcaaaaattcag

SEQ ID NO: 27481 - DNA, 1513 bp, Zea mays
  Clone ID: LIB4731-010-E12_FLI
acgcagcgccgaagcaccaaggatggagcccgagattcagagcctgtgtccgagtacgacggccgtgctcctcctgctggccgcctgtctcgccgccgcggtggcagcgctcgacgctgcggactacgccaggccgccgctgcctgcaggcggaggcggccggcgcgtcctgttcgccaacgggctcgggctgacgccgcagatggggtggaacagctggaaccatttccagtgcgacatcaacgaggcggtcgtccggagcaccgctgatgcgctcgtcgccaccggacttgcaaaggctggctacacgtatgtcaacttagatgactgctgggcggattccgagagaaccaaagagggatacatggtcgctaaccccaagacattcccatccggaatcaaggccctggcagattacgttcacagcaaggggcttaagcttggcatctactcttccgctgggacaagaacttgcagcaacaggatgcctggatctctgggctacgaggagagggatgctaagatgtttgcgtcatggggcgttgactacctgaagtatgacaactgctacagagacggcacgcctgaaaccgtgaggtttgggcgcatgtcccgagcgctggtgaactctggccgcccaatcttctactcgctttgcgaatggggattcatggaagttcccaaatggggcggcatgtacggcaacagctggaggaccaccggcgacatcaacgacacatggtcaggcatgctggacaacatcgacctgaacgacgcctacgcccggtacgccaagcccggcggctggaacgcagaccctgacatgctggaggtcgggaacggaggcatggcgtacaacgagtacgtcgtgcacttcagcctctgggccatcgccaaggctcccctggtcatcggctgcgacgtgacgagagtctccaatgagacgctgggaatcctctccaacgcggaggtcatcgcgatcagccaagatcggctgggtgtccaaggacagaaagtgagcaagtacggcaacgatctcgaggtatgggcagggcagctctcggggcacaggaaggcggtgttgctgctcaaccggggggccacgcgctccgcgtccatcaccgcggcatggccggacgtgggcatccgccgcggcgtcgccgtgcaggcgagggacgtctggaagcacgagacgctaccgggctggttcaccggcagcctcacggcggtggtcgggccgcactcgtgcaagctcttcgtcctcacgcccgttcctagctgacggcgccgctggagatctgtccatccaatatctgcccgtggatccagctagagttattaattgtatgatttcagatactgtaactgccttgtgactgctccgacaacaagagctcaccaccatctgtctaatgatttgacatggtgcaacgctcagtttggcttagatttgagatccgaacgtggtgaataaaataataaaatgacgtctcctgacttcttttaaaaaagg

SEQ ID NO: 27482 - DNA, 1426 bp, Zea mays
  Clone ID: LIB4731-010-F9_FLI
gaggccggccgggcaagcaacccaatccaaaccagacaagcaaggaatcccccgatggctcatcgcgttctcctcctcctctctctcgcgtcggccgccgcggttgccgccgccgtcgacgcggaggacccgctgatccggcaggtggttcccggtggagatgacaacgatctggagctgaacgcggagtcccacttcctgagcttcgtgcagcggttcggcaagtcctacaaggacgccgacgagcacgcgtaccggctgtccgttttcaaggccaacctgcgccgcgcgcgccggcaccagctgctggacccgtcggcggagcacggcgtcactaagttctccgacctcacgccggcagagttccgccggacctacctcggcctccgcaagtcccggcgcgctctcctcagagaactcggggagtcggcgcacgaggcgcccgtgctccccaccgatggtctccccgacgatttcgactggagggaccacggcgccgtcggccccgtcaagaaccagggttcgtgcgggtcgtgctggtcgttcagctcgtctggagcgctggagggtgcgcactacctcgcaactggcaagctggaggtgctttcggagcagcagttcgtcgactgtgaccacgagtgtgattcatcggagcctgattcatgtgattcgggttgcaatggtgggctaatgacgacggcattcagttatctccagaaggccggtggccttgagagtgagaaggattacccttacactgggagtgatggcaaatgcaagtttgacaagtccaagattgttgcttcagttcagaacttcagtgttgtgtctgtggacgaggctcaaatttctgctaacctcatcaaacatgggccattggcaatcggcatcaatgctgcctacatgcagacatacatcggaggcgtgtcatgcccatacatctgtggcaggcaccttgaccatggtgttctccttgttggatatggtgcttctggtttcgcccccattcgcctgaaggacaagccttactggatcatcaagaactcgtggggcgagaactggggggagaacggatactacaagatatgcaggggttccaacgttcgcaacaagtgcggcgtcgattccatggtctctaccgtgtccgcagtccacgcctcgaaggagtagactctggtcagcggtgataatcgtgattccatatattgtagaactataatccctgctagtaatccatttgtgctgtttatgtatcgaaggcagcaaagatgtgtgaagcggcaatgggatgcttgctgtaaggtaatatgtttggcttgctaggcatgctacacgctatttggatgtagcaacgttatcaccagctgtatacgctttttaatcgacaacatttgaataatatgtacataacattatgttgtgctcc

SEQ ID NO: 27483 - DNA, 1415 bp, Zea mays
  Clone ID: LIB4731-011-E1_FLI
ccgggctgccttaaccattcctcccaacaccacctcgcctgcgatctccgtagcctccgtcgcgtcgagcatcgatcatgtcggcctactgcggaaagtacaaggatgagctcatcaagaatgctgcctacattggcacccctggcaagggtatccttgctgctgatgagtccactggcaccattggcaagcgcctttccagcatcaatgtcgagaacgttgaggagaaccgccgtgccctccgtgagctcctattctgctgccctggtgctctccagtacatcagcggtgtgatcctcttcgaggagaccctgtaccagaagaccaaggatggcaagccttttgttgatgtcctcaaggagggaggcgtcctccctggcatcaaggttgacaagggcaccattgaggttgttggcactgataaggagaccaccacccaaggccatgacgaccttggcaagcgctgcgccaagtactacgaggccggtgcccgctttgccaagtggcgcgctgttctcaagattggccccaatgagccatcacagcttgccatcgacctgaacgctcagggtctggctcgctatgccatcatctgccaggagaatggtctggtgccaattgttgagcctgagatccttgttgatggccctcatgacattgatcgctgcgcttacgtcactgagaccgtccttgctgcctgctacaaggcgctcaacgagcaccatgtcctcctggagggtaccctcctgaagcccaacatggtgactccaggctccgactccaagaaggtgactcctgaggtgattgctgagtacaccgtccgtaccctccagaggaccgtccctgctgctgtgcctgctgttgtcttcctctctggtggacagagcgaggaggaggccacccgcaacctcaatgccatgaacaagctcagcaccaagaagccgtggtccctgtctttctccttcggccgtgccctccaggcgagcaccctcaaggcctgggctggcaaggtggagaacttggagaaggctagagctgccttcctcgccaggtgcaaggccaactctgaggctaccctcggcacctacaagggtgatgctgccgccgacaccgagagcctccacgtcaaggactacaagtactgagttgcttctctttgcgtgcccgttttggaactcctgcctacgagctaggctgcggagtgtggtttgctcgttagagcttattttcggacatccaaaaaacatgcttcctatgtgggatgatggttatctttatatttgtatgttaattagtctctttgctgttaaatttcgtgtaagttggtcctgccgatggagaatcgagcagccccctttttttgttctatcaactatgctgtaatgctggctatgtatcggcaaaaacaattctat

SEQ ID NO: 27484 - DNA, 1055 bp, Zea mays
  Clone ID: LIB4731-012-F10_FLI
ccaggatttttgtcgacgccgactccaactcagtagtctatccccaccgcgaaccgccgcaggaatctctgacgatggccccgccggccgctgcggttgccgccgtccgccaccacagcccgcacctgctcctccgccgcgggggcgggggtctcctatcatcgccttcgggccccgccacgctccctttcgcctcgcggggtgcggcctccgcgcccgcgcgcctgcgcctgccgccgccgcagttctctctctcccccgtcccgaagagcctctccgccacctcctcctcccacgtcattgtacggtccctcttcaccggcattgtcgaggaggtcggccgcgtgcgccgcctcggcccgccgctcgcgccgtctgggggtggcggcggcgaggctcttggccttgacttggaggtcgagaccaaggacctcctcgccggtactcagctcggcgacagtgtggcggtcgacggcgcctgcctcaccgttgcggcgatcgacccggccgcgtccacgctcaccttcggagtggccccggagacgctccgccggacgtccctgggagagcgcgccccaggcgacggcgtcaacctcgagcgcgcactcactccgtcgtcccgcatgggcgggcacttcgtgcagggccacgccgacgggaccggggagatcgttgcgttccggccggacggggactcgctctgggtcaccgtgcgcgccccgccggagatcctccggctgctcgtgcccaagggcttcgtcgccgttgacggcactagcctcactgttgtcagtgtggacgacgagggcggctggtttgacttcatgctcgtcaggtacacgcaggacaacatcgtgctgccgaccaagaaggtcggagacaaggtgaacctagaggcggatatactgggtaagtacgtcgagaagctcctcgctgggagggttgaggccatggcgaaggttgattcttgatctaccattgctgagctgctggatcaatggtcattctacaggtatttcagcaatgttatgttcatcaataatagcagttcattc

SEQ ID NO: 27485 - DNA, 1623 bp, Zea mays
  Clone ID: LIB4731-013-C2_FLI
tcgaggccggccgggagtcagacacggcgcgcccgcccgcccgcccgccagaaacctcacaccgccatcaccatcgccatcgcataaactagacgagaagagagagagagggagagaggggaaagttgattctctctctgacccgcccactccctccttccctgctccggtcgcactccgtcgttcctccgcgcacgtacgtacagcagccagacacgagatcgagtggtacagggcccgccagaaacctcacgagctagctggttcctgatcggcggcctgtgccgcgcgccgatccacgcatggcgccgccgctcctgcccgcgcgcttcgtcgccgcctccgtcgcgctgctcgccgtcgccttctcctcctctctaacgcgtccgtcaggtgcatacgatccgctcgatccgaacgggaacataacaatcaagtgggacgtgatacagtggactgcggatggctatgtggccgtcgtttcgctatacaactaccagcagtaccgccacatccaggcgccggggtggaggctaggctgggtgtgggcgaagaaggaggtgatctgggcgatgaccggcggccaggccaccgagcagggcgactgctccaggttcaaggccagcgtcctcccccactgctgcaggagggacccggaggtggtggacctgctgcccgggactccctacaacacgcagaccgccaactgctgcaggggaggagtgctcgcctcgtgggcgcaggaccctagcaacgccgtcgcatcgttccaggtcagcgttgggcaggctgggtccaccaacaggaccgtcaaggtgcccaggaacttcaccctgctggcgcctggtcccgggtacacctgcggagccgctaagcttgtcaagcctaccaagttcatgtctctggatggcaggagatcaactcaagcgcacatgacctggaacgtgacgtgcacgtactcgcagttccttgcccagagatctccaacctgctgtgtctcgctctcgtctttctacaacgacaccattgttagctgcccagcatgctcctgcggctgccgccagaacaacagcagcaccgccgcgccaggaagctgcgtagagtaagtttattttgcatccacggcgatgctatggggcatcaagtactacaacgatctgctcatgacggccgggccagacgggaacgtgcagtccgagcttctgttccggaaggagccgtccacgttcaccttccacaaaggatgggccttccccaggcgagtctacttcaacggagacaactgcgtgatgccgccgccggacgcctacccgtggctgcccaacgccgcctccccgcggctgtcgccttcgcttctcctcccgctcgttgcggctgcttggacagcattcgcagtcctttcgtgatgtcccatgacgagttctgacctgattcggcgttgctgcttgctgctgatcattagtctgttgccaagttttatttggtgtcttgaatcttgatccaggaacaggttcagatgtgcagtcacgtactaccaagcatgtacatccccaatacttgtaaatttctgcaaagactgactggcaagtgacagtagaaataatctgtttctctctccgcacg

SEQ ID NO: 27486 - DNA, 920 bp, Zea mays
  Clone ID: LIB4731-014-H2_FLI
ctcgaggccggccgggatcaaattagtagttaatccatcacccatattatttataccaactaccaacatacatagtgaagtacactagcaacatcttagcaccaatggcagccaagatttttgcgctccttgccctccttgctctttcagcaagtgttgctaccgcgactattattccacaatgctcacaacaatacctctctccagtgatagccgcgagatttgaatacccatctatacaatcctacaggctacaagaggccatcacagcaagcatcttacggtcgttagcattgaccgtccaacaaccatatgccctattgcaacaaccatccttagtgaatctgtatctccaaaaaatcgcagcacaacaactacaacaacggttgcttccaacaattaatcaagtagttgcagcgaaccttgctgcttaccttcagcaacaacaatttcttccattcaatcaactagctggggtgaaccctgctgattacttgcaggcacaacagctactaccattcaaccaacttgtcgggagccctgctgccttcttattgcagcaacagttgctgccattccgtctacaagttgttgcaaacattgctgctttcttgcaacaacaacaattgctgccattttacccacaggttgtgggaaacattaacgccttcttgcaacaacaacaattgctgccattctacccacaggatgtggcaaacattgtcgccttcttacaacaacagcaattgctgccatttagccaactcgctttgacgaatcctaccaccttattgcatcagcccaccattggtggtgccatcttctagattttttatgctttatactgtaataataaatttctcatactgatatgtgcaacttctcagtaataaaagattagagatctatattttaagtcc

SEQ ID NO: 27487 - DNA, 927 bp, Zea mays
  Clone ID: LIB4731-015-C5_FLI
ctcgaggccggccggcttcgaagaaagcgacgggtgccggatccagactttattccccaaaaaccaaaataatcgccaccgctctccgcaccgaaccgaagcagcggcgatggcagcggagaagccggctcccgtgcgcgtgctctactgcggcgtctgcggcctcccggccgagtactgcgagttcggccccgacttcgagcgctgcaagccctggctgcgcgcgcacgcgcccggcgtctaccccggcgacaaggacgtcgacagggtcggggaacgcctccagggcgtcggaatctccgacggctccaccagcgccgcaggggatgcttccgcgtctaagccccaagaggcgaaacgcctgcctggtggtaagctcaagaaaaaggagaagcaagaagtggtcattgagaagattgtccgtaacaagcgcaaatgtgttactgtggtgaaagggcttgaattgtttggtgtaaagcttagtgatgcttcgaagaagcttgggaagaagtttgcaaccggagcttctgttgttaagggccctacggaggaggagcaaatcgacgtacaaggggacatctcatatgatattgtggagttcattacagatacatggcctgatgtacctgagtcggccattttcttcattgaagatggaaggaaggttcctgctgcttgatgccatatggtttataaggcacgagaccaatggatttacaaatataatacagaggtaaggtaagggcatggctgttaaggcatatatagggccataccagctcatctcttgtctgaagtcatgaactgttgttccggtttttaggcttacttcacaagtggcattctgtttaccatcgtcacctgcttccatgtatgaaatcaaatctatacagttaccaatttactatgactgtgtctgttgtatcg

SEQ ID NO: 27488 - DNA, 1238 bp, Zea mays
  Clone ID: LIB4731-017-F3_FLI
ccgggactcatccattccatcatcccttgcaagtatagtctcggcggctctagaatacgatgggcaaggacgacgtgatcgagagcggcgctggcggcggcgagttcgctgccaaggactacacggaccctcccccggcgccgctgatcgacgcggctgagctggggtcctggtcgctgtaccgcgccgtgatcgccgagttcatcgccacgctgctgttcctgtacatcacggtggccaccgtgatcgggtacaagcaccagacggacgcgtcggcgtcgggcgccgacgcggcgtgcggcggcgtgggggtgctgggcatcgcctgggccttcggcggcatgatcttcgtcctcgtctactgcaccgccggcatctcggggggccacatcaaccccgccgtcaccttcggcctcttcctggcgcgcaaggtctccctggtgcgcgcgctgctctacatcgtggcgcagtgcctcggcgccatctgcggcgtcggcctcgtcaaggcgttccagagcgcctacttcgacaggtacggcggcggcgccaactcgctcgcctccggctactcccgcggcaccggcctcggcgccgagatcatcggcaccttcgtgctcgtctacaccgtcttctccgccaccgaccccaagcgcaacgcccgcgactcccacgtcccggttctggctcccctccccatcggcttcgccgtgttcatggtgcacctggccaccatccccgtcaccggcaccggcatcaacccggccaggagcctgggcgccgccgtcatctacaacaaggacaagccctgggacgaccactggatcttctgggtgggccctctcgtgggcgctgccatcgcggccttctaccaccagtacatcctccgggctggcgccatcaaggccctcggctccttcaggagcaacgcgtgatgagcggggcttggctgtggagcaatggcgggcgacctacgggcgggggaagtcgtgagcgaggagaatgacatcatcgatcgacttgggtgccggtggttggttcgggtcgccttttttgtttcagcagctgctgcgttgcgcgcgtgcgtgagatttggtttggtttcgttcccctgcaatgtaatcatgtcgtgactctcaagggattattccgctctgctcttatggtctctgttttctatttaatgattgttattaccatgtagcagtaaccatcgtcatcagtgataaccttgttgctgc

SEQ ID NO: 27489 - DNA, 1021 bp, Zea mays
  Clone ID: LIB4731-017-G6_FLI
ctcgaggccggccgggcctcacactcccatccagccgccaccaggtgcagagtctttcgtcatctcttctccggcgaagaacccccagtcgcccaccagatcacttgttaaactttgttgaggggtgatggcggtttctttcgcaaacctcaactccgaggcagggcttaaaaagcttgatgagtaccttctcactcgcagctacatcactggctaccaagcttccaaggatgacttggctgtctacacttcgttttcggctgctccctcgtccaagtatatcaacgtagcaaggtggtttaaccacattgatgcgctcgtgaggctgagcggaattactgcagagggccaaggtgtgaaggttgaatcctcagcagttccttcagccccaactccagatgttgctgaagcacaggccccagttgctgaggaggacgacgacgatgatgttgacctttttggtgaggagaccgaagatgagaagaaggctgctgaagagcgtgctgcagctgccaaggcttctggcaagaagaaagaatctgggaagtcatcagttttacttgatgtgaagccatgggacgatgagactgacatggccaagctcgaggaagctgttaggagtgtccagatggaagggctgctctggggcgcatccaagcttgtcccagttggatatggtatcaagaagctgcaaatcatgatgaccatcgtcgacgaccttgtctctgtcgacactctcattgaggactatctgtgcgctgagccagtgaacgagtacgtgcagagctgcgacatagttgccttcaacaagatctaggcgtgacttccgatcagtccttctcctggggtgctggcgatggtggtggctgggcaatgcaccagcctaatttatccatagctatatgtctgctttgtgtggccagtgatattgccgtgagtatttttggatcctattcgagtcgaatgtaccagtaccagagttaatttgctttaattcgaaacaccgttccagttggaattc

SEQ ID NO: 27490 - DNA, 1627 bp, Zea mays
  Clone ID: LIB4731-018-A2_FLI
ccggacggctacggcagaaaagttagcaacaacaaaccagcggagctcgaaatcgaattccccaatccccgccttcctcggttccctcaccgcgaaccctaaccctagtccaccccgctcccatggacgaggatgctggcggcgcctcgccgccgccggtgccactggctcacgtgccccctcttcagcaacccaccaccgccgccccctcgcatcgggacatggcggcgtcccccaccagctcgcgctccgtgacggagacggtgaacggctcccaccgcttcgtgatccagggctactcgctcgccaagggcatgggcgtggggaagcacatcgccagcgagaccttctccgtgggcggataccagtgggcggtctacttctaccccgacgggaagaaccccgaggacaactccgtctacgtctccgtcttcatcgccctcgcttccgatggcaccgacgtgcgtgccctcttcgagctcacgctccttgatcagagcggcaagggcaagcacaaggtccactcccactttgaccgctccatggagtccgggccgtacaccctcaagtaccgcggatccatgtggggttacaaacgattctttcggcgaactgcccttgaattatcagactatctcaaagatgattgtctgaaaataaattgcactgtgggagttgtagtgtcaactatcgattactccataccgcactctatccatgttccagactcagacatcggctatgattttggttcactgttggacagtcaggagggtgctgatgtcattcttaatgtgggaggagagaggtttcatgcccataagttagtgttggctgcacggtctcatgtattcggatctcaattttttgatgatgaatctgatggagagaagagtgaggttaatgagactgatgaactaaaagagttttctattgatgatatggagccaaatgttttcaaggcaatgcttcacttcatctatagagatacccttgttgatgatgatgagttgggcgcgtcaagctctgatggttctatctttgatactccggcagctaagttgttggctgcagccgataagtatcacttagcaagactaaagtcgctatgtgaatcttacctgtgcaagggcatatcagtggcctcagttgcgagtacgttagcattggctgataggcaccatgccatggagcttaaagctgtttgcctaaaatttgctgctgaaaatctttcagctgtaatgcggagtgagggtttcatttacctcaaggacaactgcccatctctccagtcagagatactgaaaactgttgcagggtgtgaggaccagtgcagcagtgttgggaagagccagagcgtttgtgggcagctctcggacggtggcgattccagttgccgcagggttaggcaaagaacctgaggtcaacccagaactgacatggttagccagctcttgctctgtaaatgacgatggcaatcatctgtatgtgaagaaaaaacaatttgaaggagctgtaactagctgtatctcatcatgctccttacatcttacctgccgtcttgtttgtaactagttgactgtttggtcatgagcagttactgagtcgatgtgtagacagccctgag

SEQ ID NO: 27491 - DNA, 1510 bp, Zea mays
  Clone ID: LIB4731-023-C5_FLI
gggagcacagccacgcacaggggtcaggtcagtcgcctacgaaattcaatagcacagcgagagccaaggaagaagaagaagcaagcggagcgccatggcggcgtccaacggcgagggccacggccggttcgacgtgatcgtggtgggcgcgggcatcatgggcagctgcgccgcctacgcggcgtcctctcgtggcgcgcgcgtgctgctcctggagcggttcgacctgctccaccaccggggctcctcgcacggcgagtcgcgcaccatccgcgccacctacccgcaggcgcactacccgcccatggtgcgcctgtcccggcgcctctgggacgaggcccaggccgacgccgggtacaccgtgctcacgcccaccccgcacctcgacctgggcccgcgggacgactcggcgctcgtcgcctccatgaggaacggcggtgccaccgaagtcgtcgccggggatgagtcgtcgtcctggccgtgggcaggcgtgttcagggtccccgacgggtggacggcggcgcggagcgagctgggcggggtcatgaaggccaccaaggccgtggccatgttccaggcgctcgccgtcaagagaggcgccgtcctcagggacaggactgaggtggtggacatcacctcctccaagcgaggtgaaggagaggggtcaatcatctcggtgaggacgtccagcggcgaggagttccacggcacgaaatgcatagtgacagtgggcgcatggacgagcaagctgatcaagtcggtgaccggcctggagctgccggtgcagccggtgcacacgctcatctgctactggaaggtgaggcccgggcgcgagcaggagctcaccccggaggccgggttcccgacgttcgccagctacggcgacccctacatctacagcacgccgtcgatggagttcccggggctgatcaagatcgccatgcacggcggcccgccgtgcgacccggacggcagggactggtccacgggcgcgggcgacctggtggagccggtggcccggtggatcgacgccgtcatgccgggccacgtcgacaccgccggcgggcccgtcgtccgccagtgctgcatgtactccgtgacccccgacgacgactacgtcgtcgacttcctcggcggggagttcgggaaggacgtcgtcatcggcgcggggttctctggccacggcttcaagatgggcccggccgtcgggaggatcctggccgagatggccttggacggggaggcgagcacggcggccgaggccggagtagacctccgccccctaacgatcggccggttcgcgggaaatcccaaaggaaacctgtctgccagccaaggctgatcggcgacggggctctgtttcatggtttgatgtcaaagtgtgtgctctgcttgccaacttgtctgttaagtgtcttttgggttgttggatttaaaaaacaaaagtgcgcgcatctcctcagtgttttctgcaggctgcagtaataaactggtttggtcagttctattg

SEQ ID NO: 27492 - DNA, 984 bp, Zea mays
  Clone ID: LIB4731-024-E2_FLI
ggaaatatctcccaaatcagtagttaatccatcgcccataatattttgagcattcaaaaacacacaaagggaagtgcactagcaacttcctaacaacaatggctaccaagatattagccctccttgcgctcctttccctttcagtgagcgcaacaactgcattcattattccacaatgctcacttgctcctaatgccattattccacagttcctcccatcagttacatcaatgggcatcgaacaccctattgtgcaagcctataggctacaacaagcgcttgcggcgagcgtcttacaacaaccgtttgcccaattacaacaacaatccttggcacatctcaccgtacaaaccatcgcaacgcaacaacaacaacagtttgtgcccgcactgagccaacttgctgcggtgaaccctgcctcctacttgcaacaacaactgcttgcatccaacctacttgctttggcgaacacagccgcataccagcaacaactacagttgcaacagtttctaccagctcttagtcaactagccatggtgaaccctgctacatacctgcaacaacaacaactgctttcatctagcccactcgctgtgggcaatgcggctacatacctccaacagcagctgctacaacagatcgtaccggctcttagtcagctagctgtggcgaaccctactgcctacttgcagcagcttcttccattcaaccaactagatgtggcaaactctgctgcgtacctacaacagcggcagcaactacttaatccacttgcagcggctaacccattggtcgccgccttcctgcaacagcaacaatttctgccatacaaccaaatctctttgatgaaccctgccttgtcaaggcagcaaccgatcgttggaggtgccatcttttagattacaaatgagatgtacttgataacattgccctcataccggcatgtgcaacttcctataaataatcaatatattgattgagatt

SEQ ID NO: 27493 - DNA, 1179 bp, Zea mays
  Clone ID: LIB4732-001-E11_FLI
cccgggacaccaacctcagcacaccaaggagagtacgtggaggagcagccatggcttcatcggtggccgccgcggcgagcacattcctgggcacccgcctggcggacccggcgccacagaacgggcgcatcgtggcccggttcgggttcgggttgggcggcaaggcgaagcctgctccgaagaaggtggcgaagacatcgacctcctctgaccggccgctgtggttccccggcgccgtggcgcccgactacctggacggctcgctggtcggcgactacgggttcgacccgttcggtctcgggaagcccgtggagtacctgcagttcgagttggactcgctggaccagaacctggccaagaatgaggccggcggcatcatcggcacccggttcgagtcctccgaagtcaagtccaccccgttgcagccctacagcgaggtgttcggcctccagcggttccgcgagtgcgagctcatccacggccgctgggccatgctcgccaccctcggcgccctctccgtcgagtggctcaccggcgtcacctggcaggacgccggcaaggtggagctggtggacgggtcctcctacctgggccagccgctgccgttctccatctcgacgctcatctggatcgaggtgctcgtgatcggctacatcgagttccagcgcaacgccgagctcgacccggagaagaggctgtaccccggcggctcctacttcgacccgctcggcctggcggccgaccctgagaagaaggagcggctgcagctggcggagatcaagcacgcgcgcctcgccatggtcgccttcctcggcttcgccgtgcaggccgccgccaccggcaaggggccgctcaacaactgggccacccacctgagcgacccgctccacactaccatcttcgacacgttcggagggtcctcttaagcccgccattgctccgccccgtccatcgaccggaacgtgttcttggattaattaactacgatctctatgagcctggggatggatcaacccgtcgtgcgtggtctcgttttgtgatgagtgggagagagaggatgacaagatcgatcctttgttaatggagatctcgttaattaggagagctaccgctgggacttggtggtttgtaatatatgatccaaccagtgatgaatcaatgcattcacttgtgtacacg

SEQ ID NO: 27494 - DNA, 686 bp, Zea mays
  Clone ID: LIB4732-001-G11_FLI
agaacaaactgtcatcagcatataatgtttgcacacaactcaaacatgcatctgcactgcatcgtatatatccaacaaaacggcagctagcgatgatggcatcctccctcctctttgttgtcgtcctcctcgcagcgctgtcatcgccgccgccttcagccgtcctggcggcggacgacgacggcaccacgcacctgcacttcttcatgcacgacgtggcgaccgggagcaacccgacggcggtgcaggtgatcaagggcgcggggtcgtcggtcgtcccggggctggcgttcggcgacaccacggtgatcgacgacgcgctgacggagacgtcgtcgcccacgtccgccgccgtgggccgcgcgcagggcttctacatgatgtcgtcgcagtcgggcttcgtgctcatggtgtgcgccaacctgctgctcaccgcgggggaccacaacggcagcacgctcgcggtggtgggccgggacgacgtcgcggcggacgtgcgggagctctccgtcgtcggcggcacgggccggttcaggatggccaccggctacgtgctgtggaagacgtccagcatgaacgggcctgacgctaccgtcgagctcgacgtgcacgtgaggacggccacaaccgctgccacgggtagcggcaccactggtgccttctcgggcgccccggccggcctcgag

SEQ ID NO: 27495 - DNA, 730 bp, Zea mays
  Clone ID: LIB4732-002-E5_FLI
atacgtatatagacgtggtcaggatgacgtcgtcctccgtcttcttcctcctgctcgcttgcttcgccacatgcgccggcgccgccacgttcacggtacgaaacaactgcgggttcacggtgtggccagcaggcatcccggtcggcggcggcacgcagctgaacccgggctcgacgtggactgtcaacgtgcaggccgggaccagcggaggcaggatctggggccgcaccggctgctccttcagcggcggccggggccgctgcgcgacgggcgactgcggaggcgcctactcctgcagcctgtccgggcagcccccggcgacgctggcggagttcaccatcggcggcggcggcaaccacgactactacgatatctcggtgatcgacggctacaacctgcccatggacttctcgtgcagcactggcgccgccctgcggtgcagggactccggctgccccgacgcgtaccaccagcccaatgaccctaagacccgttcgtgcaacggcaatagcaactaccaggtcgtcttctgcccctgatgaacatgcatgcagcttgccatgagcccatgcatgcatgagagcgtattaattgttcgtcaactcacatgcacgtacctactagtgaagttgataaataagacgatcgatatctgactcgtccaatgcagcatgtgtgtatggtgtgatccttatactttcctacatatatggaactttttaaagggagg

SEQ ID NO: 27496 - DNA, 550 bp, Zea mays
  Clone ID: LIB4732-002-F3_FLI
gccgactgggactgagaagaaacctccaaacacctttctacctctctacgaactacctgccgccggaaaaccctagagcgctcgaccatggatccgcagcagccggagcctgtcagttacctctgcggagattgcggagctgagaacaccctgaagcccggagatgtcatccagtgccgtgaatgtggctaccgcatcctctacaagaagcggacccgccggattgtccaatatgaagcgcgctgaagagtgaagacaagggaaaacactgaagatggttgatctattactcgccacattacctatgtaaacagtcttctgggggaaatgaaaatgtcagacaacgtttgtatgtcgtgtgcctcctttgaacctgagctgtataatttgtaacgcttgaactggggactgatttgagaactgagacactgcagcaatatgttgatggatcctaagtggcgaatctaatgcatgcgtgttatgccagcgttattttttgttacttgtttgcctccaatggtaaggctggagtgttgcctccattcatgcg

SEQ ID NO: 27497 - DNA, 1012 bp, Zea mays
  Clone ID: LIB4732-003-C9_FLI
tcgaggccggccggggaccaggcccattaaaggcccacttgccatatatatctgcgaagaaaaaccctacgtgtcacaagcctccgcctcttctcccgtttgcgacgactgggtgggctacgccgccgccgccgccgctgccgctgctctacggtgctgagtcctttgccgatttcttcccggcgaagagcgccaccagtagatccgcccctgctgaaaacgcactcgatggcgtccgcgacggggggttcctcctcggagatggcggtggaccacgcgacggggctgggcaccgtggagaagccgcggtttgatgctctgatgccgagtgagatgagcggcgggaggacccagttccggaaagtgaccgtgccgcagcaccggttcgcgccgctcaagcgatgctggatggaaatctacacacccgtttacgagcacatgaagatcgacatacgcatgaatctcaaggcgaggagggtggagctaaagacaaggcaagacacaccagatgtcagcaaccttcagaaatgtgctgactttgtgcatgcttttatgctcgggttcgacattgctgatgccgtcgccttgctgcgtcttgatgatctgtatgtggattcctttgagatcaaggacgtgaagaccttgcgaggggagcatctgtcgcgcgctattggccgcttatcagggaaaggaggcaagaccaagtacgccattgagaactcaaccaggacccgcatcgtcatcgctgatacaaagatccacatacttggatccttcgttaacatcaaggtcgcgcgggattcactttgcagtctcatcttgggttctcctgctggcaaagtgtattctaaactaagggctgtatcagctaggttggcggaaaggtattaaattaaataaggtttgcccgcactgtataagggcatgttcggttcccctcaattcatatggattggagggatttgagtgtgattaattccatatcaagtcaaaattcttcataattttttcc

SEQ ID NO: 27498 - DNA, 1236 bp, Zea mays
  Clone ID: LIB4732-003-D4_FLI
ctcgaggccggccgggacgccagcacgcccgagccccgaatcgagtcccctaccccatcgatccccgccgcccgcctttccccgccattcttctagaacctacccagctctcggggaccttctctcccagcccgagatccctccccaccgagatcccgcgccgccatggtgtcgtgacggcggcggaggcggcgtcatggagcgggagcccaagtcccccgacgaccgccctgagcccgctgcggcggcggcgcagccgcagccgctggagtggcggtttgcgcaggtcttcggcgagcgcgccgcgggagaagatgtgcaagatgtggacataatctctgcaattgagtttgacaaatctgggaatcatcttgctactggagatagaggtggacgtgtggttttgttcgaaagaacagacattgctgataatgcttgtcgaagagaacttgagaggcaagaatatcttgtttctaggcatcctgagttccgttacaagaccgaatttcagagtcatgaacctgagtttgactacctaaaaagtttggaaatagaagagaagattaacaagatcaagtggtgccaaacaaccaacaatgcactctttctcttgtctacaaatgacaaaacaatcaagtattggaaggttcaagagaaaaaggtgaaacgggtttcagtgatgaatttggacacctcccaaagttcagacaatggttcaacttcaagtccgggtaccagtagttgcagagctcttcttccaaatggtggatgcacaggaaaaatgtacagtccaaacaacaatatgccatttcctccaggaggatgcacatcgctgcgtttgcctgtggtggttacaggccaagaatttactcatgttgcgagaagcagacgtgtatatgcccatgcccatgactaccatattaattccatttcaaataatagtgtgcatggtttttgaggcattgtggcatccagtggcgctggggtacgcctggatgctaggcaatatggcataacgaaaaccttgtggctcctatggcgcctggggtatgcctcaactccttggcgacggctcaaaaaccatggtagtgtgtaaaaccagtatggtggcaacattgttcttctgtagtaggaaatgtggtctatgacttatgtaacataaaagctttgaagtaggtaaaataaaagaagcttattctttcattataaagaagctactgctcttaaggctattag

SEQ ID NO: 27499 - DNA, 1100 bp, Zea mays
  Clone ID: LIB4732-003-E5_FLI
ctcgaggccggccggggagatactgccgccgccgccgccgccgccccgcccaacgccaggtgccgaggccttcgccggcgaagagcgccgaccggtacgagatcgaggaagacggccatgttctcatccgcccgccttgccctacgccgagctgcctctcttggggcgggcctctgccgcgccgcggaggatcccttttcgcgaaggtttctccatgggcagctcctcccacgttcctttgcctcagatgcatcgggacacaacaggggtttcccaccttctgggtctggagttgttgcagatacggatccacgtcagaattttaacagatctggttttgtgtctcaagatattcgtgctaagacacaggtcaacttcaacaacacagataatggagcggcgatgtctgggacaccccgtggccagaaccctttcagctcaagggagggcttcacagtcaacctccgcacctttgccatggaccacgaacagtattccaagaagagagctttcgtccacgtcctactgaagagaaagaagaccttcgtgacggtgacagactccagcgggaacaaaaagacgggtgcctccgccggctgcttggaggacaggaaaggacggtcccgtctctcccgatacgcttccgaagcggtcgcggagcaggtcggacggtccgccaggaagatggggttgagctccatcgtcatgaaggtgaaaggggcttcgttcttcaagaagaagaagaaggtgatcctgagcttcagagaagggttccgaggcgaaagggtgagggaccaatctcctatcatgtacatccacgacgtgacccagcttcctcacaatgggtgccggctccccaagcagcgccgggtgtagtttcggagtggactggaactagagctgggtttaaagaaagaaccggggaagtgtcggaggtgattttcggaaacttaacgtaatcgttgtgttgttggcctagttgatgtaataatatggacatgtgttttgggcaaatctacccttgttcttgtattgtatggaagcaacttactcgctcgatgagttatagacaattctgcgtaataatgctgttgagttcc

SEQ ID NO: 27500 - DNA, 1031 bp, Zea mays
  Clone ID: LIB4732-003-G1_FLI
ctcgaggccggccgggaaaacggccaaaccactcccctcttccccagttccccttgtcgtttgcgcaggggaaaaggagcgccgcagaccgagggacggcgacgaggtatccaatggccgagcctgaccctgacgtgatcgaagtgaccttcggcaacgacgtgattaacaccaccgtcacatcctccggccaggctgtggagcgctggatcgcggagatcctcgcgttgcaccgccccggcagcaacggctacagcatcatcgtcgggctcgacgttgagtggcgcccaagcttcggcccgcaccagaacccggtggccacactgcagctctgcgtcggacacagctgcctcatcttccagctcctctacgccgactacgtccccggcgcgctggcggagttcctcggcgaccgcgggatccgcttcgtcggcgtcggcgtggaggcggacgcggagcggctcagcgacgaccacggtctggtggtggccaacgcggaggacctgcggggccgcgccgcggagcggatgaaccgcccggacctccgccaggcggggctgcgcgcgctcgtgcaagtcgtcatgggcgtcgacctcgtgaagccgcagagggtcaccatgagccgctgggacgcgtcctgcctcagctacgatcagatcaagtatgcctgcatcgacgccttcgtctctttcgaggtcgcccgcaggctgcttggcggcgcgtactgatcgacgcggtgaggtgctgtgttgtttaatccttagtctatcctatcttagttcgttgcactttgccgtggactcgcgttgcttaatccttagcctatcctatcttagttcgttgcactttgcttccagacaatttgtgctagtgtgctcagacttcagatttggttgttgctgcatttcgacctacaagtctgtaggggtttctgtgatcgaggataattaatcagacagtcatgtactgcgttcctggtttgtcgctgcttttggcgtacagagtcgcattgagcatttgagagcaaaaat

SEQ ID NO: 27501 - DNA, 945 bp, Zea mays
  Clone ID: LIB4732-004-F5_FLI
cctcgaggccggccgggggccgcatcccccggtgaggtgagcagaccactcctccactagtcccctgtccggctgtcccctccttcgtgtcggagcctgcgcctcggcttgtccccaccaacccgcagctcgctcccaccaaacccacacccgaacaatggcgtcggcgtccaaggaggaggtgatcgggaagctcaacatccgcgtggtgcggggcaacaacctggccatcgccgacccgctcacccacaccagcgacccctacgtcgtcctccagtacggcgctcagaaggtgaagactagtgtccagaagaagaactccaatccagtgtggaacgaagtactgcagctctcagtaacacatcctacgaagccagtgcaccttgaagtttttgatgaagacaagttcacagcagacgacagcatgggtgttgctgagatcaacattactgacatctacgatgctgcgaagctggacctgaagcacgcctctgatgggacaaggatcaagacgatctaccctgtcggagtaaactaccttggcggcgagagccatgttcagtggaaggatggcaaggtggtccaggacttgattctgaagctgaggaaggtcgagagtggcctgattgtggtgcagctggagtgggttcatgttcctggcgtgaagctgtgaaggccctgtctgaatgagggctgatggagctgcagttgctgtgtccctggtttgattgtttggttgtaaacgatatcctgaacgtggtgatatgcggtgtatgagtgaggtttgagtgtgatgctttgtttggggtacttcctggtgacatgatgtgggtatgactgccaaaggttgtggcgcaccaataagaaacgccctgtcagcatgacagcatgttgtgagatgtaaactaagactttagaacctaaatatacaggtgattgggcgtt

SEQ ID NO: 27502 - DNA, 1530 bp, Zea mays
  Clone ID: LIB4732-004-G5_FLI
ccgggaaccagatcacacgaaccaaaccaccgcttcctcccccgaccggagaggagcctcaccgccggcgcccatggcgacacgctacttgatcgtgtcgctgcccgtgcagtcgcccggcgccaccgccagctccctgtggtcgcgcctccaggactccatctcccgccactccttcgacaccccgctctaccgcgtaagcgatcccctccgacccgtctccttcacccgccgggatttaatctcgcgtagcctcaccgtccgcgcagttcaacgtcccggatctccgcgtcggcaccctcgactcgctcctcgcgctcagtgacgacctcgtcaagtccaatgtcttcgtggagggcgtgtcacacaagatccggaggcagatcgaggacctcgtgcgcgccggaggggtcgagaccgggaccctcaccgtcgacggcgtccccgtcgacacctacctcactaggttcgtgtgggatgagggcaagtaccccacaatgtcccctctcaaggagatcgtcggcagcatacagtcacaggttgccaagatcgaggatgacatgaaggttcgagcatcagaatataataatgtaaggagccagcttagtgcgatcaacaggaagcaaagtgggagcggttcgtgatctttccaatctggtaaaaccggaggatatgatcacctcggaacatctcgtgacacttcttgcaattgttcccaagtactcccaaaaagactggttgtcaagctatgagaaaattgacacattcgtggtacctaggtcctctaaaaagctctatgaagacaatgaatatgctctctacactgtaacactgtttgctaaggttgttgacaattttaaggtccgtgctcgcgagaagggttttcaggtccgtgattttgagtacagtcctgaagcacaggaaagtcggaagcaggagatggagaagctactgcaagaccaagaagccatgaggactacacttcttcaatggtgctatgccagctacagcgaggtattcagttcctggatgcacttctgtgctgtgcgtgtctttgtagagagcatccttagatatggtctccctccatcattcctgtctgctgttctcgcaccatctacaaagagcgagaagaaagtaaggagcatcttagaggagctctgcggcaatgcccatagtatttattggaaatccgaagacgacgtaggcgtcgccggtctgggaggtgaaacagaggcgcacccttacgtctccttcaccataaattttgtctgagaccggcatgttcctggccgtctgcggcccaggcaacatttcgagcagaactgccataaattctttgttgatttgtcggttcatgtgctcctgtaattcacatcacagagagaccagccgatcaataatgtagtttctgaggacatgtttccctgcagtattgcaccttgggagcgcattgtaaatggcctggaacagttgtctactggatttgtttatttatttacaataaaagccatgtgaaaataagtaacc

SEQ ID NO: 27503 - DNA, 201 bp, Zea mays
  Clone ID: LIB4732-005-D10_FLI
taccctcgaggccggccaatccaacgaactgaccacaaccacctaagctaaaagctaaccaccagacccccggccatggcgctcgcgcccacttccgctgccgtgctcaagaccccgttcctcggggccaggcgcgcgctcgccaatgccgccgccaagcccgcgcctcgccgcgcgctggtcgtcgccgccgcggccctc

SEQ ID NO: 27504 - DNA, 744 bp, Zea mays
  Clone ID: LIB4732-005-G12_FLI
cctcgaggccggccgggaaaaaccctagcctccaccccgtccggcagcagccaaaccctacataggcgccgccgcaggcggccccccgcatcgtcgccaaagatgcagatctttgtgaagactctgacggggaagaccatcactttggaggtggagtcctcggacaccatcgacaatgtgaaggccaagatccaggacaaggagggcatccccccggaccagcagcggctcatcttcgccggcaagcagctcgaggacggtcgcacccttgccgactacaacatccagaaggagtccaccctccacctggtgctccgcctccgcggcggcgccaagaagcgtaagaagaagacgtacaccaagcccaagaagatcaagcacaagcacaagaaggtgaagctctccgtgctgcagttctataaggtggacgacaccactagcaaggtgacccgcctccgcaaggagtgccccaactcagagtgcggcgcgggcgtcttcatggccaaccacttcgaccgccactactgcggcaagtgcggcctcacatatgtctacaaccagaaggcgtaattgcttgccccgatttgctttatccgcctaccctatcgaacatccagctgttggttactcgaattgtatctcatgtagatctgtctgaggttgaaacttaatggagcagtagtatctgtcatattgatacccctgttactgaattgatgtgatgctgagtttaattttgtttcc

SEQ ID NO: 27505 - DNA, 1396 bp, Zea mays
  Clone ID: LIB4732-005-H4_FLI
ctcgaggccggccggggaattgcgatagcgagactcatgcaggcacacaagggggagttcccgagtccacggctgcacacgtcgtcgcctcctctccactcgcacactcgcaccctgcgtccgcctgccgcctaccccaggcggccccctcccatcgccatgcctccgtccgccgccgccaccgccgccgccttcctcttcccggccgtcgcgatcccctgccgcgtgttccctcaacggcgggcgaggagcctcgccgtccgtgccgtcgcctcccctccagccttcgcggtcaagcccgccccgctgccctccaagactggaaagtgggagtggaaattcgagaacaagccggtaaacatatactatgaggaacatgagcaggaggttgctgagaatatgaagaacattctcatgatccctacgatctctgatgtgagcactgtggaggagtggagggtggttgccaaagatattgttgggcggaaaggagaacttggctaccgtgttacaattgtcgattggcctggtcttggttattcagataggccatcactgaactacaatgctgatgtgatggagagctttctggttgaactaatgaattcaccaaacagtccagtcgcaaatgcagatgatgaactgatcattgttggaggtggtcatgcagcaaccatagctgttcgtgcagctggtaaagaccttataaaaccatctgctgttgctgctgttgcacctacttgggctggaccccttcccatcgtatttggccgcggttctgatatggaaactaggtatgggcttctacgaggaaccctcagggctccagccctgggctggatgatgtacaatgttctggtgagcaatgaaaagtcgatccagtctcagtacaagtcccacgtctacgccaaccctgacaacgtgacgccagatatcatcgagagccgatacgagttaaccaaaagaaaaggcgcacggttcgtccccgcggccttcctgacaggcctccttgatcctgtccaatcgagggaggagtttctgcagttgttcgccaagttagacggagacgtaccagttctggtagtgtcaacggtcaatgctcccaagagatccaaggccgagatggaggctctcaggggatctaaaggggtgacgaagtttgtggaggtcgcaggcgctcttctaccgcaggaagaataccccttggcagtcgcggaggaactctacagcttcctgcaggaatcattcgcagcaagaaggtgaatgtgcgtgcgtgcgtgcgcacaactgtgccagaagacaggttctcaagtcccacacatcgtgagtaaattcgttagcctgctacagtgtactggaggtttttagcaacaataaagcggcatcactcgttcag

SEQ ID NO: 27506 - DNA, 1480 bp, Zea mays
  Clone ID: LIB4732-006-E4_FLI
ccggggccttaaccattcctcccaacatcacctcgcctgcgatctccgtagcctccgtcgcgtcgagcatcgatcatgtcggcctactgcggaaagtacaaggatgagctcatcaagaatgctgcctacattggcacccctggcaagggtatccttgctgctgatgagtccactggcaccattggcaagcgcctttccagcatcaatgtcgagaacgttgaggagaaccgccgtgccctccgtgagctcctattctgctgccctggtgctctccagtacatcagcggtgtgatcctcttcgaggagaccctgtaccagaagaccaaggatggcaagccttttgttgatgtcctcaaggagggaggcgtcctccctggcatcaaggttgacaagggcaccattgaggttgttggcactgataaggagaccaccacccaaggccatgacgaccttggcaagcgctgcgccaagtactacgaggccggtgcccgctttgccaagtggcgcgctgttctcaagattggccccaatgagccatcacagcttgccatcgacctgaacgctcagggtctggctcgctatgccatcatctgccaggagaatggtctggtgccaattgttgagcctgagatccttgttgatggccctcatgacattgatcgctgcgcttacgtcactgagaccgtccttgctgcctgctacaaggcgctcaacgagcaccatgtcctcctggagggtaccctcctgaagcccaacatggtgactccaggctccgactccaagaaggtgactcctgaggtgattgctgagtacaccgtccgtaccctccagaggaccgtccctgctgctgtgcctgctgttgtcttcctctctggtggacagagcgaggaggaggccacccgcaacctcaatgccatgaacaagctcagcaccaagaagccgtggtccctgtctttctccttcggccgtgccctccaggcgagcaccctcaaggcctgggctggcaaggtggagaacttggagaaggctagagctgccttcctcgccaggtgcaaggccaactctgaggctaccctcggcacctacaagggtgatgctgccgccgacaccgagagcctccacgtcaaggactacaagtactgagttgcttctctttgcgtgcccgttttggaactcctgcctacgagctaggttgcggagtgtggtttgctcgttagagcttattttcggacatccaaaaaacatgcttcctatgtgggatgatggttatctttatatttgtatgttaattagtctctttgctgttaaatttcgtgtaagttggtcctgccgatggagaatcgagcagcccccttttttgttctatcaactatgctgtaatgctggctatgtatcggcaaaaacaattctatatgctgagttggagtcggcaaaaattcatatatgctgagttggagacagcaacttgtttggatcacag

SEQ ID NO: 27507 - DNA, 1084 bp, Zea mays
  Clone ID: LIB4732-006-E8_FLI
ctcgaggccggccgggcgacttatcctcgcatggctctccctcacactctcatccagccgccaccaggtgcagagtctttcgtcatctcttctccggcgaagaacccccagtcgcccaccagatcacttgttaaactttgttgaggggtgatggcggtttctttcgcaaacctcaactccgaggcagggcttaaaaagcttgatgagtaccttctcactcgcagctacatcactggctaccaagcttccaaggatgacttggctgtctacacttcgttttcggctgctccctcgtccaagtatatcaacgtagcaaggtggtttaaccacattgatgcgctcgtgaggctgagcggaattactgcagagggccaaggtgtgaaggttgaatcctcagcagttccttcagccccaactccagatgttgctgaagcacaggccccagctgctgaggaggaggacgatgatgatgttgacctttttggtgaggagaccgaagatgagaagaaggctgctgaagagcgtgctgcagctgccaaggcttctggcaagaagaaagaatctgggaagtcatcagttttacttgatgtgaagccatgggacgatgagactgacatggccaagctcgaggaagctgttaggagtgtccagatggaagggctgctctggggcgcatccaagcttgtcccagttggatatggtatcaagaagctgcaagtcatgatgaccatcgtcgacgaccttgtctcggtcgacactctcattgaggactatctgtgcgctgagccagtgaacgagtacgtgcagagctgcgacatagttgccttcaacaagatctaggcgtgacttccgatcagtccttcccctggggtgctggcgatggtggtggctgggcaatgcaccagcctaatttatccatagctatatgtctgctttgtgtggccagtgatattgccgtgagtatttttggatcctattcgagtcgaatgtaccagtaccagagttaatttgctttaattcgaaacaccgttccagttggaattctgttacccgtgttctttgcttgcagtacctctatttctct

SEQ ID NO: 27508 - DNA, 1305 bp, Zea mays
  Clone ID: LIB4732-006-G4_FLI
gccgggaatttcttggagcccagccgtgacgtgagaaatgattccaacgacaaagctagtcacatcatgagaaagagtgagggttctcatcaaatactctaccgcctgcaggtgcagaagattggaacaaggatagcctttcttcctgtgcagccactccagtgcacgccgccgcagcttgctacacgtgccgggcaagggcaatggattccagcagcagagtgatcgccttcgattgcagctccttcaaactctacatggacggccaagtcgagcgtgcggcccaacgcatggaaaccgtgcccgccggcttcgacgcggacacgggcgtggcatccaaagacgtcgacatcgacgccgccaccggcaccgccgtgcggctctacctaccaccagtccagggagccacgacgaagctcccagtcgtcgtcttcttccatggcggctacttcatcgtcggctcagcccgcgagcctatgtaccatcgctatgtcaactcgctggtcgccagagcacgcgtcgtcgctgtctccgtcgactaccgcctcgcgccagagcacccgctcccggcagcctacgacgactcctgggccgcgctcaagtgggcggtctccggcgcggaccagtggctgtccgaccacggcgacctcggccgcgtcttcctggtcggcatcagcgccggcggtaacattgcccacaacatggccgtctctgtgggcgtgagcggcttgccggccgctgaaccaccgcgcatagaaggcgtgatcctgctccacccttccttttccggcgaacagaagatggatgtagaagaagaggagttctggcgatctaacaatagcaggtgggcggtcatcttcccgggcgcgaccggcggggcggacgatccaaggattaacccgatggcggacggcgcgccgagcctggagaagctagtgggtgaaaggctgctcgtctgcacggcgtctttggacccgagggcgacgagggggaccggatactgcgaggccgtgcgggacagcgggtggcgcgggatggtggagtggttcgagacggaaggtgaggaccacggtttcttcgtcctcaaccccggcagccacaaggcggttgaggtcatggatcgagtggttgctttccttgcggaccagtgaggacctcctcagggcacagcaaggtctagcagctcgccgcaaaaccggacgtcctagctacggcgcagccgttctcaggcgattctttactgtctgtactcccaagagtgtcctagatgagttattggaataaacactacagtcaatccaaacc

SEQ ID NO: 27509 - DNA, 1247 bp, Zea mays
  Clone ID: LIB4732-006-G6_FLI
ccgggatcgcatacaggggcaagagtgtagtggcgtaggagcaaagttggtctctgatctttcccctgcaagggaaagagaagaacagagacgcaccagtgtatagggtttcggcttgcctgtgcgtgttactgtcgcaatggcaggaggtctcttctccatggagcacccatgggcctctgtttttggcattctaggccgacgttcctccgcgtgtaccggaagaagtcgacggaggggttcagctcggtgccgtacgtggtggctctgttcagctgcacgctgtggatcctgtacgcgctggtgaagaccaactccagcccgctgctcaccatcaacgccttcgggtgcgtggtggaggccgcctacatcctcctctacctcgtctacgcgccgcggggcgccaggctgagggcgctcgcctccttcctcctcctcgacgtggccgccttctcgctcgtcgccgtcgtcaccgtcgtgctcgtcgcggagccgcaccgcgtcagggtgctcggcagcgtctgcctcgccttctccatggccgtcttcgtcgcccccctgagcgtcatcttcgttgtgatcaggacgaagagtgccgagttcatgcccttcaccctctccttcttcctcaccctcagcgccgtcgcctggttcttgtacggcctcttcaccaaggacccctacgtcacgctcccgaacgtgggcggcttcttcttcgggtgcatccagatggtgctctactgctgctaccggaagcgcaagccggcgtccgtggtcgtcctgccgacgacgacggccgccgccgccgtggcacagcagctggaggcggagatggagctgcccctcgccgcccaccagcaccagctggccgtggccgtgctgcccacgtgcgcggccccggtgctggccgagctgcagaagctggaggaggcgatggggtcgccgcgcaagggcggcgtcaaggccatctgaccatggccttcgatgaaccgcgcgcgatgcatgcacatcatgtcctgctagtgctagctggatcagttgcgtgcttatttgattattgttatgcatggcttggtagatccgaattattaactgactgcaagtagacagacatatatatatgcgtgtgccttcttttctttactattatatatataatcgctcgtttgtgtgttcttaatcatatatatagctatatataagcttgcttgtattggagatggataaattaatctggtgggttgtac

SEQ ID NO: 27510 - DNA, 780 bp, Zea mays
  Clone ID: LIB4732-008-E9_FLI
ccggggctgcagcctgactgtctgttttcagcacccgcaccacctgactgtctgttcgcagcacccggacctgtgtcaatggccgctgcagccgccgctccagcatctgtggcgccgtcctcgcccaaggccgccggcgacaacaggaagacggtggtgtccgtggacgcgtcggagctggagaagcacgtcctagcggtggacgacagctctgtggaccgtgccgtgatcgccaggatcctgcgtggctccaggtacaaggtgaccgccgtggagtcagcgacgcgcgcgctggagctgctcgcgctaggcctgctccccgacgtcagcatgatcatcaccgactactggatgcccgggatgactgggtacgagctgctcaaacgcgtcaaggagtcggcggcgctcagaggcatccccgtcgtcatcatgtcatcggagaacgtgtccacccgtatcacccgctacctggaggagggcgccgagggcttcctcctcaagcccgtccgccccgccgacgtctcccgcctctgcagccggatccggtgactgcgtgtggtgctatgttaggagctaggatcctcaaccaaaaaaaaaaagattcctcttctttctttctttctctcctgcttggacatagatcttcaaacaaggagctaacatttggggggagactttttagctttagggatctcaacaagttgttcggaacgggggggatggagcacagcgttggctgttcttttctccattcctcttaataacatcaggtgtcaatgc

SEQ ID NO: 27511 - DNA, 307 bp, Zea mays
  Clone ID: LIB4732-008-F9_FLI
taccctcgaggccggccgggtgcggatcaaaaactataggccgtagaggagagagtcgctcagcactgcacgactcctcccccatctaccactacctgtctacctacccagcccatcgatcacccctcgcaacgcaatggcgctggccaccaactccgccgctgccgcagcagctgccgtatccggcggcgcggcatcccagccgcaccgcgcggccacgttcctcccgctgaagaggcgcaccatctccgccatccacgccgccgacccgtctaagaacaacgggcccgccgtccccgcggccctc

SEQ ID NO: 27512 - DNA, 956 bp, Zea mays
  Clone ID: LIB4732-008-H10_FLI
ctcgaggccggccgggaaactccgtttcgaattctagggttttgctgctctccgaccccgagctccgaaggccgcagcatcaggcgcggcccccctcgcgtgtgaccgagatggcgctgccgaatcaggggaccgttgattaccccagcttcaagctcgtcatcgtcggcgatggtggaactggtaaaactacatttgtgaagaggcatctcactggagagtttgagaagaaatatgaaccaaccattggtgtggaagttcatccgttggatttcaccactaactgtggtaagatcaggttctactgctgggataccgcagggcaagagaagtttggtggcctcagggatggatactatatccatggccagtgtgcgatcatcatgtttgatgtaacctcaaggcttacttacaagaatgttcctacatggcatagggacctgtgcagggtctgtgaaaacatccccattgtcctctgcggtaataaggttgatgtgaagaacaggcaggtcaaagccaagcaggttactttccacaggaagaagaatctgcagtactatgaaatttctgccaagagcaactacaactttgagaaacctttcctgtaccttgcaaggaagctggctggtgatccgaaccttcactttgttgaagctgttgctcttaagcctccggaagttaccgtcgacatggctatgcagcagcagcatgaagctgagcttgctgcagcagctgcacaacctcttcctgatgatgatgatgatctgattgagtagaaaggatcatgagtcttggacttgagcaggagttgtgccttgcacgatttaagttgttctagggtggactctctcttgagttatcattgtctggatcatctttttctccttggacttgttgcaacttttgagtgtggaaatggattggaatagtcgccatgaatttgctggctactttac

SEQ ID NO: 27513 - DNA, 1027 bp, Zea mays
  Clone ID: LIB4732-009-A1_FLI
ctcgaggccggccggaggaggcagtacgtactccgcaagcttctcagttcactctctagtctccaccgctccagagccccgagctgctataccgtacagccagtgcagaagcggatcggatcggagcgagatggccgcggccggtctgggcgtgaaggcgacgccgttcacgtacgcggcgcacgcgctggccgcggtggcggcggcgctggtgctggtgtggtgcgtccacttccgcggcggcctcgcgctcgaggcacagaacaagaacctcatcttcaacgttcatcctgttcttatgctgatcggctacatcatcctcggcagtgaagccattatgatctacaaggtgtttccgaacctgaaccacgacacggccaagctgacgcacctgatcctccacgccatcgcgaccgtgctcggtgccttgggcatctactgcgcgttcaagtaccacaacgacagcggcatcgccaacctctacagcctgcactcctggctcgggatcgggaccatcgctctgtacgccatccagtgggtgttcgggttcgtgaccttcttcctccccggcgcggcgcccggcgtgaggcgcggcgcgctgccctggcacgcgctcttcggcctcttcgtctacgttctggcgctggcgaccgcggagctcgggctcctggagaagctgaccttcctggagagcggggggctcgacaagtacggcgccgaggcgttcctggtcaacttcacggcgctcgtcgtcgtgctgctcggcgccttcgtcgtcgtctccgcggtcacgccggcgcacgccgaggaaccgcggggctacgccccgattccgatcagctaagagggggaggagttcgctgggcagtcagaagagggcagctgtgttttgtttttgaattgtaccatgacatatcaggcgtgtgcgtggctcacatccgggtttacttcaaggggaaagcggacgagagtacgcgacgggtttcggtctatgaatgaatacagcccaatgggccgcagcttttcc

SEQ ID NO: 27514 - DNA, 1296 bp, Zea mays
  Clone ID: LIB4732-009-C1_FLI
ctcgaggccggccgggctcagcccgtctcctttccaaatttttcacccggcgtctgctcgcctgcgagacgccgcgaccgcgatcaccctctcgggtttctcggacgcgccgccatcgccactccgccactcgcgggttcgttggatcgacgccaccgtcacctcgcgccgcccagaggaggacgcctgcttctcccccgacgccgacgacccccgccaccgtcttccgcgccaacgccgccgtcgccatcacctcgcgtcgcgccagacgcccaggtctccgccgacgctgtcacacgccaggagctcgagtcttcgtcggtccctttgccagatcttcatcgtgcccttcaccagcgacgagcacccaacagactactcctgctgtttcttattgccaataagcacaagcacacttgagaaccggccatcaccatggagacgagactctttatcgcccttcagtgcgtgcagtgcgccaccatgcaggtgaagcagcagaagaggagcagcaacaagtgggtgtgtgtggtgtgcaaccagcgtcagtctgtgcttcatgtccatgccaggggctatcgtgctgctgatctccgccgcttcgtccaggacaccaaccttgcccgtggccgccgggagttcgcaccgttggccgagcccgacgtggacagagatctggcggcagttgaggagggagatgtgttccctatcgagaagagtcagacggagtggtccgagtatctggacgatccaggggagacaggtaaaggttgtggtggccttggcgcagatgcttcagatggagaatcggatgaaggaattgaggtgataactgaactgcctcagaaaagacctaaagttaggcctcgcaaagcccaatcagatgtagtaggaaagagaaccaagctgtcaacacatcccactttatgtaataagaggcagcagatcaagcaaggatcaagtccccactgtgcaactactactgctgaagcacaaggatcaaaatggaccaagtatttggacacgagccgttttggtgggaggaaatgctccgatacctctggtctgcactggactgaacatgatgaatctgccactactgaggccactactgacgtagtggtggatgatgaggtgcaccctgatttcatctgatctcatgttggtttgaaatgccaaatgctttgtgttttggtagtgtgtagtttggtaggcataaaatgtgctgctggcagcacattgtcaagacaaaggatgtgcagtacttggtatccgagggaagaagactgttgttcc

SEQ ID NO: 27515 - DNA, 1773 bp, Zea mays
  Clone ID: LIB4732-009-E9_FLI
ctcgaggccggccgggacttctcgtcccaactcccaagttgcaacccagccacctcgtctcctcccctccaactccaagcctactcccacccgatcccccctgccccgcccccggcgccgccggttctcgcattcgcggcagtccatctcgctgccccttcccggcggcctctgatccgtgctgctcgtcgcccacgcgaaacctgccgcctcccttgttgccgcgaccgcgagccctcttccctcccctcgcggccctgatctcagttccactgtgccccgaccgtgatccgtccgcacccgcttcatgcccagcagcgttcaatccgtcccctaatgccgctgcctccaaatagttctccgtgtgctggttcttgcggattgcgctgtcaggtccacataatattggggacggtgcagagtgtcctccgttttttcctctctcgcacctaaagttttcgggagcagttagttagagtatattcgattccccctgatatagtttgtttatttcacactacgaagtctatgcactcgagagaaaaatcactggtagcgacggcatcaattcttgtgacgtttagtggctagaacaccctcactagcgctcattcatgtttacccgaccttgtccttttcccttccgccttccgtgtgctggtatcaatttgttgtaatttggggaggccaggagttttctcgccttcttgcccttgttctgcccgtagtaagtgcttgccgtttggttgattggaactcccaagtgttcgtcggtcacatttatatagctttacctcactaggataatcataagcaaggtttccccaaaattcttagaccagttgggatcaggacccgaaggtagattgtgttggctatttgccggtagggcattgtgactccgtgatgtcttgcacctctccagatccaccagactactgctcagccgaatcgcctgagctcaagctgtaccaggccttcatcttctcggtgcctgtcttcttcacattcgtcttgcttctcttcttctacctcttctacttgaggcggcgcagggccaattggcagtccttgcggatgaggacaaataatttgatacgaggagataatgccagactggagtgtggcttaaagaaggagatgcgggaaatgttgccagttgttatcttcaaagagagtttcttgatcagggagacacagtgctcggtctgcctagcagaatacgaaccggacgagaggcttcagaagatacctccctgtgggcataccttccacatcaactgcatcgaccactggctctccacaaacaccacctgccccctctgccgagtatcgctccttcccgcccccaaggcaaccagcaccggactggatctggaagcacagactgtggtagaagaggagtccccgaacgcacatcatcgccaggaggagggactagttgatgccaacacaccacaggaaggtgaggcggccggaggtgacggagcaagtagcgtccagattgaagaaccgcaccgcgatgcggccgagccactggtggtgacggtggtcgctgtcgctgcacctcaggctgacgctgaaggttcaccgagtacagcatgccaaactgttaaagggaagaaataaggatagcctagcccatcgatgtatttctattaccaatgtgtgtttagctgggaaaggaaaaaaacgcataaagatggggccattgatgttatgattgccatttttctggggaggaagaagaagagcaagagttcagttgtgggg

SEQ ID NO: 27516 - DNA, 902 bp, Zea mays
  Clone ID: LIB4732-011-F8_FLI
ccgggagtgagagataagaaatggaatacccatttcgaagcccaccgaattccctgcgattcctctcccctcgcctcctcgtctccccctagggttagcacctcgctgcctccgattcaatcataatatgggatcgtcggagaggaatcgcaaagagggccgtctcatccgagttaaggaagccatggagcacaaggaggctgggtgccaggcccccgagggacccatcctctgcatcaataactgtggcttcttcggcagcgcggcgaccatgaacatgtgctccaagtgccacaaggagatgataacgaagcaggatcaggccaagctggctgcctcctctatcgacagcatcgtgaacggcagcgacgccgtcatggagccggttgttgctggcagcaacacggtagtagctgttgcccaagttgagttgcaaacaatgaacgtgcagcagcccgctgatgttgccggacccagcgagggggtggcggcgatctccaaaggggggaaggtagggccgaaccggtgcagcgcctgcaggaagagggttggacttacgggattcaactgccggtgtgggaacttgtactgcgcactccaccgctactccgacaagcacgactgcaagttcgactaccggactgccgccagggacgccattgccaaggctaatccggtggtgaaggcagacaagctcgacaagatctagggggggttccctacggttgggtatcaggaagattgtaaaccgcggtaactcgtcatgcggaactgctgccttgccccccgcgcctttctcttccatgtttgctgctacaatcttgttgttgggcattgcagtgcacggtgcacacttgtgtagcccgcctcgagaattcctgcctctgcatctggtcagttct

SEQ ID NO: 27517 - DNA, 1109 bp, Zea mays
  Clone ID: LIB4732-014-B6_FLI
ctcgaggccggccgggagccacaacacatcccacaaccattattcctgttccactgcatcaggtcgtccaactctccaagcggcaagcgccatgccttcttccgcgcaggttctgctctgcctcgccgccgtgctcgcggcggcggcggccaccaccgccgacgcgcactcgcagtgcctggacaacccgccagaccggtccatccacggccgccagctggccgaggccggcgaggtcgtccacgacctccccggtggcctcagggcctacgtcagcggcgccgcgagctcgagccgcgccgtcgtcctcgcctccgacgtcttcgggtacgaggcgccattgctcagacagatagcagacaaggttgcaaaggcagggtacttcgtcgtcgtgcccgatttcttgaagggagactacttagacgacaagaaaaacttcacggaatggctcgaggctcactctccggtgaaagctgcggaagacgctaagccactgttcgccgctttgaagaaggaagggaagtccgtcgcggtgggaggctactgctggggagggaagctgagcgtggaggtggggaagaccagcgacgtcaaagctgtgtgcctttcgcacccgtacagcgtcactgccgacgacatgaaagaggtgaaatggccgatcgagatcctgggggcccagaacgacacgaccacgctgccgaaagaagtgtaccggttcgtgcatgtgctgcgtgaaagacacgaggttccctactacgccaagatcttccagggagtcgagcacgggttcgcctgcaggtacaacaccaccgaccctttcgccgtcaagaccgcagagacggccctcgcctacatggtcaactggttcaacaagcacctcaactgaatcaagcctgcactgcacccaccagactgaattcaataaaccactgcagtgctgtgatattttgtttcgattcatggctccccagattgatttgtcatggctaagacctctactactgtaatttccttcattttttgtctcttcaaactctctgtattcttttttttttgctttttatgatcgcaataaagttcagtaggggtatacccctcctgtttgctcc

SEQ ID NO: 27518 - DNA, 662 bp, Zea mays
  Clone ID: LIB4732-015-C4_FLI
ctcgaggccggccgggccatagaaatcgaccgagcgaatccctcgcatcgcattcgcagcctttgctgcatcacaccaccgcgaaaccccagcagccgcatcgatggcgcccaaggcggagaagaagccggctgcgaagaagccagcggaggaggagcccgctgccgcgaaggccccggcggggaagaagcccaaggccgagaagcgcctcccggcggccaagtcgtccggcaaagaaggcggcgacaagaagggtaagaagaaggcgaagaagtcggtggagacctacaagatctacatcttcaaggtgctgaagcaggtccaccccgacatcggcatctcttccaaggccatgtccatcatgaactccttcatcaacgacatcttcgagaagctcgccggcgaggctgccaagcttgcgcgctacaacaagaagcccaagcacgcggtctccgagggcaccaaggccgtcactaagttcacatcatcttagatttgaggtagtagctattgggtggcgttggtagttgtgtctcaatttgtctgctactaatagtggtaggagtatccatgtgtagttgggttgtggtaagaattgtgttaaactggtaatacgtttgaaattgctttttatggatgtggaatagttgtgttgcttgtct

SEQ ID NO: 27519 - DNA, 810 bp, Zea mays
  Clone ID: LIB4732-015-D9_FLI
ctcgaggccggccgggatcaccacaacacacaaagacagctcagagcaggtcacacacaggctcctctcccccgttgcgcaacgcgctttcccccacttcacccgcctcggcgccatggctaagctcgcgctggcgctcctcctcctgctggccgtggcggcgtccgcgtcggccagcagcgggagccacctggatctcgacctgggcttcctctcctctggggaccgccggagggagtgccgcgggacggtggccgagtgcctcgccgaggagtcggatgaggagggccttgacctggccggatcccaccgccgcgcgctctacggcggcgggtacatcagctacggcgcgctgcggcgggacaacgtgccctgctcccgccgcggcgccagctactacaactgccgccccggcggccaggccaacccctaccaccgcggctgctcccgcatcacccgctgccgcggctgaggcggctccggatccgcccgactgccgaggaaaggtctggttggtcaaggtcccggtcctttcgccgacaataatttctttcgccttgttcgttcaggcgctaccgccaccgccactgctgtttactatagcaccagacctacggattgaattgttgtatggatttgtttggccaaatctttgttctgttgtaaagtaaggggagggattcctgcccctgcgcctgcttaaaatacttatatgaacatatcagtctttcttgtttttttctctctctctctcccattgcttgattggttggttctcgtatgtcctgcttgatttgaattgattgttac

SEQ ID NO: 27520 - DNA, 1180 bp, Zea mays
  Clone ID: LIB4732-016-B7_FLI
ctcgaggccggccgggaaggggcattcagtgattcagccgccagtcccgctcgtctctgccaagtcccgcgcgctcgagagcatcgatcagccgctggcgccgcgacgagcgacgacgccgcgccagtcgcagatggccaccgtctcgctcctgcgagccgcggcgctcgggatggttgtcctcgcgtcggcgctgccgtcggctcggccgtggagcaaggagggtcacatgctcacatgccaaatcgcgcagggtctgctggagcctgacgccgcgcacgccgtgcggaacctgctcccggacgacgccggcggcgacctgtcggcgctgtgcgtgtggccggaccaggtgaggcactggtacaggtacatgtggacgggcccgctccacttcatcgacacccctgacgaggcctgcagcttcgactactcgagggactgccacggccccgacggcgccaaggacatgtgcgtcgccggcgccatcgccaacttcacgtcccagctgctgcactacaggcacggcagcgccgacaggagatacaacctgactgaagcccttctgttcctgtcgcacttcatgggagatgttcatcagccaatgcacgtggggttcaccagcgaccaaggcggcaactccatagagctgcggtggttccggcacaaatccaacctccaccacgtgtgggacagggagatcatacagacggctctcgccgacttctacggcaaggacatggacgccttccgcaagcagctcgagcacaacctcaccaagggtacctggtccgacgatgtatcggcttggacagactgccaagacctctcgtcttgcccaaccaagtacgcgaccgagagcataggcctggcgtgcaaatgggcgtacagcggcgtccgcgaaggggagacactgtccgacgactactttgactcgaggctgccgatcgtgtcgcggcggatcgcgcagggcggggtgcggctggccatgttcctcaaccggatcttcggcgcgcacaaccgcgacgtgccgccgccgtcttcttgattgatggatggacccgatcccgatctgcctgtcgcgtcacagactcgaagtctaatctaatccatgtggttgtagtgtctttgcttctttttaagtaaataagtaattcataattggcagcagctcgtgtcgtgc

SEQ ID NO: 27521 - DNA, 1592 bp, Zea mays
  Clone ID: LIB4732-016-C10_FLI
ccggccggggcaacccccgtccctctcccgtccgtcgtcatctatctgctcctcactccccgctccactggcgagatggggagaggcttgggcgccgctcccgtctcgccgcgcctcgctagtctcggggcagcggcgctggcgctgctcgtggcggcggcgctgccttccccagcagctggggtcaacgcgacggcggtgctctcggcgttccccaacttcgccgacttcgcgcggctgctggcgtccactcccgtggccagcgagctggccgggaggtcgtccctgacgctcctggccgtgccgaacgccaacctgccgcagtcaccctcggctttcgtagccggcgccgccgccggcgccgacatcgccgacgtgctgaggtaccacgtcctgctggagtacctctccccggccgacctcgcccgcctccctccctccgggaagctcgtgacgacgctgttccagaccacgggccgcgcgccctccgacttcggcgccgtcaacctcaccgtggggcccaactccaccgtcgtggtccgctcgcctgcgccgtccccgggatcgagcgccacggtcctcggcgccgtgaccgcggtcccgtacaatctcagcgtgctcgcggtgggtggccttatcgtaccctccggattcgacctcgcggcctccgagagccgcccgccaccgccggtgaacatcacccgggttctcaccgacgcgcgtgggttctacgtggcggcctccatgctgcaggcttccggtgtagcgagcgagtttgaggccgacgagcgcggtgctggcatcaccgtcttcgtccccaccgacgacgcctttgccggcctccccaccaccgaccgcctccagtcactacccgctgagcgcaaggccgtcgtgctccgcttccatgtgctgcactcttactacccgctgggctccctcgagtccatcgtgaaccctgtccaacccactctcgccacagagcacaccgaggctggccacttcaccctaaacataacccgcgtcaatggctccattgccattgacacgggcatcgtgcaggcatccatcacccgcacagtgttcgaccagaaccctgtggcggtctttgccgtctccaaggttctactgcccaaggaaatgttcagccggggcgattctggcagcaccgccatggtaccaccttcggttgcgatggcgcccggcgacgccgggaccgagcagacaccacagacgaggctctcatccccgcctgatctccacggggaagatagcgagtcgtcagctgctttggcgacagcaaaggggacttcttggtggtgtgtaggactcatgtatctgcatctattactatctctggtatgagattctggtcgtgcttgttgctttcttgcttccttgtgctcagtttttgtatttcttactgtctagaacgtctacaccgggagggagggattggggagagaatttcgtagattcaaagtagcaaaaaaaaatttagttgcttcacctgattattctaatttctttccattttgtcatgtggcgaagggaaataatgtcatgtgtacaaatctatgcagtccttttgctcg

SEQ ID NO: 27522 - DNA, 1200 bp, Zea mays
  Clone ID: LIB4732-016-D5_FLI
ccgggacaagctcgaccaccaacccagctcgctcgtcccagctgatcaggtcgagcacctagtagcgacctgctcgatcatcagtgtagagtgtcggtaggtgtctgtctctcttggtggctggttgcaacggtcatggcgacgtcgtctcgtcgggtgcccttgctgctgctgtgcctgggcgtgctggtgtcctgctccttcgcggcgggcagcttggaccaggagctggacatcacgtggggcgacgggcggggcaaggtccttgacaacgggcggctgctgacgctgtcgctggaccgcacgtccggctccgggttccagtcccggcacgagtacctgttcggcaagatcgacatgcagctgcggctggtgccgggcaactccgccggcaccgtcaccgcctactacctgtcgtcgcagggcggcgcgcacgacgagatcgacttcgagttcctgggcaacgtgtccggcgagccctacacgctgcacaccaacgtgttcacgcgggggcaggggcagcgggagcagcagttccgcctctggttcgaccccaccgccgacttccacacctactccatcctctggaaccccaagcacgtcatcttcatggtggacgacatgcccatcagggacttccgcaacctggagagcaagggggtggcgttccccaagagccagccgatgcggctctactccagcctgtggaacgcggacgactgggcgacgcagggcgggcgcgtcaagacggactggtcccacgcccccttctccgcctcctaccgcgggttcaaggccgacgcctgcgtcgccgtcgcgggcggccggacccgctgcggcgccaccgtcggcaccgagggcaccggcgcccccgcctccgccgccggcgccggggactggtacaaccaggagctggacctcaccctgcagcagcggatgcgctgggtgcagcgcaagtacatgatctacaactactgcaccgaccccaagcgctaccagcagggcctccccgccgagtgctccatgcagtagcgcccggttattcctcgcccgtccaacaatggcgcgcgcgcgcgtgtgtgtgcatgtggtccgctctactgctaccgctacgacgatcggtgtcgatcaccggatcaaggcaagacgaaaggcatcgaaacatggtagataaataaaggacttgacgatttgtaacac

SEQ ID NO: 27523 - DNA, 724 bp, Zea mays
  Clone ID: LIB4732-016-D7_FLI
cgccgccagcatcaagctccctgctccccgaccaaaccctacctgtacccgccgccgccgcagcagcagcagcagccatgccgcccaaattggacccctctcaggtggtggaggtcttcgtccgcgtgacgggaggcgaggtcggcgcggcgtcgtcgctggcccccaagatcggcccgctcggtctctccccgaagaagatcggtgaggactggaagggcctccgcgtcaccgtcaagctcaccgtgcagaaccggcaggccaaggtctccgtcgtcccctccgccgcggcgctcgtcatcaaggcgctcaaggaacccgagagggacaggaagaaggtcaagaacatcaagcacagcggcaacatcagcctcgacgacgtcatcgagatcgccaagaccatgcggaacaggtccatggccaaggagttggccgggaccgtcaaggagatcctggggacctgcgtcagcgtcgggtgcaccgtcgatgggaaggaccccaaggacttgcagcaggagatcgatgatggtgaggtcgagatcccatcagcttaaaggctatacaactagaaatcatcggacactatcaaagtggtgttttgttccaaatgcagttcctgcacctcaatcgcctattattgtctgctttagttcccttaagtcttgtgagagacctaatcagtaccttctgcctgataaaattacatcttccgattttctgtccg

SEQ ID NO: 27524 - DNA, 1556 bp, Zea mays
  Clone ID: LIB4732-016-E2_FLI
ctcgaggccggccgggtactagcacaagaagaaaccgtaccacttcatcaggccaaatcgccagcaatccaccatggctaaaccagaggggccaaccattggcgtgaagctgttcgtggacaaagagaagaagaaggtgctctttgctgagtccgacaaggagttcgtcgatgtgctcttcagcttcctcaccatgccgctcggcaccatcgtccgcctgctggacaagcagtctcagatggggtgtctcgaccagctgtacaagagcgtggaggacctcaacttggagtacttccaaaccagtgcttgcaaggcgatgcttctgaaaccgctcaacgcggcttccggccactgctgccgcctcaagatcaacgttgatggaagctttccaagggtggtctatgtctgcaaggacacgtcgtgcagcgcactcagcgacaacgcgtttagttcgttccctggcacggtctgcaaatgtggtaaggtcatggagttcgttgggcggtgcccaaaatacgatggtgacactgaaaccgccgccgccgcttgttcagaggatggagtttttgtgataggttgcttgaagtttatcgtcaccgatgatctccaggttgcgccagcatctacctctcttatgatgtctttcttcgagaaatttggtgtgcttgatccagctgtcctagagcagcaggttctgcagttcagttctgaaaagataaaatgcttgttgaagagattgttgacgtccaagcaacctctcactgatcattatttcgaagctcttgttccacaagatgatgcaagcctagaagcgcttgttcagaacttacatcctaaacaagaaaacgaggaccaggaaatgccaggaaaccagaagatcagggttcttcagacgaaggacaactctgccctgctgtatgatgaagttggtgtcgattttgtggactctctcttcggcttattaagcattccactgggatcggcaattaagttatattgccagtgctcggcaaaaggctgcctcggtaatgcttacaggagcatagatggtagtgtcaaagaattcgtcagagaggagtgccagagtctccttctggacccaaaggtaccacccttctttggttgctgcgcttctaagatccttcaggttgacgaattagctccgagagaactgacgatggaagcctgctttgtttgcttcaagagtctatggttttcaggttgtaaccgttctcacgagttcgcttattctttgcgatgcaatgaagttttttgcgcgaataaggtgaagtccattaaactttgtgaggcgaacccaaaacgacaaaacggcggaagcgggcagacgaattttgtggtgaaagaaatcaaactaaaggttatggagctacagagggctgtccttgtgctgagtcgcaatatactcagctctgtgcttctgcatcctaagaagaccaagaagctgcaccattaccgtcgcatgtaatagtcgtcgttgttgctttactctataattagccccaataataacaatctatgtctgtgttttcctgctg

SEQ ID NO: 27525 - DNA, 732 bp, Zea mays
  Clone ID: LIB4732-016-F3_FLI
ccgggcttgctcgctgcgccgccgcctccgacatcgtcccttcgtccccacgagcaaccgataatccgccgggatgttggtttatcaggatctcctatctggcgacgagctcctgtcggattcattcacctacaaggagctcgagaacggcgtcctgtgggaggtcgagggaaagtgggtcacccaaggtcctgttgatgtagacattggtgccaatccatctgctgagggtggtgaggatgaaagcgttgatgacacagccgtgaaggtggttgatattgttgacacattccgtctacaggagcaacctccttttgacaagaaatcatttgtctcttacataaaaaaatacatcaagaatctcactgctgtgttggagccagagaaagcggatgagttcaaaaagggtgtcgagggtgcaaccaagtttctccttagcaagctgaaggaccttcaattttttgttggtgagagcatgaaggacgaagcttccgtggtattcgcctattacaaggatggtgccactaatccgacattcctctatttctctcatggtcttaaggagatcaagtgctagattagttacccatgttgggtactatatatgttctattgttatagccacaactatagctgtcctgcctgaactgaactcaggttttttttaagaaaaaactgtccaagattggattgcttgttaaagctaaatattgttattgacgtgttattgcg

SEQ ID NO: 27526 - DNA, 1062 bp, Zea mays
  Clone ID: LIB4732-016-G4_FLI
ccgggattaaatcgcccacaattccctgtcctccgcggctccgcctcgatacggccgtctcctccccgctttgctccccacgaagcaattctaaatcctcgcgcagaagatcgtatcctccgtcggatccgcatcggtgcttgccctccctgctcggatttctggcagccctttcctaccccctgaattcctgtgcggattccctcccctgccctggcggttgctcctgttgcctggtgggaacttgagaggaggggttggtgggggtggaaggcgctcgtgacccggcccgtggagatggctggcgtgaaggagccgatcgaggtgaagttccggctgtccgacggcaccgacatcgggcccagcaagtacgatcccaacaccaccgtcgccgcgctcaaggagttcgtcctcgcccggtggccgcaggataaagaaatagctccaaaaactgtcaatgatgtgaagctcatcaatgttggaaggatactggagaatagcaaaactcttgctgaatctcgtgtcccagttggagaagttcctggaagtgtgattacaatgcatgttattgtgcggcctccccaatctaaaaacagtgagaagcaacagtcaaactctccgaagccaaacagatgtggatgcacgatattgtgacgttgatgcaagtagcaatgtgtatatcggtgtccacagagatcaatcacaagttcatttagcaattgattcaatctattcttcacaaccctgaagttcatttagagatggtgttacggccagtcacatatctggcttgagaaattgatgcttgcggtcgtgttcgagtgtgcaaggagttcacagggtcctggtaaaaccctgaaatcggtgtggactcaaggaattggatgtttgctattctgtaatgtgtggagacagtgataccagaagtgagttgctgcatagttacatcggagacaattcttttttcgtaactcggttgcgtgtatcagtatttctgttttgtaatagaaaaaggttgaccggctattgtcggcataaagtggtaaggaatgggggtcccct

SEQ ID NO: 27527 - DNA, 911 bp, Zea mays
  Clone ID: LIB4732-016-H8_FLI
ccggatgcccagttctccctgtccaccggccgccgcacttgctcgaccgccgccgccgccgtgcgcttaatcttacccctgtctgtctcctcatccagtgcaaggaacgcccaccgctgcctgtgtcgtttggtcaccggagatggatggggatgaggagaacgtcgggccgttccgccggactagcgcgcgcacgcgccgcatggccacgcgcatggcgtccgcgctcgccagctcggacaatcgcgaccaggctgcattagctcgccttgaagctcttgagagcgataatggtggggtcgaggtggtagatcttaatgatgatgagtacggatccacggatgaagaagaccctgttctcatgcaaaaaaagcagtccaagatcatgaaacgtaaaacaaggcaagggaaagctttggagaagagggcagcaagatcactcatggatgtgctacaagaagcaaatttggagtccgttcctcctcatgtgccaacatattcaagggctgctgtgggtccaccgagcacttcatctcgacgccactactgctcagtttgcggtagctctgcaacctacacatgcgtgaggtgtgggacacggttctgttcatgccgctgtcaagtcatacacaatgatacacgctgcctgaagtttgtggcttgatcggctggatatgtataagctacatttgatgtatgtccacatcctaatggctgttcatatgtgctctgatcagtatgatatacttgctgactatgtatcctactctgtaggtgggggtgggtaagttgtagaaaaccattttctcagtagtgtactgcagttgcaccgaccacttttgtttttttttcccagaaatgttgtgcgagcttgcagttatgcagtagagctgaaagtagctcttggttcc

SEQ ID NO: 27528 - DNA, 972 bp, Zea mays
  Clone ID: LIB4732-016-H9_FLI
ctcgaggccggccgggatggcaacaagctcgccacttccctcctcgccacggccgtcctcctcatggcgctcgccgccccctcactggccggcgaccccgacatgctccaggacatctgcgtcgccgactacaaatccctcaagggcccactgcggctgaacggattcccgtgcaagaggccggagaacgtgacggcttgcgacttcttctccggcgcgctggcgagcgccggcaacacggccaacgcgctggggtccgcggtgacggcggcgagcgcggacacgcttccggggctgaacacgctgggcgtgtcgctgtcgcgcatcgactacgcgccgtggggcgtgaacccgccgcacgtccacccgcgcgccaccgaggtcatcttcgtcctccagggctccctcgacgtcggcttcgtcgccgccgccagcaaccgcctgtacgcgcgcaccgtcagcgccggcgatgtcttcgtcttcccccgcggcctcgtccactaccagaggaacaggggcggcgaccccgccgtcgccctctccgccttcgacagtcagctgccaggcacgcagcccgtcgccgaggccctcttcggctcgtcgccgcccgtgcccaccgacgtgctcgccaggagcttccacgtcgacggaggactcgtggaggccatcaggtccaagttcccgcccaagtagaagtagaccttgccactgccatgctcatgcaatgcaagcgccacgtacgtacgtgtacgtattatatatacgtacgctggtatcaataacaatcgaggcgtggtttaattgaacaagcactgtcgctttgtatgatgtgtaaggtggtgtgtttctgtcgacgtgcaaatccagagtaatgagtgtcctgattacattaattgttgcctggattaatactgttgctcttgcaccatagtcccttcgatccaaattacacttcctttcaatttaaaaaag

SEQ ID NO: 27529 - DNA, 849 bp, Zea mays
  Clone ID: LIB4732-017-A11_FLI
aggccacttaccagcagtcaccactcccaagccagtaccgagtcctacgtacgagcagtcgcacgcaagtgtcaagagacgaaacggtcgacatggctcgcacgcaatctgccgtagcggtcgccgtggtggccgcggtgctgctgctggcagcggcggcgacgacctcggaggccgccatcacctgcgggcaggtgagctccgccatcgcgccctgcctctcctacgcccgcggcacggggtccggcccctccgcgtcctgctgtagcggcgtcaggaacctcaagagcgccgccagcaccgccgccgacaggcgcgccgcctgcaactgcctcaagaacgccgccaggggcgtcagcggcctcaacgccggcaacgccgccagcatcccctccaagtgcggcgtcagcatcccctacaccatcagcacctccaccgactgctccagggtgaactaaaacctagaccacgcgcgacgacggccgcctgatcgatcgaccaaccattccgccgtcgccgccggccggatcatcgatcgtcgtcatgatgatatctatcaatctacgcgtgatgatcgatggctacttgtctactgctatgtactactaaataaaatctctccgtgtgtgcacgtacgcttgcatgtgcatggtagcatgtatgtacgacgtcgtccatgtatgtgtgtgtgacgtgtgagacagagagagagagagagagagagagagacaggatcgatcgagagacggtcatgtccttttggctgtttggtttattcatatcacaacttttgagtgtatacaagattattggaaaaaaaaaaaaaaaaaagcggccctctttttttat

SEQ ID NO: 27530 - DNA, 714 bp, Zea mays
  Clone ID: LIB4732-017-C3_FLI
ctcgaggccggccgggctgattttttgttcccttcaccgacggcgaggagtgagggttgacaacgggatggcgcggagcgtatcgtacgtttcggcggcgaagctggtatccatggcgcgaggcaatccccgcctcgccatcatcgacgtcagggatgaggagaggagctaccaggctcacatcgcgggttcgcaccacttcgccagcggcagcttcgaggcgcggatgccggagctggtgcgggccgccagcggcaaggacaccctcgttttccactgcgcgctgagccaggtacgaggtccaacttgtgctcggatgttctcagactatctatcggagaccaaggaggattcagggataaagaacatcatggtactggagcgcgggtttaacggatgggaggtttcagggcagcctgtctgcagctgcaccgacgctcattgcaaagggacgtgttcttaagcacacgagtttatatctctcttaggccttgaacaaccaaggatcggcatggtctccgtttctcttgtcggtggttacttcacctcattaaaactcattaaaatgattgacacgcgacagattattgggttggcaactcctttgtgggaactgcatgcataactaccaccagaccactgtcagacataagacacttcacggtgtactgccaggtggcagtattcgtttcagaattcacagttttttgctgt

SEQ ID NO: 27531 - DNA, 1373 bp, Zea mays
  Clone ID: LIB4732-017-D6_FLI
ccgggacaagctcgaccaccaacccagctcgctcgtcccagctgatcaggtcgagcacctagtagcgacctgctcgatcatcagtgtagagtgtcggtaggtgtctgtctctcttggtggctggttgcaacggtcatggcgacgtcgtctcgtcgggtgcccttgctgctgctgtgcctgggcgtgctggtgtcctgctccttcgcggcgggcagcttggaccaggagctggacatcacgtggggcgacgggcggggcaaggtccttgacaacgggcggctgctgacgctgtcgctggaccgcacgtccggctccgggttccagtcccggcacgagtacctgttcggcaagatcgacatgcagctgcggctggtgccgggcaactccgccggcaccgtcaccgcctactacctgtcgtcgcagggcggcgcgcacgacgagatcgacttcgagttcctgggcaacgtgtccggcgagccctacacgctgcacaccaacgtgttcacgcgggggcaggggcagcgggagcagcagttccgcctctggttcgaccccaccgccgacttccacacctactccatcctctggaaccccaagcacgtcatcttcatggtggacgacatgcccatcagggacttccgcaacctggagagcaagggggtggcgttccccaagagccagccgatgcggctctactccagcctgtggaacgcggacgactgggcgacgcagggcgggcgcgtcaagacggactggtcccacgcccccttctccgcctcctaccgcgggttcaaggccgacgcctgcgtcgccgtcgcgggcggccggacccgctgcggcgccaccgtcggcaccgagggcaccggcgcccccgcctccgccgccggcgccggggactggtacaaccaggagctggacctcaccctgcagcagcggatgcgctgggtgcagcgcaagtacatgatctacaactactgcaccgaccccaagcgctaccagcagggcctccccgccgagtgctccatgcagtagcgcccggttattcctcgcccgtccaacaatggcgcgcgcgcgcgtgtgtgtgcatgtggtccgctctactgctaccgctacgacgatcggtgtcgatcaccggatcaaggcaagacgaaaggcatcgaaacatggtagataaataaaggacttgacgatttgtaacgcagtagctggtgcgtgcgtggtgtggtggtaagaaattcttctgctgcctgtgttcttgtagcctcctcgtcctcgcccaccctgttggtacgtgtacggtgtacgtagtctgccgccgcgcgctgttcgtgttcgtcgtgtctcgtgtctgtattatactcgtcctccccatc

SEQ ID NO: 27532 - DNA, 782 bp, Zea mays
  Clone ID: LIB4732-017-H11_FLI
ctcgaggccggccggggttttcgtatatatccccggcctttttggcaagcatggatgccttggctgcctgcacagtgccgcacagagagcaagcatagcatggccatggcccaagctcgcgtcgttgctctggctctgtgcgccctgctccttgtctccggcgtggcccggagagccgaggctgtctcgtacaacgtcggcaacagcgcggggtgggatctcagcgccgacttgccgtcgtggcccgacggcaaaaccttcaacgtcggcgacgttctagtgttccagtactccagctaccacaccctggacgaagtcgacgaggccgggttcaacaactgcagcgccgcgagcgcgctcctgtcgcggagcgacggcaacacgacggtgccgctgacggcgcccggcgaccggtacttcatctgcggcagccagctgcactgcctgggcgggatgaagctgcacgtgctcgtcagccagccggcgggaggagctccggcggaggccacgccgcagtccacgccgcagacgggctccggggccgcccttgggcccagcaccgacgacgcgggcataccctggctcgttctcggcgggtcccaccgagctacggtgggctccatgctgctgacgtggctgttcgtagccgcaactctgctgcttgtatgaggattgcagaagaggtgttttgatttgttttttttactaagcacggtttgatttgatctttgtaaaaatagattgtgaaccaacgaatccgagcatcgagatcgagacgcact

SEQ ID NO: 27533 - DNA, 965 bp, Zea mays
  Clone ID: LIB4732-018-A6_FLI
ctcgaggccggccgggatccgaatccctgtcccttcgcccttcccctccggccgcagccccttccctgccgctccggcctcctccgtcgggaccgccgacgacgcgccgcgcggaagcctgcggggatattgggtaagcagttgtgatcctgttctcttgctcggatgccgggttactatgacatcgatgacatcctcatggaggatgagcctatttcagttgttttccaagtaagtgcaaatggtgttggcctgctagatcctggtgctgaaagtaactgtgtagagaagggcgccaaggtggacctcccattttggcttgcgcatgggctgctgtctctggaacaagctgtgtcaataaacccacctccatgcttcacacagaaaacttggaaggagatccaagctgatgcggcctgtgtggatttgagggttcgttgcccgtacttttatgagctaggatgcaagattgttcctttggtgagtgacaagagcattggcctgttcttgcgatatgcattcaccagtaggtacaaagaggttctaagtaagtcccacagttcttccatgatgacagtgcccaagttcgttccacaccttacaaaagaagaaactcgggtgtttgaatctgccagagaatcgatgactggtttcaagaaatggcgagcaggtgggatgagactgcaaaaggcttccattcttggccggaagaggaagacaaagctgcctgaatgagttttaaggtgatgtgcgctgctttgatttgctagcaccgtgagcaaagagaaaagtgaatggcagattaaatctggatgtactatgatctgctgtacattgtgcacttgtggacagcagctctgatcagtccgtcctttgtaaggaaaatgaacactgtcttaaatcatgatatcctgtttggagcaggtgtcatgattttcagcagggtatcttgaatgagtttgaat

SEQ ID NO: 27534 - DNA, 939 bp, Zea mays
  Clone ID: LIB4732-018-F11_FLI
tcgaggccggccgggggtcaactatagctgtggaggatcggggtgaaatgttgatgatgtgacctctcgtcctctctgcgccgacccggctcttctcccccaacacaatcctccttccccgatccagtctcgcggtcgcggccacgctgagggagagcgagaagagacagacacagatcgcgcgctgagatgtcgtcggactcgtcgtcgtgggcgcgcgccctggtgcagatctcgccatataccttctccgcaatcggtatcgccgtctccatcggcgtctccgtcctcggcgcggcatggggtatcttcatcacggggagcagcctcatcggggccgccatcaaggcgcccaggatcacttctaagaacctcatcagtgtcatcttctgtgaggctgtcgcaatttatggcgtaattgtggcaatcatcctccagacaaagcttgaaagtgtgccaacatctcaaatgtatgatccggagtctcttcgagctggctatgcaatctttgcatctggccttatcgttggctttgctaatcttgtttgcggggtatgcgtggggataattggaagcagctgcgcactgtctgatgctcagaactcatcactcttcgtaaagattttggtgattgagatcttcggcagcgctctgggactgttcggtgtcattgtgggcatcattatgtcatctcaagcgacatggccagcaaaagcttgattttcaccattagtagctctgtaaattattcggatggaatgtatcgaaatgtgcatgtggtccaactgcattttcctgttccttttctgtggcgacttttttggcagaacgcgaaatgcggcgcgcgtagcgccaccgattgtagagttgctattcctactgccggagtactccatgtgtgttgggtatcttgttggcatattaaataaatgcttggac

SEQ ID NO: 27535 - DNA, 997 bp, Zea mays
  Clone ID: LIB4732-018-G3_FLI
ctcgaggccggccgggacactctccttttgtcaccttctcttcgttcccctcctcggctcctcgcgatccttctttactgcccaagagttctgactagccacatccagtcaagcagtaaaggcgcaccatggaggcggcggcggagaataaggaggccgagcaggaggagcagcagctaccgcacgcgcagaaggataacgcgcccgccgccgccgaggaagacgaagcggattcggaggagaccgagcgccgcaaccgcgacctcaagtccggccttcacccccttaggcacaaactcgtgctctggtacactcgccggacgcctggagcgaggtcgcagtcgtacgaggacaacatcaagaagatcatcgatttcagcacagtcgaatcgttctgggtttgctactgccaccttgcgcgcccttcttccctgccgagccccactgaccttcatctcttcaaggatggcatccgtcccctctgtgaggatcctgcaaaccagaatggtggcaagtggataattagattcaaaaaggcagtttcaggtcgattttgggaggatttggtgctagtggtagtaggcgaccagcttgagtatagcgatgatgtctgtggtgttgtgcttagtgtccgtttcaatgaagacattctgagcgtctggaaccggaacgcatcagaccatcaggctgtgatggcattgagggattctatcaagaggcacctcaagctgccgcacagctatctgatggagtacaaaccccatgatgcttcgcggcgtgacaactcgtcctacaggaacacatggctgagaggatagataaacctcatgatactcggcagcttcactgcgacggttctgaagcaaagagactcttttatgtaccaagaacgcagactattatgcaatgtagtactactactactactactcaaaagcccctacaatgtgacgcgcaacaattttactatctaatgtgtttttttgcaaaagcattt

SEQ ID NO: 27536 - DNA, 984 bp, Zea mays
  Clone ID: LIB4732-018-H9_FLI
ccgggaaaaaaccccatccaattccaaatcccacttctcgccagttcgcctccgcctccgctccgctcctccccctcccgtcccgccatggccaccgcagcacgcgccctcgtcgccgcacgcgccctcgtcgccgcacgcccggcacggccgctgctgccgcctcggcgcctcccgtcctcctcttccatccgtcccgcgcggcaacgtgccggcgtcgggtgcgtccgctgcatggctcggcggccggattccacctattccccgctgcgttcgggccagggcggtgaccgtgcaccgactgaaatggcgcctctgttccctggttgcgactacgagcactggctcatcgtcatggacaagcccgggggagagggcgccaccaagcagcaaatgatcgattgttacatccagacccttgcgcaggtggtagggagtgaagaggaggcgaagaagaggatatacaatgtgtcctgcgaacgctattttggattcggatgcgaaattgacgaggagacctccaacaaactcgaaggccttccaggggttctttttgtgcttcctgactcttacgttgatgctgagaacaaggattatggtgctgagttatttgtgaacggtgaaatcgttcagcgatctccagaaaggcagagaagggtggagccagtgcctcagagagctcaggatcgaccacggtacagtgaccggacccgctatgtgaagcggagggagaaccaatcttaccagagatgatgtttccgtctctgaagatgtaaaatgtcacggtttccacaagtgtccaaatgcggtacttgaagatgcagcagcaactccccactacccacatgagaatggcatccgttctgtttgccgcgcattttgagctgtatatgcttattatgcatttgggcttgtacctcagtcgatatgaacgatgtatcctttgaacttccgcattataatttttgaagccgttttagccac

SEQ ID NO: 27537 - DNA, 471 bp, Zea mays
  Clone ID: LIB4732-019-D12_FLI
agtcaaccagcgtgaacaaacaggagacgcatccagcctccagcagagggctccagagatccagcaagatgaaggagggcacggcgaactgtgtggacatcctcatcgccatcatcctgcccccactcggcgtcttcctcaagttcggatgcaaggtcgagttctggctctgcctcttgctcaccttcctcgcctatcttccggggatcatctacgcgatctacgccatcaccaaggactagcgcggttccagttgggtgcgagctgcaggctcctccttctcttctcagctgtgaagctactactactagtctactacggattgatgaacctgtcgcttcgttcgtctccttcgatcgctctctggttatattggtcgtggatcttgttattaccgatttatttatcaaacagtaacttgtaacatgtgctgttctgtatttattcagtggtccgcgtaaaatctgcctc

SEQ ID NO: 27538 - DNA, 979 bp, Zea mays
  Clone ID: LIB4732-019-D4_FLI
ccggagttctgatctgcttctccagtctccacacaacacaacagagcagaaggcagcacgggcgctggtggcgatgggggaggcgctgcgggcggctgccgctgacgcggtggtgacattcctgtgggtgctgtgcgtctccacgctgggggcctcgacgacggcggtgacgtcctacctgaggctgcagggcgtccacttcgcgctcctggtcaccgtctccctcctctccgtcctcctcttcgtcttcaatatcctttgcgacgcactcggcggcgctagcttcaatcccaccggcgtcgccgccttctacgccgccggagtcaccagcccctctctcttctccatcgcgctccgattaccggcacaggctgccggcgctgtgggcggtgctcttgccatctcggagctgatgccggcgcagtacaggcacatgcttggggggccctcgctcaaggtggatccccacacaggcgccggcgccgaattagtgcttacttttgtcatcaccctggccgtgctcttgatcatagtcaaggggccccgcaaccccatcatcaagacatggatgatctccatctgcactctgtgcctcgtcctctctggtgcagcatacaccggcccttccatgaacccagccaatgcatttggctgggcatatgttaacaaccgccataatacgtgggagcagttctatgtgtactggatatgtcccttcattggtgccattcttgctgcgtggatcttcagggctatgttcctaacaccgccacctaagcccaaggccaagaaagcatgatgaacatcatttggtcatggatgctggatttgataagtcaacatgaattgctagaataagaggaacgccaataagttcctggttcccagcatgttgaattaaattgattaatgtgatactctattactcgtaccatttatcataaggttctttatgcgaatatgaaatatctacctgtgt

SEQ ID NO: 27539 - DNA, 1706 bp, Zea mays
  Clone ID: LIB4732-020-F1_FLI
ccgggacgcctctccagctctcctctactagacttgttttttccgtccatcgtttcgtttgttccacctgcgcaactgcgacggggataagtacgtcttccagatgacgacggcggcatggccgcggccacgcttcctcgtcctcccccagcctggattcctccgctcggtctgccacggcctctgctcccgctgtctcttctgcttcctgctgctcctcgccttcgcctgcagctccagctccgggcgggtggtggtcactagcttgcctggcttcgacggcgacctccccttccacctcgaaacagggtacgtggaggtggaggaggacgccggcgtggagctcttctactacttcgtccaggccgagtccggcgccgccgccgccgccgatgacacccctttcctcttctggctcaccggcggcgaccgctgctccgtcttcagcggcctcgcctacgagatcggtcccatcagattcgtcctggaaccctacaacggcaccctgccgcgcctgcgatacaaccacaactcgtggtcaaaggtgtcacatatcctcttcgtcgattcaccggttggagctggattttccttctcgagagatcccaaaggctacgatgtcggagacatctcggcctcactgcagctacaggaattcctcatcaagtggttcagtgatcatcccgagtacctcgcgaatcctttctacattggcggggactcctatgtcggaaaaatcgtgccgttcctcgggcagatgatttcagaaggtattgaacttggaagaagacccttccctaacctcaagggctatctggtgggtaacccaatcacgggcgaaagtatagatttcacttccagagtgccctacgctcatggagtcggtatcatatcagatcaattgtatgagacgatattggggcattgccaaggagaggactacactagtcctgcaaacgctctgtgtgctcaggctctggacactttcaacaatctcatcaacgaagtccagaacgcccagatcttactggacacgtgcgtctacgcgtctcctgcgccaaacgttctcagcagaccggtggacggtggtagaaggatcctgagggcggcggggatgggaggaggggcgacgctgaaccatccgccagctcgtcctcggtttggctgcatcacctacggctactacctgtcgtatttctgggcgaacgatgaacgcactcgaacagctcttgggatcaagaagggaacagtggacgagtgggtgaggtgtcacgacgcagacctgccgtacacgatcgacctcaagagcgccatcaagtaccaccggaacctgacgtccagaggctaccgcgccctggtgtacagcggcgaccatgacctgctggtgccacacctgggcacccaggcatgggtcaggtccctcaacttccccgtcgtcgacgactggagggcgtggcatctcggtggccaagccgccgggttcacgataaattactcaaacaacatgacgttcgcgacgatcaaaggtggcgggcacacggcgccggagtacgagccggagaggtgtttcgccatgttcagccgctggatactcgaccgtccactctaatctccactcgtacattgccggattcttgcaccatgaccatgattgatggactgtgtggattgcagttcataggtggaataaaatggatgatttctgg

SEQ ID NO: 27540 - DNA, 2368 bp, Zea mays
  Clone ID: LIB4732-020-H11_FLI
aagccacgcggcttcttccttctgcgttctgcccctcctcgcacccgcactgcccgcccgttcgtccgtcgtcgtcttcgccgctccctcccggcctcccgggctggacgaaacgaaccctcgctcgccctccttataaccgaacggccgaacccagccaacccagccgtttctcttcgccgcagccaggaaggaaggatgtgcgggatcttcgcctacctcaactacaacgtctcgcgggagcgccgctacatcctcgaggtcctcttcaacggcctccgccgcctcgagtaccgcggctacgactccgccgggatcgcgctcgatgccgaccgccaggtcccctcccccgctcccgcttcctcttccgacgcgcggccgtacgccggggcgccgccgctcgtgttccgccaggagggcaagatcgagaacctcgtgcgatccgtctactccgaggttgatgagaaggatgtgaacctggatgctgcgttcagtgtgcatgctgggatcgcacataccaggtgggccacgcacggtgtgcctgctccaaggaacagccacccccaatcgtctggtgccggtgatgagttcttggtcgtccacaatggcattatcaccaactatgaggtcctgaaagagacactaactaggcacggcttcacctttgagtctgatacagacacagaagtcatccctaagctagcaaagttcgtttttgataaatctcatgatgaacaaggtgatgtgacgtttagccaagttgttatggaagtcatgaggcagcttgaaggagcctacgcacttatctttaaaagcccgcactatcccaatgaattgattgcatgcaaacgaggcagccaactgatacttggtgtcaacgaattgagtggtcaacagaatgggaaatcatttcatgatgtcaaaaccttgacaacaaatggaaagcccaaagaattattcttctccagtgatctatgtgctattgtagagcatacgaagaactacttagctcttgaagataatgaaattgttcatattaaggatggtagtgtttcgatcctcaagtttgaccctcacaaagagaagccagcatctgtgcaacgagcattgtctgttcttgagatggaagttgagcaaataaagaaaggaagttatgatcacttcatgcaaaaagaaatccatgaacagccacattcgttgaaaacaacaatgaggggtagattgaaggatggtggggttgttctaggtggactgaaggaatatctcaagacaattaggcgctgtagaagggtggtatttattggttgtggaacaagttacaatgctgccttagctgcaagaccttttgtggaagaactgactggtattcctgtgactatggaggttgcaagtgacttgctggacagacaaggtcccatctacagagaagacactgcagtttttgttagtcaatctggggagacagcagataccctccttgctctagattatgcactagaaaatggagctctctgtgttggcataacaaatactgttggaagcacgctgtctagaaaaacacactgtggtgttcatatcaatgctggttgtgagattggtgttgccagtacaaaggcttatacaagtcaaatagtagccatggcgatgatggcgttggctattgggtccgatcagatatctactcaagctaggagggacagtatcattagtggactgaacaacctttcaagcaatgtcagcgaagttctcaagctagatgctggaatgaaggagctcgcctcttcgctgatcgactcagagtcgctcctcgtgttcggaaggggttacaactacgccaccgcgctggagggcgccctgaaggtcaaggaggtggcgctgatgcacagcgaaggcatgctcgctggcgagatgaagcacgggccgctggccctcgtggacgagaacctccccatcattgtcattgcgactcgcgacgcgtgcttcagcaagcagcagtcggtgatccagcagctcctctcgcgtagggggcgcctgatagtgatgtgctccaggggagatgcctcggctgtgtgccctagcggtgggtcgtgcagagtcattgaagttccacaggttgcagactgtctccagccagtgatcaacataattccattacagttgctcgcgtaccatctgactgttctccggggattcgacgtggaccaaccaaggaatctggcgaagagcgtgaccacgcagtagggagaggtagatgagatgtttgtattgtagttaattgtccttgctcttgaggtggctagtacgtagcataagtattatggtgcgttaaacttgttgttttgtgaacgaaatgcacctctcttttttt

SEQ ID NO: 27541 - DNA, 1565 bp, Zea mays
  Clone ID: LIB4732-021-D12_FLI
ctcgaggccggccggggctcacccgccctcctgctctaagcccaaagctcccgtcccgagggcttcaggtctgttggcccctactcctcgtccgcttcccgggccgccgcttttaggtgtgacttcctcatcatctgccctgacggggatcgctggtttcttcctccagagatcgcatctctggtccgcgggatccgatgagatgcgggggtgctctcgcagtccgacctcgtagcaggcatggctgaagcggccacttcttcgtcctcgtccggatccttcgccccgagccgcctccatgacgccggtgtcgtcagggaatcgctcccgtacagtgttctcgccgcacccccgccgccgcctctgcctccggtgcaggtgcaggttgcgggttccggcggcggcggcggagggaagattagccccgcggtgcttttcatcatcgtgattctcgcgttagtgttcttcatctccggcctgctccaccttctcgtgcgcgtcctgttgaagaagcagcaccgccgcggcggtcgaaggggcacggcgtcggcggcggcgccgaggactggagtggaggcaggcggggtggacgtggcgttgcagcgccagctgcagcagctgttccacctccacgactccgggctggaccaggccttcatcgacgcgctgccggtcttcgcgtaccgggatatcgtcgtgggcggcggcggcgacggggacaaggagccgttcgactgcgcggtgtgtctgtgcgagttcgatggcgaggaccggctccgtctgctgccgctgtgcgggcacgccttccacctcaattgcatcgacacgtggctgctctccaactcgacctgcccgctctgccgcggggttctcttcgtcccggggctcatgggcgatggcaaccccatgttcgatttcgaggagagactggaggaagggcggttgtccgaggactgtgacgttggatttggattgcctgggctgaaggcttcagggttggcacagacaccggtggttgagaagaaggtattccctgtgaggttgggaaagttcaagaatgtcggaacccagggtgcggtggaaggtggcaatgccaatgccagtgtgttgagtagggatgaaggggagagtagcagcagcagcttggatggaaggagatgcttctccatgggcacctatcagtatgttcttggcacttctgagctccgagtagctctccagcctggccggattagaaatggcactggtggtgcaatgatgggaagacctcctggtttaagttcgatcaatgctgatattatggaggggaagaagatctgtacacgcaacaaaggggagagtttctctgtgtcgaaaatttggcaatggtctcatattaagggcaagctacctgctggttcggatgaatgttcggatgccgggagccttccttggatgaagagaggaggtgctgcggatacatcaaacttatgactctacactagtgtaatgagcctttctttagttagtgatacccacctaattttcacctgtagccatttttcttatctaattttcatgtgctg

SEQ ID NO: 27542 - DNA, 1108 bp, Zea mays
  Clone ID: LIB4732-021-F8_FLI
tcgaggccggccggggcatctcctagccccagctagatcattggacacatatcgaaacagctctagctagcgcgctcgtcgtctaacctggcttccggcatggcttccaagcagatcggagtcttgacctgcttcattgccatcaccgctctcgccttccgtccctgcgcatccgccgtgcccatggacggtggctggtcgaacggcggcgccacctggtacggcccagccaagggcgctggatccgacggtggtgcgtgtgggtaccagggtgccgtcgaccagcctccgttctcgtcaatgatcgccgccggcagccaatccatcttccaggacggcaacggctgcggcacctgctaccaggtgaagtgcaccggacacgcgtcgtgctccggcagcccggtgacagtggtcatcaccgacctgtgccccggcgctgcgtgccaggtggagcccgtgcactttgacctgagcgggacggcgttcggtgccatggcgaagcccggccaggccgaccagctccggaacgccggccgcctgcaagtccagtacattcgggtggcgtgcaactggaacggcttggacatcgccttcagggtggacgccggctcaaacgccaactacctggccatggccatcgagtacgagtccggggacggggacctgcgcgccgtggaactgaagcagagcggcgcggcggcgtgggcgcccatgcaacgctcctggggcgctgtgtggcagtacaagtccggctccaccaatctgcaggcccccctgtctgtccgcctcacctcgggctccggcagggtcctcgtcgccagcaacgtcatccccgccggatggcagcccggcagaacctaccgctccgtcgtcaacttcggaggaaaccatgcataacgagtgatattaaggatgtcgtgtgcagatgtctccatccaacaataagatgcatgcatatatgatctgtgtggccagctagctgctagaccaccatctcactccctgagtctgctgatgctcagccaataaagaatcattccatctcgatcggaaattcaacatatataataatgcaagcaccggaaataaaattctactgtgttctgtg

SEQ ID NO: 27543 - DNA, 1166 bp, Zea mays
  Clone ID: LIB4732-022-A1_FLI
ccgggaaagtccatctacggcacggcgtctcacagcctcaccccaactcgtcgccttcctcgtcattcccttcgtcgcggagaggaggtcacgcggctgattcccgccgcttgcgatcggttctgtctcccagcttccccttgagtacacctcattttgtgacaccgactagctgagccctgctgattgctcgcctagcacgctgttgcgctgattcgttgtcttgtgagctgttctagggttcgtagggagcaggatcagctgacgcgatgttccccaggatttcccggctcggggcgcggctcctgcgcgagtctagagccgagacaagagctggaaacttgctaaacagtcaacgcattttctttcaagatcatgttaaccggcattcgatcccagtggtgactcctgctgtattatcgatgcggaatgcccttttgtcaactgcaacaagtggtgatcaggatgaaagtagtcaggcaaaagataagagctgctccttccacatctagaggaatagatggcactaaatgcatcagttttactgaattaatctcggtaacatttgtcaacaaggatggctcagaaaagacaatatgtgttccagttggaatgtccatgttagaagctgctcatgaaaacgacatagagcttgaaggagcatgtgagggctcacttgcgtgttctacttgtcatgtaatagtaatggatgtaaaatattataacaagttagaagatccagcagatgaagaaaacgatatgcttgaccttgcatttgggctcacagaaacatcacgccttggctgccaagtgatcgcgaagcctgagcttgatggcatgcggctggcgctacctgtagccacaagaaacttcgcagtagatggctatgtaccgaaaccacactgaagagacggtcatctaccacactgaagagacggtcatctaccacactgaagagacggtcatatcggggaacacggattcttacagcagtcaattttgtagtttataacctgtaacttaactacagctttgttacttgtagtccggtccgggtggcttcggactaccttgttgagggtttgttcatttgatgaatcccttggttacttgcagagaagagagaacagtgcttcatctgggcgaataaacatccgttctgtggg

SEQ ID NO: 27544 - DNA, 1364 bp, Zea mays
  Clone ID: LIB4732-022-A6_FLI
tcgaggccggccgggaaccgcccttctccatccggtctccaagccgcacagagtgaaccggagcttcttgcttgctggtctcgccaagtagcaagagtaggactgtaggagctggtctctcgccaagtcgcgcctctccctcctctcttcccttttctccctcgcgtcgcgcgctccacatgctgagcctgaggtcagtatccggctccaactcctcgaggggcatcgccgccgtggtcggcgtgggtcccaggctgggctcggcggtggcgcgcaagttcgcctccgagggctacaccatcgccatcctctcgcgcgacctcgagaagctgtcgcagctggcggaggagatcgcgcaggcggccaaggcgcaggtgttcgcgctgcgggtggactgcgccgacgcccggtccgtgcgcgaggccttcgagggcgtgctctccctcggccccgtcgaggtgctcgtctacaacgcctgcgagccgcctggagccaacgaggacgcgcgccccgcgcccttcctcgccgtcacccccgacgccttccaccgcgccctcgccgtgtccgccggaggggccttccactgcgcgcaacaggtcatcccgggcatggtggagaggggcaggggcaccatcatcttcacgggctcctcggcgtcggtcaccggcttcgccggctactccgatctaagcagcggcaagtttgccctgcgggggctgtcccagtcgctggccagggagttccagccggccggcgtgcacattgcgcatgtgatcatcgacggcgtcatcggcgagaggaggtcgctgacgaggagcagcagggccggcggcgacacggcgggcgcggacccggacgcggtggcgcagagctactggcacgtccacgcccaggacaagagcgcttggacgcatgagatggacatccggtcgccgtccttcatgtagcagcagcttggctagcgctagccgccgctgctgtacgtacggtccctggaatctttagtggactgctaccggccgggcgcgttcccgatcaagcaggagagagggacaagtgggtcttgttgtgtatgtatacgtcgtgccctgtaaatcgtgtgtgcgcgcgcgcgcggctgcgggccgggaatcgtgtccccgtcccgcgccgcacgttggcaaggctctagctagccccccctttttctcatcatttggtgtgagatgcccgtcgctggtccgaccgcgggttctgtgcgttgattgcggccgagagcgaccgcgcgtgcgtctccgtcgcatcctgtacccatcgccgccgccgccggcgaccggcctccggaaagctctcatgtgtgatggatgtgtgcgcccgttgttact

SEQ ID NO: 27545 - DNA, 866 bp, Zea mays
  Clone ID: LIB4732-024-D1_FLI
ccggatagaggaaaacgagtgagaggggggaaatgctgcgccacgccgcccgccgtctcgtctcccgcaccgccgcggcgcccaccgcccgccgggcgctcgtcacggcagaggtgcctgcggaggccgccgaggactccacgtttgtggaggcgtggaagaaggtcgcccccaacatcgagcccccaacgacgcccctcttcctcatgcagccgcgcccgcccacgccggctaccatccccactaagctcaccgtcaacttcgtcctcccctacaagtccgagatcgccaacaaggaggtggacatggtaattgtaccagctacaactggtcagatgggcgttttgccaggccatgttgccacgattgcagagctcaagcctggtgttctctcagtacatgaggggaacgatgtgaccaagtactttgtgagcagtggatttgctttcgtccatgcaaactccattgctgaattcactgccaagcttggttcggcctctactgacctggagaaggctgaggctcagatcggtgtcgatgttcacagtgcgctcaatgctgcattgaccggttaattggtgtcatcttaaattgtctgtcttttagattgagtttaactttgcaaatcctaaataaattatagtccatctaaaacatggacatatgtttcttgttacctgaatcctgcatggatttatttttgtactcgtgaatattttaactctggagctcaaaacccggagttgctttctttttccgttgagttgcggccttggatcagatgaaatcgatgttcctccatagctccagtaaattgttaaatattgttaagtctattttaagagaaatataaaccacatttgact

SEQ ID NO: 27546 - DNA, 556 bp, Zea mays
  Clone ID: LIB4732-027-E7_FLI
agatctgtactccgtatccatcatctccttgcttagtgggcactcaaagtgttgctcaaacaaatgatgattcatcgatagtggctgaggcgacagctctccaagtttcgtctgttcgctcgtggtggaaattccgctgagcgagcgagtgaatcctcctcttcctagccccggcgtgaggagcgccggcgatgtcgaccggcggcaggaagatgaggacggcgtgcgtgaccggaggaaacgggtatatcgcctcggcgctcatcaaggtgctgctggagaagggctacgccgtcaagacgacggtcaggaaccctgatgacatggagaagaactcccacctcaaggacctgcaggcgctcgggtccttgggggtcttccgcgccgacctggacgaagacggcagcttcgacgacgccgtcgccggctgcgactacgccttcctggtcgccgctccggaagaaatgatcgagccggccgtcaggggaactctgaacgtgatgcggtcgtgcgtgaaggcgcgcacggtgaggcgcgtggtcctgacctcgtcggc

SEQ ID NO: 27547 - DNA, 348 bp, Zea mays
  Clone ID: LIB4732-028-H4_FLI
attgtaacccataaatccgtgctcactctatttctactgcttctagtactctccccacaagcatccccctccatgatagtgcttcctctgagctaaggctctctcacctacacacccgctcaccccaagtccacgccggcgatggccgcaatgccggcgccggcagcgggcttgtccttcctggtgctcttcgtcttcgccgccgccctgccggccctttctgccgacgacctcaacaccgacgcgcaggcgctgcaggcgctacgctcggcggtcggccgctccgcgctgccatcgtggaacagcagcacgcccacgtgccagtggcagggcgtcacctgcgagagc

SEQ ID NO: 27548 - DNA, 1009 bp, Zea mays
  Clone ID: LIB4732-029-G7_FLI
ccggggttgccctcggcgacgccacaccagtgcccagttgcattgattcctccccggtccccacatcctgccgccaatggatgtcgacgggcccgcccccgccgacgcctctgccaggcccgccaccaacggcgaggccccctccggcgcccgcgaggtcgacgtcggcgaggaggacacgctcgccggcgtcctccgcagcttcgtcgacggcgtctggtacccggacgagcctctgctccggcggctccgggcggcgtcctgcgacgccgcgccgcgcctgaggggggcgtcccggaactccgcgcgggacctgcttgagtggaccaggcggggcagcggcctccgcgccatcctcgtcatctcggtcgggacaatcacgcttatagcattgactggccttctgaccttcatgttcttcctattggttgccactgctaatgcgatcattgtctcagtcttgatgtcactggcctgccggaggattcttggctatcttctttgcttgcttggttgcagtgtatattggagcagtatcagttgctatctttgtcatttctgcgactgtcatctcagcagttgttggaattttggttgctaccggttgggttgggttcttctggatgatctggttcaccgcaaggaagagcatggtcctgacgaagcactccttcggcatgacgagctcggcaatccaatcgtattccgcgtcccggcaagtgaagcagaagcctgtcgactgaggctagttggttgcgtcctgtatgaagccctcggatatatctatctatgtgaatcacggttttgctgtttgtttgtttgtaagagtgtagaagacagcttgcttgttgcggcagctctgttcctctcggtgactaggtgtataatgctagctctgaactttggcagcatgtacgttcggcatggcagtcaatgctgttatttacaggatagtgagcagatgttaatgtttatagcaaataaaagcatgttaatgtttattaaattt

SEQ ID NO: 27549 - DNA, 431 bp, Zea mays
  Clone ID: LIB4732-031-B10_FLI
taccctcgaggccggccgggggacaaccccgccgccgcaacatccctagtcgctcgtcagatcctccagcaccacagcaccttcgccgccgccgccgccgccgccgccatgggtaaggttcacggatcgctggcccgcgctgggaaggtgcgcgggcagacgcccaaggttgcaaagcaggacaagaagaagaagccccgcggccgcgctcacaagcgcatgcaatacaaccgccgcttcgtcaccgccgttgttggattcggcaagaagcgcggccccaactcatcggagaagtagatctagctatggctttgtgttttattccccactagtttcctcactgatggcaacttgctgaagacttatgctattatctgtatcgatgttactgcaatactgttaagtacgatatatgcatcgtttagttgagc

SEQ ID NO: 27550 - DNA, 1286 bp, Zea mays
  Clone ID: LIB4732-032-F12_FLI
ccggggacccacacggccacacccaccccaccattcggttgaattgaattggtgctgtatgtactgtgctgtgttagttgcatcggttttgccggccggcaggccagcatggggaggtctccttgctgcgacgagaatggcctgaagaaggggccctggactcaggaggaagatgagaagctgctgcactacatccagaagaacgggcatggcagttggcggaccctgccgaggctggccgggctgaacaggtgcggcaagagctgccggctgcggtggaccaactacctgcggccggacatcaagcggggcaagttctcgcgggaggaggagcagaccatcctccacctgcactccgtcctcggcaacaagtggtccgccatcgccacgcacctcccaggccgcaccgacaacgagatcaagaacttctggaacacgcacctcaggaagcgcctcatccagatgggcttcgaccccatgacgcaccgcccccgcaccgacttcttcgccgcgctgccgcagctcatcgcgctcgcagccctacgcgggcagctgcccgccgaccccgacccgccgcagcaggccgggacgacggcggcggcggcggcggctctcgccggtctcatcggcgccctctgctcgccgccgcaactgacgctcctcgacaccaccaccgctactaccgctgctgctgccccgccggtggtgtcgtcgtcgtccgcggacgacgatgccgcccaccagtactacttaccgcgcaccacgttccccgacgcgcccggcagcggtgaagctgcccaccagcggcaacagcaagcagcaggcctcatcagctatggccgacgacccgacgacgccggcggtgatgttgacgtgttcgcgtgctacggtggtggcggtggaagctcgctgccgcccctgaccgacctctccgacgacgcagccaccctgctgcagctgcaggtggacacggcgtcgtccgaattcggcagtggcggctccagcccgctcctcccttggccggagttcttccccgacgatcccttcatcactgatttcctatgacatcgtcacactgtatatttgctcgtcgactcgtcgtgcaatcgtacatgcggatccatatatgtacgtcgtatctccctctgaactttgtaagctttgcgtactgtactctacacacacaaacacatacgtgcattcctttcagaacagttggaaagtgtgcagagcagggtcgagtgaggcttttccctccctttctgtttctgcttttgttggcgacc

SEQ ID NO: 27551 - DNA, 762 bp, Zea mays
  Clone ID: LIB4732-033-C5_FLI
ggggccaaaaccaaaagcagaggggaaagtgccgtcggctctgactcttgggcacttggctgacgacccgttctctctctgcaactgcaactgcaacgcaccaagaaactgccggcgatcgatcggggaaggagataaacatggtgcacgggaagctggaggtcctcctcgtctccgccaagggactcgaggacaccgatttcctcaataacatggaccccttcgtgatccttacctgccgcacccaagagcagaaaagcagcgtcgcaaatggagcaggaagcgagcccgaatggaacgagaccttcgtcttcaccgtctccgacgacaccccgcagctgcacctcaagatcatggacagcgacctcaccaacgacgatttcgtcggcgaagcaaccatccccctggaggccgtgtttcaggaaggcagccttcccccggcggctcacccggtcgtcaaggaggagaagtactgcggagaggtcaagctcgcgctcaccttcactccagcagcggaaactcgccaccgccctgatgacaacgaggaggggccgccttacagcagctggagttgatctatctgccatgggatgcatgcatcatatatatccaccaagagaagagaggataattaattaatctactcaagagaagaatcagtgtcgctgttatgcgaccctctacctctatctatctatatatatgtgcttaatttgtcatgaatgactgccaatataaactaaactattcagagtcgtttcc

SEQ ID NO: 27552 - DNA, 692 bp, Zea mays
  Clone ID: LIB4732-034-C1_FLI
ggccagccgctgtcccgcctgtccgctttggttcctgtttccccacagctcccaactctctatatctcaatctcttgttcatctaccgtttcttgctttgacgcaaaccagatcaatctgtggccgttgtttccatcggagctgttgaggtttgtcttcttggccgaagacatggcggcggcgaacggagctgccggtgcggtgttgttcagcgaggaggacctgagggaggtgagcgcggtgcgctggggtgaggacttcgtggaggtgacgtgcggatgcaccagccaccgctacggcgacgccgtcggccgcctccgcgtctttgtgtcaggcgacttggagatcaactgcgagtgcacgcccggctgccgcgaagcatgatatacattattacaaggaactttggcttcgagatggaagttttctcccatggcaaatgcatacgaggtgaagatataattcgaagatgataagaataaacggcgaagctatagccgaagtgtaatagcttcggcttaaaatggtgatgaagaccaaacatcatgttgaccagaagggaaaaagaatagctagtccttaatgatttatattatggtcataagtatatgtcagggacacaaatgtacttttactcgggctgcgtcccatgtctataaataaatgaacagtagcactatactgttcacgcg

SEQ ID NO: 27553 - DNA, 817 bp, Zea mays
  Clone ID: LIB4732-034-D10_FLI
ccgggaggccacttaccagcagtcaccactcccaagccagtaccgagtcctacgtacgagcagtcgcacgcaagtgtcaagagacgaaacggtcgacatggctcgcacgcaatctgccgtagcggtcgccgtggtggccgcggtgctgctgctggcagcggcggcgacgacctcggaggccgccatcacctgcgggcaggtgagctccgccatcgcgccctgcctctcctacgcccgcggcacggggtccggcccctccgcgtcctgctgtagcggcgtcaggaacctcaagagcgccgccagcaccgccgccgacaggcgcgccgcctgcaactgcctcaagaacgccgccaggggcgtcagcggcctcaacgccggcaacgccgccagcatcccctccaagtgcggcgtcagcatcccctacaccatcagcacctccaccgactgctccagggtgaactaaaacctagaccacgcgcgacgacggccgcctgatcgatcgaccaaccattccgccgtcgccgccggccggatcatcgatcgtcgtcatgatgatatctatcaatctacgcgtgatgatcgatggctacttgtctactgctatgtactactaaataaaatctctccgtgtgtgcacgtacgcttgcatgtgcatggtagcatgtatgtacgacgtcgtccatgtatgtgtgtgtgacgtgtgagacagagagagagagagagagagagagagacaggatcgatcgagagacggtcatgtccttttggctgtttggtttattcatatcacaacttttgagtgtatacaagattattt

SEQ ID NO: 27554 - DNA, 593 bp, Zea mays
  Clone ID: LIB4732-035-B11_FLI
cctcgaggccggccgggaccaccgcgtcgtcgtctccaagcaagcgaagagcgcctccctactccccctcgagatcttctctccctccccgcgccgctatggacgctgttgactcggtggtcgacccgctccgcgagttcgccaaggacagcatccgcctcgtcaagcgctgccacaagcccgaccgcaaggagttcaccaaggtcgccgcacgcactgcgatcggcttcgtcgtcatgggattcgtcggcttctttgtcaagctcatcttcatccccatcaacaacatcatcgtcggctccggctgatccatgcccctcactccctcaggagtgggcaatggcgtctccgccttggaggcagcgccgttttcagctctggcatccggaaagcagcgccgtttaggctagcttcagcaagacaccctaaagggttctgtaccctaaatatagaggaccaaatggtcttctatgctctccagcagcgtcctctaaacggtcctctaaatttagaggacgctgctggattctttatctatagagtttctctaaacggtcctctatccatttgaatactttaaataaccggtttag

SEQ ID NO: 27555 - DNA, 793 bp, Zea mays
  Clone ID: LIB4732-036-C8_FLI
ccagcaagccgcccagcacgaccgccagccatcaccggccagtgagacggtacagcaaatttcccccgtcgcgcccggtcattacgacggcgccggccgagcagacgccgccgccacgatgccgcccgccaccgtcgccgacactgcccccgccgcggggaccgtgctcctcggcaggtacgagctcggcggcctcctgggccgcggcgcctccgccaaggtgtacctggcgcgggacctgctcaccggccgctccgtggccatcaagtcgttccccaacccacgcgccggtggcggcggtgtcaacgccgccatcgagcgggaggcgtgcatcctccggcgactgcggcaccgccacatggtgcggctccacgagatcctggcgacgcgcaagaaggtccacttcgtgctggacctcgccggcggcggcgagctgttctcgctggtggacgcgtcggggcgcatgacggaggacctggcgcgccactacttccggcagctggtgtccgccgtgcgctactgccacgcgcgcggcgtgtaccaccgcgacatcaagcccgagaacctgctgctggacgagggcggcgcgctggtctggaccgagctgctggagccggccgtgaagcccccggcgctgagctgatgaggtggggtggaagccgcgttctctggttgcgattcttttgtttcttcttttttgtcgtcgcctgctatcattggcgagatcgtcgtctgtaaattattcactcgctccgtggctatatccaacaaagcaagcaaggaaggaaggagg

SEQ ID NO: 27556 - DNA, 525 bp, Zea mays
  Clone ID: LIB4732-036-C9_FLI
ccggggacaacaaaaatcacgtttccatccatcctggcgcacaaggggaagcggagagcgctctctctctcccgcccgcaatatcatggcgagagcacacctagccctggtcagcttcttcgctgcctcaattattggtgcggcgtccaagtcgttcaccatcgccaacaactgcgagcacacggtgtggccggggatcctctcgagcgccgggtccgcggggtggacaccacaggcttcgcgctggcgccgggggagtcgcgcgctctgagcgtgccgtcggggtggtcgggccggctgtggggccgcacgctctgctccaccgacgcggccacgggccggttcgcctgcgtgaccggcgactgcggctcgggcaggcaggactgcggcggcggcggggccgccccgccggccacgctggccgagttcaccatggacggcagcgggggcatggacttctacgacgtgagcctggtggacgggtacaacctgccgatgctggtggcgccgcagggcgcggccctc

SEQ ID NO: 27557 - DNA, 1237 bp, Zea mays
  Clone ID: LIB4732-036-F4_FLI
ccgggaccggcgcttcctcccgagctgcctccgctccgccgccagctgtcccctccccagcgcgtcatccgtctgcacgccaccgcctatccactcgcctgcacatcgccgccctagcagagacgtctgcacatcggcgcctggaggacgagaagcgaggaagaagacccacactctcctggaaaacgcatcacaagacttcagcctccctttccggccggagatccgactcgcgtctccgcgacagatccgggcaaacggcggctgatgcagttcttcggcggttcgtcgctgacgtcgatcgcgccggaggcgaccccagccccggcggcgccccccggcacgggcacgggcgccagcgcgcaggtcctctacgtcttcaaccgtaacggcgtctgcctgctctaccgcgagtggcatcgcccgctccgcacgctcgatcccacccaggaccacaagctcatgttcggactcctcttctcccttcgctccttcaccgccaagatcgacccaaccacggctgaaaagggaaatcttggagtgccactgctgccaggccaaggttgctcgttttatagcttcaagacaaacacatacaaactgaacttcatggagagcccttctggtataaagcttatattaattacacatccaaggactggtgatcagcgagactcgctgaaacatatatacaatctatatgtggaatatgttgtaaaaaatcctctgtatgctcctggaacaccaatcaagtgtgaacttttcaataaacatctcgatcaatacgtgaaaacattaatttgatgccattgagctagcttttggaaggtgcaggcttttgacttctgggagcttaaacctttttggacctcctaaaagctagcagtccaaaagtggctagaagctgaaacatgtcggcggtgtattctattttttagtactctgtcaaagaaccatgaagagtgaaacataagtatttggtatgttaagatgtctaggcctgcagtcccctttgtacttgtcatactgtttttttctgtctagaactggcacaaccaaccgagaaggcaggccgcaggcgtagctgcctacatgcatatttttttcacatccttatcaccgttgaaatgtttcgttgcagactttgggttggtgaggcattaggaaagaaaaggaccatttcatgatgtcaccatttcgtggaagacttttctggtggaaaaactgttttattccc

SEQ ID NO: 27558 - DNA, 1685 bp, Zea mays
  Clone ID: LIB4732-036-G1_FLI
ccgggactcaagtcacaacaaacaccaccatcgtctctttgctcagcacaaaagcatcacactccctctctctcgcgcgctcacaagcacgtcgtcaaccatggttgtcgagatgaaggagaacggcgtagcggcgttggcggcgggcgagaaggcgccgcagctgggcgtgaagcgcggcgagccgacgctggtgccgccggcggaggcgacgccgacgggcgggcagtactacctgtccaacctggaccagaacatcgcggtgatcgtgcagacggtgtactgctacaagccctcctcgtccggcggcggcgaaggcaaggacgtggacgtggacgtggcagccgcgctccgcgacgcgctggcgcgcgtgctggtgcactaccacccgctggcggggcggctgggcgtcagcccggagatgaagctcaccgtggagctgaccggcgagggcgccgtgttcgtggaggccgacgccgcctgcgacctcgccgccgtcggcgacctcaccaagcccgaccccgccgcgctcggccagctcgtctactccgtccccggcgccaagcacatcctcgagatgccccccatgaccgcgcaggtgacgaggttcaagtgtgggggcttcgcgctcggcctggccatgaaccactgcatgttcgacggcatcggcgccatggagttcgtcaactcgtgggcggagacggcgcgcggcgtcgccgagctcaccgtgccgccgttcctggaccgaagcgtcctgaaggcgcgcgacccgcccgtgcccaccttcccccaccacgagttcgccgagatccccgacgtctccgacacggcggcgctctacggcgcgcaggagctgctgtaccgctccttctgcttcgacccggaccggctggagcgcgtgcgcggccttgcgctcgccgacggcgccctgggccgctgcaccaccttcgaggcgctgtcggggctggtgtggcgcgcgcgcaccaaggcgctggggctggcgcccgagcagcgcaccaagctgctgttcgccgtggacgggcgccgccggttcgcgccgccgctcccgcggggctacttcggcaacggcatcgtgctcaccaacgcccttgccacggccggcgagctgctgtccgcgcccgtgtcgcgcgcggcggggctggtgcaggacgccgtgcggatggtcaccgacgactacatgcgctcggcggtggactacttcgaggcgacgcgggcccggccgtcgctcgcgtccacgctgctcatcaccacctggtcgcggctcgagttccacggcgccgacttcggctggggcgagcccgtcatgtcgggcccggtcacgctgccggagaaggaagtcatcctgttcctggcgcacgggaaggagaggaagagcatcaacgtgctgctcggcctgccagccaccgcgatggacgccttccaagagctcatggacgagatatgattcattcgtcggtgatgacggacatggatgggttgctgctatacatacatatacgatgccgggtgcttatacattcttcagttgctcggtgttatagtacgaccgtgttaatactcgatctatgttgatgttgttaagtttagtggtcatgagaatttgctgtcgattgcaatggttctaatattaatggaaaatggtaaactttgtttcctttcattcg

SEQ ID NO: 27559 - DNA, 980 bp, Zea mays
  Clone ID: LIB4732-038-A12_FLI
ctcgaggccggccgggcggtctcgcgaagaggaagggtggaaaacctcctctcccctcgttctcctccgcctcctcctcccacctccccacacgggcacacctgccctcaccgtcgccgcggacccactcccatggcaaagctcccgcgtctaccctgcccgtttgccgttctcgcgctcatgtgcatcatcccgctcacagcgccgcggcccgcactgtcctcgcgcacggccccaagggacggtgtctccttcgccggcgcaggcaacacgatacatcaacttcttaaagatcacggccttcccggaggactgctcccgcgcggcgtggagtcgtacaccctggacgagtcgaccggcctgctggaggcgcggctgtcggcgccgtgctacgccacgtacgacaacggcgaactggcctacttcgacaacgtggtgcgcggcaacctcagcaagggcgcgctccgaggcgtggagggcctctcccaggaagaactcttcgtctggctccccgtcaagggcatcctcgtccaggaccaggaacccggggtcatcctgttcgacatcgggttagcccacaagagcctgtcgaggtcgctcttcgaggacccgccggactgcaagccgtcggcctccggcgggatgagcgccgccgccgccgccaggagggagggcacgcaaggtgttactggactacggttgaggcgagagatggcagcagcaggcagcgaccagagtcaggagcagaggtgaggaggaggaggaggagctctgagacgacaacacccgagacaatggcgagccagttttccgctttataaaatcctgcggtgagtgagtgagtgagtgagtgagtgagagagagagagagagagagagagagagagtgccgccgccgccgcaacaagaaatacaacagctgcagcttcctgcagaggttggaatgtatctactaagatgtgggtacctttttgcagtcg

SEQ ID NO: 27560 - DNA, 1194 bp, Zea mays
  Clone ID: LIB4732-038-E11_FLI
ccggaagcgacgccatcgcgcaccagcgctgctggaccaccgcccgtctgacgcaaacccagccgtccagaaccgtcgtcgccgccgcagcccgtccttccaccacgctcgcgccgttgcgcgctcttagggttccgcagggtcgggatcgccggagatggactggagcgcggtgacggcggaggacctggtggacgcgctgcgggaggtggactggtccacgccgccgcggactgtctcggagttcttctcccggttcaccgtcccacgctcctattccaagtggaccagccgcctcaagtgcaacctctactactacaggacaaactatttcatcttgatcatgttcacccttgggatgggcttcctttggaagccagttgctatccttgctgcttttatgactggacttagcatcgcatttctcaatgatagttttgcagtcactttcaatgagaaagtcacaaggaccataagacagttttcaccacatttagctgcaaagatgaggccaccaataacgtgggtatcttagtttctgatgtttcttttttctttaaattttattgttgataactacagagtgatgctaatatcatttttattagacctgttcttcgtggtcgaccaaactcgaagagatcaattcatatttgtgggcgaccgcgcagggtgtttgtcatattcttttctgcagttagctgtatactctggttgacctcatgcagtcttctcacagtcctctgggcacttctgattgctctatttgcaactatgctccatgcaagcttcagaacaccaaatctgaaagcacgtctgaatacattcagagaggaattccgggctgtctggcggaattatagtgagctttaaggtctcatttgtttctctcatgttcattgtggtaaggaaaggtgtcttgtgcagaaacgtccatgctgtttgtgagttgcactaggagatctagttgaaggtgaaacgccattggacattactacatggattatgggaggtgggatttgggttgggttggctccgaatgcgatgttatgccttagcacgtgatcccccaagaacaataatttttctttcaggcttctccctaaccgaacattggagaggacagcatgtaaagaaatgtaaaaatgtaccggttctcgatcaaaacttgtgttgtttgtagaaatttttact

SEQ ID NO: 27561 - DNA, 877 bp, Zea mays
  Clone ID: LIB4732-038-H2_FLI
agcgtcaggataagaaccgcgcggcggcaggcagctcctcctgcgactgcgagcgcccgtccaatggcgtccctctccccttccctccacctcccttgcaattcaagaactggcttccttggaaagacacgtgggattcgtccttgtgttttccctgctggaagagttggatttgtcagaacagtagtggaatgcaaggaatctagaattggaaagcagcccatcgaagttccatcaaatgttactctcacattagaagagcagtttgtcaaagctaagggtccgctgggggagttatctctgagctttccaggtgacttgaagatcgtgaaagaagaatccggtaacctgagagtttataagactgcagagaccgagagggcgaaccagatgcacggacttttcagaacattgacagacaacatcatcgtcggtgtgtcaaaaggattcgacaagaagcttcagttagtaggcgtcgggtaccgtgcggcggtggagggcaacgatctcgtgatgaacctgggattctcccaccctgttcggatggccattcccgaaggtctagcggtcaaggtggaagagaacacaaggatcatcgtgagcggctacgacaagagcgcgatcggtcagttcgctgctaccataaagaagtggaggccacctgagccatacaaggggaagggtatcagatacatggatgaagttgtcagaaggaaggaaggaaaagctgggaagaagaaatagaagtgtttgctttttgtttgccctttccatgcttcatttcattttccccgcaacggtcctcgtctgctatgaccgaacccgagaaaaaatattgttctgtgctgatcatgccatatttatgtgcaccttgagc

SEQ ID NO: 27562 - DNA, 1560 bp, Zea mays
  Clone ID: LIB4732-039-C10_FLI
acccgaagcacatcccgtcgcatcccatcccactaccacccatctcgtcgtccgccgattcgatccggttcttccaacccaggggctgtgatggcgacgaagaggagcgtgggcaccctcggcgaggcggatctgaaggggaagaaggtgttcgtgcgcgccgacctcaacgtccctctcgacgacgcccagaagatcaccgacgacacccgcatccgcgcctccgtccccaccatcaagttcctcctcgagaagggcgccaaggtcatcctcgccagccacctgggtcgtccaaaaggtgtcaccccaaagtacagcttgaagcctcttgttccacgcttgtctgagctccttggagttgaagtcgtgatggccaatgattgcattggtgaggaagttgagaagttggctgccgctttgccagaaggtggagttctgctcctagagaatgttagattctacaaggaggaagagaagaacgaacctgagtttgccaagaagctagcatctgttgctgacctttatgtcaatgatgcttttggcacggcacacagagctcatgcttcaaccgaaggagttaccaagtatttgaagcctgctgttgctggcttcctcatgcagaaggaacttgactaccttgttggagctgttgccaacccaaagaagccatttgccgctattgttggtggatccaaggtctcaagtaagattggtgtcattgagtcgttgctggcgaaggtcgatatcctcatccttggtggtggtatgatctacacattttacaaggcacaaggatattctgttggaaaatctctcgtggaagaggataaacttgagctcgcaacttctcttattgagaaggcgaaggcaaagggggtttctcttttgcttcccactgatattgtagtagcggacaagtttgcagccgatgctgagagcaagattgtccctgccactgctatccctgatgactggatgggtcttgatgttggccctgatgccacgaaaaccttcaacgaagcattggacaccaccaagactgttatttggaacggccccatgggagtgtttgagttcgagaagtttgcagctggaactgaggcgattgccaagaagctagctgagcttacaaccacgaagggtgtcactaccatcatcggcggcggcgactctgtcgctgctgtcgagaaggctgggctggcggacaagatgagccacatttcgaccggcggcggtgcgagcttggaactcttggaaggcaagactctacctggtgtccttgccctcgatgacgcctagatccgctgctgctgctgctgctgctactcaggttctgccagctttgcgtgtcatcttgtttcgggccttggtgtaacgctgcaaggttaaggtttactcctccacacatggacttttggggataggcttgccatcgtgttttgctagatgagtcgtgaaataagcttttacttcctcgctgctgtgggtgaagtaactggaattcggaaatttggaactaacaaaaccccccgtggatttgtatgatatgttttgttcgac

SEQ ID NO: 27563 - DNA, 1576 bp, Zea mays
  Clone ID: LIB4732-044-G10_FLI
ccggggtccacagtccacactccccactccattttctaccatcacactgacacgttcatagctagctagtcttcagctagtaacgtacgacggactaatctcgatctgggagcgaggaggaggacgacgataatgaagatgagctccgtgcccgcggcagcggcggtgatggtggtggtggtgctgctctctgcggcggcggcgactgtgacggggcaggcgcttgtgccgggcgtgatgatcttcggcgactcggtggttgacgcaggcaacaacaaccggctagcgacgctggtgcgcgccgacttcccgccctacggccgcgacttcccggcgacgcacgcgcccacggggcgcttctgcaacggcaagctcgccacggactacaccgtggagagcctggggctgagctcgtacccgccggcgtacctgagcgaggaggcgcagagcaacaacaagagcctcctccacggcgccaacttcgcgtccggcgccgccggctacctcgacgccaccgccgccctctacggcgccatgtcgctgagccggcaggcggggtacttccgggagtaccagtcgcgggtgggcgcgtcggccggcgagcagcgcgcccgggagctgacgtccgggtccatctacgtggtgagcgccggcaccagcgactacgtgcagaactactacgtgaacccgatgctgagcgccgcctacacgcccgaccagttcgccgacgcgctcatgcagcccttcacctccttcgtcgagggcctgtacagcctgggcgcccgccggatcggcgtgacgtcgctgccgccgatggggtgtctcccggcgtccgtgaccctgttcggcggcgggaacgatgggtgcgtggagcgcctcaacaacgactcactcaccttcaaccggaagctcggcgtggccgcggacgccgtgaagcgcaggcaccccgacctcaagctcgtcgtcttcgacatctaccagccgctcctcgacctcgtccaaaaccccaccaacgccgggttcttcgagtcccggcgggcgtgctgcggcacgggcacgatcgagacgtcggtgctgtgccaccagggggcgccggggacgtgcaccaacgccacgggctacgtcttctgggacggcttccaccccacggacgccgccaacaaggtgctcgccgacgcgctcctcctgcagggcctacagctcatcgcgtgagccacagccacagccacgcaacggcctcccgccgcccttatacgtaccttgctgcttctgtcgttccgtcctgctactgtgtctcgtgtgcttgtctgtctgtctgtccatgatctctcgtagctttgtgatgctttggaaagactcgggagtgctgtaagatttctggtctgtataattacattcagcgtcttcccagcctcttcgctgaattttgaacttggagtgatcaacgtacagcccgtggcatatttttagagtattgatacaacattgctcgatggtgaagctagaggtgtttagctaaaactttgtatctaaatccgatattagtaaaactttggatctgtggcttctgcagttc

SEQ ID NO: 27564 - DNA, 1288 bp, Zea mays
  Clone ID: LIB4732-044-H6_FLI
acttcctcctctctgcttcagtacgtactacgtagtgggctgagccagaaatgggcgcgtcgttggctagaagcgttgctcttcttactctgctgctctgcctatttcttccgtgccatgggaagctctcgaccaagttctacgccaagtcgtgccccagcgtggccgccatcgtgcggtcggtgatggagcaggcggtcgccaaggagcccaggatgggcgcctccatcatccgcctcttcttccacgactgtttcgtcaatggttgtgacgcgtccatcctcctggatgacacttcgacgttcaccggcgagaagaacgccggagcgaacgccaactccgtccgcgggtacgaggtgatcgacgccatcaagacgcaggtcgaagcagcctgcaagggcaccgtgtcgtgcgccgacatcgtcgccttggcgtctcgtgacgccgtggacttgctcggaggcccaacatggaacgtgcagctcggccggaaggactcgcgcgcggcgagccagagcgcggccaacgccaacctcccgggcccaggctccggcgccgcgtccctcgtggccacgttcgcggccaaggggctctcggcgcgcgacatgacggcgctctccggcgcgcacaccgtggggcgcgcgcgctgcctcttcttccgcgggcgcatctacaccgaccagaacgtcaacgcctccttcgcggcggcgcggcagcagacgtgcccgcagagcggcggcgacggcaacctcgcgccgttcgacgaccagacgcctgacgccttcgacaacgcctactacacgaacctgatggcgcagcgcggcctgctgcactcggaccaggagctcttcaacggcgggccgcaggatgcgctggtcaagaagtacagcggcaacgcccgcatgttcgctaccgactttgccaaggcgatggtgaagatgggcggtcttgcgccggcggctggaacgccgacggaggtcagattcaactgccggaaggtgaactgagaatggcttgcattcagagacgggatgacagggggagttgtctgaattctgaaacaaagcactaaaccgtatctttccctttcgttccaagatcaagtctttggttcctgggcatgatacaagtgaaaataattaagacaatcttaaaatgcttgatgttcacgccatatacacagagacgtttttcctgttctatatttttttccattgaaaccatccttcagaacaatacatgtatcgactgtgaataatagagctcttttccgaagtctcgtttgaac

SEQ ID NO: 27565 - DNA, 840 bp, Zea mays
  Clone ID: LIB4732-047-A3_FLI
ccgggaaaaaaagatcagatcacactcgtagagagaaggaaaaatatccccaaaccctagctcccgatctcgatggcgaaccctcgcgtcttcttcgacatgaccgtcggcggcgccccggcgggccggatcgtgatggagctgtacgccaacgaggtgcccaagaccgcggagaacttccgcgcgctgtgcacgggcgagaagggcgtgggcaagtccgggaagccgctccactacaagggctccaccttccaccgcgtcatccccgagttcatgtgccagggcggcgacttcacccgcggcaacggcaccggcggcgagtccatctacggcgagaagttccccgacgagaagttcgtgcgcaagcacaccgcccccggtgtgctctccatggccaacgccgggcccaacaccaacggctcccagttcttcatctgcaccgtcgcgaccccttggctcgacggcaagcacgtcgtcttcggccaggtcgtcgagggcatggacgtcgtcaaggccatcgagaaggtgggcacccgcaacggctccacctccaaggtggtcaaggtcgctgactgcggacagctctcctagatctctctgatctggtctgttcggccgccctccctccgtcatcgtcgactccccctgcgtccgttcctttggatctgaataagatggtggtgatctgagtggtggtcttagtttatcatgtatcgctcgcagtttaatttagcggtttaggtgtggatctgtgaaccccatggcgcctctgcttgattcgtgtttcacctgttatgttctgagattcatgataatgctatgagaactgaaattcccgtt

SEQ ID NO: 27566 - DNA, 898 bp, Zea mays
  Clone ID: LIB4732-047-D9_FLI
aaaagaggagcagcacggcacggcggcgatggcgaggaacgctccaataatatgctaacccgttctacccagtccaattagcagcctcccaaggagaaggagatccaatcctgcgggcgggcgtccccgtatcccatccatcgatccgaatctcggaatctgcaggtgaggagactcatcggttccctttttgaggagcgactcatcggtttctcaccatcacttccacttggggatttcaatcgaatggaccctgcggcgcggcttcttcgtggagaagaggttgctgccgaagccaccgccaggtagccatgtcgtcctccgtgctgagggctgcggccgacagggccattcgcaggcaggccctcacgctgacgaactccgcggcgtccaggatccggcagctcctcagcctaaggcaacggccatacctgcggctgggtgtcaaagcgcgaggttgcaacggcctctcctacaccctcaactatgccgatgaaaaggggaagttcgatgagcttgtcgaggagaaaggagttaaagtactgatcgaccccaaggctttgatgcatgttataggcaccaagatggactatgttgatgatccattaaagtccgagtttgtgttcataaacccaaattccaaagggcagtgtggctgcggtgattctttcatgactacaggcagcaaagggtcgacgtcatgaggcgtttttcagtgtaaatgcttagccaagtgtctgcaggctccagctacagattttcttgtgtctgttgcgtcgcagttcattcatatataataacacagcagtgggtttgtactggatatgcaactaactcgcatttacttgtaagttcacctcaaatgttgttattacatggtctgactctgattatcaag

SEQ ID NO: 27567 - DNA, 1477 bp, Zea mays
  Clone ID: LIB4732-047-G1_FLI
ccgggaagctcaggagggatagcgccctctctccctcctcgccgagacgacgagatccatcgccatcagagaatcctagcccacccagaccaggtgccccacggcggtgccggcgatggcaacccgctactggatcgtctctctccccgtgcagtctcccggcgccaccgcgacctcgctttggtcgcgcctgcaggatggcatctcccgccactccttcgacaccccgctgtaccggttcaacgtcccggacctccgcgtcggcaccctcgactccctcctcgcgctcagcgatgacctcgtcaagtcaaacgtgttcgtcgagggcgtttcgcacaagatccggaggcagatcgaagacctcgagcgcgccggaggcgtcgacagcggggccctcaccgtcgatggcgttcccgtcgacacctacctcaccaggttcgtgtgggatgagggcaggtaccccacaatgtcgtcgctcaaggagatcgtcggcagcatccagtcgcaggtcgccaagatcgaggatgacatgaaggttcgagcagcggaatataacaatgtaaggagccagcttactgcaatcaacagaaagcaaagtgggagcttagcagttcgtgatctttccaatctggtaaaaccagaggatatggtctgctcagagcatctagtaacacttcttgctattgttccaaagtactcccaaaaagactggttgtcaagctatgaatcactcgacacatttgtggtacccaggtcatctaaacagctctatgaagacaatgagtacgcactctacaccataacactttttgctaaggttgttgacaactttaaggtccgtgctcgcgagaagggtttccagattcgtgattttgagtatagtcctgaagcacaagaaagtagaaagcaggagatggagaagttactgctagagcaggaagttatgaggacctcgcttctgcaatggtgctatgccagctacagtgaggttttcagttcctggatgcacttctgtgccgtgcgcatatttgtagagagcattcttagatacggtctgccaccatcgttcctgtctgctgttcttgctccgtctacgaagggcgagaagaaagtgaggagcatcttagaggacctttgcggcaatgtccatagtatttattggaaaggcgaagatgacgtggcagttgctggtctgggaggtgaatcagaggtccatcctttcgtctcattcaccataaactttgtctgagcattactggtgttacgccctcaagtaaatcgaaacgatggaatggttctgtacattactagtgttacggcaattctttgttgatctgtcagcttttatctgatcatgtaatttatattggatatataaggcttttgaggagactggaagtagatggatcacgatcaccatgtaatttgtaaaatggggctactgttactgtaataaaggcacatgtcaaatatctct

SEQ ID NO: 27568 - DNA, 819 bp, Zea mays
  Clone ID: LIB4732-047-G7_FLI
aggccacttaccagcagtcaccactcccaagccagtaccgagtcctacgtacgagcagtcgcacgcaagtgtcaagagacgaaacggtcgacatggctcgcacgcaatctgccgtagcggtcgccgtggtggccgcggtgctgctgctggcagcggcggcgacgacctcggaggccgccatcacctgcgggcaggtgagctccgccatcgcgccctgcctctcctacgcccgcggcacggggtccggcccctccgcgtcctgctgtagcggcgtcaggaacctcaagagcgccgccagcaccgccgccgacaggcgcgccgcctgcaactgcctcaagaacgccgccaggggcgtcagtggcctcaacgccggcaacgccgccagcatcccctccaagtgcggcgtcagcatcccctacaccatcagcacctccaccgactgctccagggtgaactaaaacctagaccacgcgcgacgacggccgcctgatcgatcgaccaaccattccgccgtcgccgccggccggatcatcgatcgtcgtcatgatgatatctatcaatctacgcgtgatgatcgatggctacttgtctactgctatgtactactaaataaaatctctccgtgtgtgcacgtacgcttgcatgtgcatggtagcatgtatgtacgacgtcgtccatgtatgtgtgtgtgacgtgtgagacagagagagagagagagagagagagagacaggatcgatcgagagacggtcatgtccttttggctgtttggtttattcatatcacaacttttgagtgtatacaagattatttatgtggc

SEQ ID NO: 27569 - DNA, 946 bp, Zea mays
  Clone ID: LIB4732-048-G6_FLI
ccgggcggcccaaatagagattacgtcatagaatcatcgtcaccccggagcctctccttcccggtctcctccgcccgttgccttcgtcccctccatctccggctgcgtcgccggcgagcccgacaccgcgaatcggatccgccgacaaggtgagagggaagagatggggctcacgttcaccaagctgttcagccggctgttcgccaagaaggagatgcggatcctgatggtgggactcgacgccgccggaaagaccaccatcctctacaagctgaagctcggcgagatcgtcaccaccatccccaccatcggattcaatgttgaaactgtggagtacaagaacatcagcttcactgtctgggatgtcgggggccaggacaagatcaggccactgtggaggcattacttccagaacacgcagggtctcatctttgttgtggacagcaatgatagggaccgtgttgttgaagcaagggatgagctccaccgaatgctgaatgaggatgagttacgtgatgctgtgttgcttgtttttgctaacaagcaagatcttccaaatgctatgaatgccgctgagatcactgataagcttggactgcattcacttcgccaacgtcattggtacattcaaagcacttgtgctacaacgggtgagggattgtatgaaggcctggactggctgtccagcaacattgcaaccaagtcctaaattgtcaagcgaggtttggatcatctaggagcttttgaatgatgatgatgatgatggtgctggatatttagggttgggttggtatttccgtatgtaagatgtatgcccctgagctcggcagtttttgagctctgcttaagattctcacagttaaattgttttatgtaatttgggccttgagatgtttctgaaccaaacagctaaaagagttcagttgagttaactggttgccattat

SEQ ID NO: 27570 - DNA, 722 bp, Zea mays
  Clone ID: LIB4732-049-D4_FLI
ccggggagaggaccttttctcgttttttttatcggctagcaccttgcgacttgcgagcgccgcatcgccggcgagcgccgttccgctgcaccctccgcgattccgccccaacctctgcgttcgaatctcccgcgaaacagtcacggcgatggcggcggccggcggcgtttcaactgatgatgtcccgatcctgcaggcagagaacctcaccagcaacgtcaagtccgtctactacagtcgaacattcttgtcaatcattggtggagttgttgctggaatctggggattcacaggcttgatggggtttgtcttctactttctgataatgatggttgcatctattgggctcttagcgaagtcaaagttttcagtccaggcgtacttcgacagttggaccaggatttcaattgaaggagttttttggtggcctgatgtcattcgtgctgttctggacatttgcttatgacattgttcacatcttctgacggacatagaaagagctactctccagaggaaacacggaatcgtcgacgatgaacattcccaatgggctttttgtacactcaatttttgtattggtaattgatagtctagtgagactatcggtgtagacctaagcaaagctcatgaactggtgttgcatttcctttccttggatgatccgtagcagttgcaatttttcatttcaagtgatggatatgaactttgatgttttctggcac

SEQ ID NO: 27571 - DNA, 1216 bp, Zea mays
  Clone ID: LIB4732-049-D5_FLI
tcgaggccggccgggatgagaggccacaaacctcactccgtctatgttatcatgtgcaccttctcttccttcctctgcaagaagccaaatacaatttagaagcgcccctcctcctctccccccatccgtacccaatctaatcgacacccggccgagatgggccgcaagttcttcgttggtggcaactggaaatgcaatggaaccgcagatcaggttgagaagattgtcaaaaccctgaatgaaggaaatgttccctcttcagatgttgttgaggtcgttgtcagtcctccttatgtgttcctcccggtggtcaagagccagctgcgccaagagttccaagttgctgctcagaactgctgggtgaagaagggaggtgcattcactggtgaaattagtgctgaaatgctcgtcaaccttggcgttccctgggtcattcttggacactctgaaaggagagctctgctgggagaatcaaatgagtttgttggagacaaggttgcttttgctctgtctcagggactaaaggtcattgcatgtgttggtgagacccttgaggagagggaggctggttcaaccatggatgttgttgctgcacaaacaaaagcaattgctgagaagatcaaggactggagcaacgttgttcttgcctatgaaccagtctgggctattggaactggcaaagtcgccaccccagctcaggctcaggaagtgcacgcctccctgagggattgggtaaagatcaatgtcagccctgaggtctctgaatctacaaggatcatctatggaggttcagtaactgctgcgaactgcaaagagctggcagcacagcctgatgtcgatggtttccttgtgggcggtgcttctttgaagcccgagttcatcgacatcatcaacgccgccgccgtgtgaagtccgctgaagatgttccaacccttcaccctgttgcggtgatgtgctgaagacagatcagactatttttttgtttaaccgtgcagtgctatgtaagctactaactttgcgctggtgcggatgctggtttccctccccctagctttttgtgaagctactctacagcttgattcagcttgctaataatgtttgcctctggacatagcgatagtggtgtttgtgtagcctttttttttgtgtgtgtgaattacgatggatccgtcttcgcccgacgcccttttgtggcactagtctacagcgtctacac

SEQ ID NO: 27572 - DNA, 992 bp, Zea mays
  Clone ID: LIB4732-052-F11_FLI
ccgggactgctcttcttagctcgccgaaatgacgcacggcctcgccgtcggcttcggctccctccgctgcggtccctccgtgtcgtcgtcctctgccaccattcatcgcaccctggtcgctccccctcgtcgaagcttacggatatgctcctcgaccttccctcctccacccgcgcccgccatcgagggtcgtgacgtcagcctctcggtgaccacgcggcggggcagggtgttgccggtgcttaagggatgctccctccttgtcccgcccgggcagctctggatgctcctcggccccaacggctgcggcaagtccacgctgctcaaggttttagcaggtttccagaatccaacggccggtacagtgtatataaacagaccatgcagctatgtcttccaaaatcctgatcaccaggttgtgatgcctacagtgggatctgatgtagcatttggtctcggtaagctcaaacttccgttagatgaggtcaggttaagggtatcaaaatctttggatgccgttgggatgttgagctactctcagaggccaatccaaactctgagtggtgggcagaaacagagagttgcaattgctggtgcgttagctgaagcatccaaagtattactgctggacgaactgaccacattcttagatgaacatgaccagataggcgtgataaatgcagtgagggactctgtagctgccgacggggaggtcgccgcattatgggtgactcatcggttggaagagctgaaatatgcagatggtgccatctatatggaagatggccagataatcattcaaggcgacgtctctaccatatcaaaatttataaaaaaaaacaggcacgctactttggtcattttgaactctaaatccccaaagttttttggcaaagcttatcttgtgtatatggattaattccaaagcaacttattttgttgttgtcaactgtagttttgctggaacttctattttagtcatttttcaaagc

SEQ ID NO: 27573 - DNA, 737 bp, Zea mays
  Clone ID: LIB4732-052-G12_FLI
ccggggcggcgatttcgattcttcccctctatctccaggtatacccatcggagcagcactgacaaaaattctccagatatggcaagcaaaaggattcagaaggaactcatggatctgcaaaaggacccaccgacatcatgcagtgcagggcctgctggagaggatctattccactggcaggccacaatcatgggtcctagtgacagcccctatgcaggcggggttttctttattaatatccattttcctcctgactacccctttaagcctccaaaagtgaacttccaaacaaaagtttatcacccaaacatcaactctaatgggagcatttgccttgatatcctgaaggagcaatggagccctgcactgaccatatcaaaggtcctcctctccatcagctcgctcctcaccgaccccaacccggacgacccccttgtccctgagatcgcccacatgtacaaaaaccagaggcagcgctacgaggaaactgcacgggcctggacccagaagtacgcaatgggctgattctgtcccactggacagtacttcccctgcaaagatcgtcacggtgttgtaagaatcaagttgcaccgttttcctgtcgtgtgatggtattaagagcccagatggctgtgtgaattgtactcgcttctcagaacaatgtctctctgtgtgtacagtgcttttgaagctggatgatctgagttctgtggtaaaaccttggtttgcacttcaag

SEQ ID NO: 27574 - DNA, 1032 bp, Zea mays
  Clone ID: LIB4732-053-A11_FLI
ccgggcccatttcgaagcccaccgaattccctgcgattcctctcccctcgcctcctcgtctccccctaggggatcgtcggagaggaatcgcaaagagggccgtctcatccgagttaaggaagccatggagcacaaggaggctgggtgccaggcccccgagggacccatcctctgcatcaataactgtggcttcttcggcagcgcggcgaccatgaacatgtgctctaagtgccacaaggagatgataacgaagcaggatcaggccaagctggctgcctcctctattgacagcatcgtgaacggcagcgacgccgtcatggagccggttggtgctggcagcaacacggtagtagctgttgcccaagtcgagttgcaaacaatgaacgtgcagcagcccgctgatgttgccggacccagcgagggggtggcggcggcgatctccaaaggggggaaggtagggccgaaccggtgcagcgcctgcaggaagagggttgggctcacgggattcaactgccggtgtgggaacttgtactgcgcgctccaccgctactccgacaagcacgactgcaagttcgactaccggactgctgccagggacgccattgccaaggctaatccggtggtgaaggcagacaagctcgacaagatctagggggggttccctacggttggtgtcaggaagattgtaaaccgcggtaactcgtcatgcggaactgctgccttgccccccgcgcctttctcttccatgtttgctgctacaatcttgttgttgggcattgcagtgcacggtgcacacttgtgtagcccgcctcgagaattctcctgcctctgcatctggtcagttcaaaaatgatttgcatgttggctatgttgtgtaagctctatttatggtggtctcggtgagacgggtatttggcttcacagttatctagctatgtgatgtactgttgtcttgtccctgggtattatatggtacactgcagccagtaatagtaatctgcaactgtgcgttaaatggtccttcgttttccg

SEQ ID NO: 27575 - DNA, 833 bp, Zea mays
  Clone ID: LIB4732-053-H10_FLI
cgggatgtactgtacatgtggcccttgtcgtttcaccgtcccgtcccccgagagcgagagggcggcactggtgacgtcattcacctctcggtcgcgtgcgcttcacgcagcggctcagtcagtcctcacaccacgcatctgattctgatcgcaccgccgtcggcccaccgcttcagttggcagttgcgagtggctccaacaatccaccggcaccaacccagcgcggcgccaccggcgacccgtaccccctcccccggagagcgatggcgacggagctgacggcggcgcagctgcgcgcgtacgacggcaccgacccgtccaagcccatctacgtctccgtccggggcaaggtctacgacgtcacctccggccgcggcttctacggccccggcggcgcctacgccgtcttcgcgggccgcgaggccagccgcgccctcggcaagatgtccaaggacgaggccgacgtctccggggacctctccgggctcaccgacaaggagctcggcgtcctcgccgactgggagaccaagttccaggccaagtaccccgtcgtcgcccgactcgccgccgacgcctgaactcggcagtctcggtgtaaatttactctgtcctgcctcttgcggtgttcagtgttgtgcttgcttgcttgttgctagttgctttgctacccaataatctgaatggaaggacgtatgtgatgtgcctgctgaatagctcgagctcctagtccttgcatacactgctgtgctaccacatgacatgatgtactcgtgtgtgctttggttgttgtgtaattccatgaccatgaccagtaatctgaataaaaatattgg

SEQ ID NO: 27576 - DNA, 1197 bp, Zea mays
  Clone ID: LIB4732-054-B7_FLI
ccgggacaagtcgccgactcgccatccgcgtcaacaccactgcaaccaccaccgccgtgtgggaggcccaaaccacgcgtctttccccactgcaccaggcaacccaccagcaggccgcagttcacgcttggctgacgaccgacccccattcgttctagccctccctccgacactccgatccattactcgctatggacgcggcgggcggcgaccagctaagcctggccgcggtgcgcgacgcgctggtgcggctggaggactccgtggtgttcgcgctcatcgagcgcgcccggcatccgcggaacgcgccagcctacgcgcccgccgccaccgctggagaacattcgctcgtggagttcttcgtccgggaagcagaggccctcaacgcaaaggctggacattatcaaaagccagaagatgttccattcttccctcaagatctaccctcacctctctttcctacaaagccttccgcaaaggtcttgcacccttttgcttcattggtcaccgtgaatgatgcaatatggaaaatgtattttgatgaattgctcccgttattcactgttgatggtgatgatggcagctatgcacaaacagttgcactggatttagcgtgtctgcaggttctatcacaaagaattcatattggtaaatatgttgctgaggtgaagttcaaagacgctcctcaagaatatagtcgactaataaaagaaaaggacagcaattctctgatggatatgctgacattcaaggctgtggaagagaaggtcaagaagagagtagagaagaaggctaggacgttcgggcagaacgtcaccttggatgacaatgccactgctggtgacagcgagtgcaaggtcgatcccaaagtgctctccaagctgtatgatcagtgggtgatgccactgaccaaggatgtcgaagtcgagtatctcctgcgccgcctcgactgatcagtgatcacccgattagctgtagctgcgaactttatgtacgcgtgggtttcagtttgctttgcacatgccctttatggctttatcgttcaaactcaactacgagagaacgttaccaggatctggccttcgcctttgtcagcctgcttgcccgtcatctgcatgagtagtccaactgtaagtgacgcttggtatggaatgtaagaaaagtaatgcaactggttacatgttatctttaagctac

SEQ ID NO: 27577 - DNA, 1337 bp, Zea mays
  Clone ID: LIB4732-054-E10_FLI
cccgtctttaaaaagtacaccctcgactcgtcctccgcattccccgtttgccttgtttaccattcctccccaaaacacatcctgcgatcctcgaagcctccgccgagcatcgatcatgtcggcctactgcggcaagtacgcggatgagctcatcaagaatgctgcctacatcggcacccctggcaagggtatccttgctgctgatgagtcaactggcaccattggcaagcgcctttccagcatcaatgtcgagaacgtggaggagaaccggcgggctctccgtgagctcctgttctgctgccctggtgccctccagtacatcagcggtgtgatcctcttcgaggagaccctctaccagaagaccaaggatggcaagccttttgtcgatgtcctcaaggagggaggcgtcctccctggcatcaaggtcgacaagggcaccattgaggttgttggcaccgacaaggagaccaccacccagggccacgatgacctcggcaagcgctgcgctaagtactacgaggccggtgcccgctttgccaagtggcgtgctgttctcaagattggccccaacgagccgtcacagcttgccattgacctgaatgctcagggtctggctcgctacgccatcatctgccaggagaacggtctggtgccaattgttgagcctgagatcctcgttgatggccctcatgacactgatcgctgcgcttacgtcactgagacagtccttgctgcctgctacaaggctctcaacgagcaccatgtcctcctggagggtaccctcctgaagcccaacatggtgactcctggctccgactctaagaaggtgacacctgaggtgatcgcccagtacaccgtccgtaccctccagaggaccgtccctgctgctgtgcctgctgttgtcttcctctccggtggacagagcgaggaggaggccaccctgaatctcaatgccatgaacaagctcagcaccaagaagccatgggccctgtccttctccttcggccgtgccctccaggcgagcaccctcaaggcctgggctggcaaggtggagaacgtggagaaggctagagcggccttcctcgccaggtgcaaggccaactccgaggctaccctcggcacctacaagggtgatgctgccgccgacaccgagagccttcacgtcaaggactacaagtactgagttgcttctctttgcgatcccgttgttttggaactcctgcctgcgagtaggttgctgagtgttgtttgcttgttagagcttttatattcggacatgaaaaaaacatgcttcctatgtggatgatggttatctttatattcgtatattaactacg

SEQ ID NO: 27578 - DNA, 1271 bp, Zea mays
  Clone ID: LIB4732-055-E9_FLI
ccgggattggtaaaacatagagataatatattgttgccgtgagcgtgacattgttgtgcgccttccactgccagtagtaatggaagcaggcgccggggaagcagcagcaagcgcaccgcgcagactgaccctgccgtggaaggtgcggctcctgctcctctgcctcgatgtcgtcgccggtctctcgatgcgtcgcgacggcaccatcaaccgctccatcttcaacctcttcgaccttcgtgccaccgccagcacgcgcccggacaggcagggcgtccggtccgccgacgtggacgcgtcgcgcggcctgtgggcgcgcgtgttctggccgtcgccggagtcgtccgcggccccgctcccagtcgtggtatacttccacggcggcgccttcacgctgctctctgcggcctcgtacgtctacgacgccatgtgccgccggttctgccgcgagctgggcgccgtcgtcgtgtccgtcaactaccgcctcgcacccgagcaccgctggcccgccgcgtacgaggacggcgtcgccatgcttcgatacctcgcctccgcgggtctccccgacagcgtcgacgtccccgtggacctctcccgctgcttcctcgccggggacagcgccggcgccaacatcgcccaccacgtggcgcagcgctggacgacggcctcctccccgccgcggtccatccccgtccacctcgctggcgccatcctggtgcagccgtactttggcggcgaggagcggacggaagctgaggtcaggctggatgggaacgtgccggtggtgaccgtgcgtggctcggactggatgtggcgggcgttcctgccggaaggcgccgatcggaaccactccgccgcgcacgtgacagacgacaacgccgacctggcggacggctttccgccggtgatggtggtgatcggtggcttcgacccgctgcaggagtggcagaggcggtacgccgacgtgctgcggaggagggggaaggaggtaagggtggtggagttcccggacgccattcacactttcttcctcttccccgagctcaccgatcatggtacgctcgtggaggcgatgaaggcgttcatacgcgagcaacgcatctgatctaattctgcctcacggtcacggatcaccaacctacgtggacctacatggtccgtgcaaataattttgtttcccatgcacgtaatggtccctacatggtccgtgcaaataatttctctataaaccactattcaagtctcccatatatttattcagttcatcgaac

SEQ ID NO: 27579 - DNA, 1456 bp, Zea mays
  Clone ID: LIB4732-055-H6_FLI
ggtcgtctcaatcccacgccacatcctcccctccttcctccttgggttcccagcccgtgcgccccgcctgtcgcagtcgcagtcgcgccgcagccgccggccatggcctgcctcaccgacctcgtcaacctcaacctctcggacaccacagagaagatcatcgccgagtacatatggatcggtggatctggcatggatctcaggagcaaagccaggaccctcccgggcccggtgaccgatcccagcaagctgcccaagtggaactacgacggctccagcaccggccaggcccccggcgaggacagcgaggtcatcctgtacccgcaggccatcttcaaggacccattcaggaggggcaacaacatccttgtcatgtgcgattgctacaccccagctggcgagccaattcccaccaacaagaggtacagcgccgccaagatcttcagcagccctgaggtcgctgccgaggagccctggtatggtatcgagcaggagtacaccctccttcagaaggacaccaactggcccctcgggtggcctattggcggcttccctggccctcagggtccttactactgtggaatcggcgcggagaaatcgttcgggcgtgacatagtcgacgcccactacaaggcatgcctgtacgcaggcatcaacatcagtggcatcaacggggaggtcatgccggggcagtgggagttccaggtcggaccgtccgtcggcatctcttcgggcgatcaggtgtgggttgctcgctacattcttgagaggatcaccgagatcgccggcgtggtggtgacgttcgacccgaagccgatcccgggcgactggaacggcgcgggcgcccacaccaactacagcaccgagtccatgaggaaggagggcgggtacgaggtgatcaaggcggccatcgagaagctgaagctgcggcacaaggagcacatcgcggcctacggcgagggcaacgagcgccggctcaccggcaggcacgagaccgccgacatcaacaccttcagctggggagtcgccaaccgtggcgcgtcggtgcgcgtgggccgcgagacggagcagaacggcaagggctacttcgaggaccgccggccggcgtccaacatggatccctacgtggtcacctccatgatcgccgagaccaccatcgtctggaagccctgaggcaccccgtggccgtgtcgtgtcggtttgctccgcgtacggcgctggccgttgcatcgcagggcccagcggttgcgcaactattttcccttccccgttctgtttgcttgtactactactctaccgctagtcctgcatagcattttagctagaacacaacaacagccaaaaaaaatattgttgcttgcttcgacgcttgccaccacttccattccatgccgtccgtccgcttccttcctgtgtaatcctcctccaataatagacgtgccatgttgcatcctct

SEQ ID NO: 27580 - DNA, 826 bp, Zea mays
  Clone ID: LIB4732-056-E5_FLI
tcccacccgccgcccgtagccatggtgagccttctctcccgccgcccgacctgtgcgctatcctatcctattcgtatcccgtactgacggcgtcgacgcgcggatggctgtggcagccggtgacgctgcacacgaacctgggcgacatcaagtgcgaggtgttctgcgaccaggtgccccgcacggcggagaacttcctggccctctgcgccagcggctactacgacggcaccgtgttccaccgaaacatcaagggcttcatgatccagggcggcgaccccaccggctccggcaagggcggctcctccatctggggcaccaagttcgcggacgagttcagggagtccctcaagcacaacgcacgggggatcatgtcgatggccaacaacgggcccaacaccaacggcagccagttcttcatcacctacgccaagcagccgcacctcaacggccactacaccgtcttcgccaaggtcatccacggcttcgaggtcctcgacctcatggagaaggcgcagaccggccccggggacaggccgctcgccgagatcaggctcaaccgcgtcaccgtccacgccaacccgctagccctctgaactactactgccttccacctgctcctgcagtcctgtcccgtggctttattaattactattattactcatggaaatcaggatgagtggctttattaattactattattactcatggaaatcaggatgaggagagtaatttcgcgaggacacttttgattgattttgaaacatggatctgtagctctctaaacacttgtagttgtagaactctaaaaaaactttagattccc

SEQ ID NO: 27581 - DNA, 763 bp, Zea mays
  Clone ID: LIB4732-058-B10_FLI
ccgggaaaaaaaaaaaaaacttgctcgctgtgccgcctccgacatcctactttcgtcctcacgagtgaccgataatccgccggcgctaagatgttggtttatcaagatctcctatctggcgacgagctcctgtcggattcattcacctacaaggagctcgagaacggcgtcctgtgggaggtcgagggaaagtgggtcacccaaggtcctgttgatgtagacattggtgccaatccatccgccgagggtggtgaggacgaaagcgttgatgacacagccgtgaaggtggttgatattgttgacacattccgtctacaggagcaacctccttttgacaagaaatcatttgtctcttacattaaaaaatacatcaagaatctcactgctgtgttggagccagagaaagcggatgagttcaaaaagggtgtcgagggtgcaaccaagtttctccttagcaagctgaaggaccttcaattttttgttggtgagagcatgaaggatgatgcgtccgtggtattcgcctattacaaggatggtgccactaatccgacattcctctatttctctcatggtcttaaggagatcaagtgctaggcttgcggcgagattagttacccatgttgggtactatctatgtactattgttatatccacaactatagttgtcctggttgaattgaactcaaaagggtttgtttgagaaaaaactgtccaagattggattgcttgttaaagctctattgttattgaagtgttattgccg

SEQ ID NO: 27582 - DNA, 1431 bp, Zea mays
  Clone ID: LIB4732-058-D3_FLI
ccgggacctcccccagtcccccaccgaccaccggcctccttttccgcaggcacgggtgcacggcacgcggtttccactcgcttcgtccgcgttcggatcgccctcagagtaacagtctagcagagcaagcatgtcgtcgtcggcggagaacgaccccacggtgtcggtgaccgagcgcggaggcaaggacaagcacgaggacggcggcgacaaggagcagggcggcggcggtgttatagctactctactgtctacgagcagaaggaagaggaagacagaattacggaggaaggagcagaggcggcttcattgacaaggtgaaggacttcatccacgacatcggcgagaagatcgaggaggccgtcgggttcggcaagcccacggccgacgtgtgcggcatccacatcccgcacatcagcctccaccgcgccgacctcgtcgtggacgtgctcatcaagaacccgaacccggtcccgatcccgctcgtggacatcgactacctcatcgacagcgacggccgcaagctggtgtcaggcctcatcccggacgccggcaccatccacgcgcacggccaggagaccgtcaagatcccggtgtcgctcgtcttcgacgacatcaagagcacctacaaggacatccagccgggcagcatcatcccttacctcgtccgcgtcgtgctcctcgttgacatccacatcatcggccgcgtcaagatcccgatccagaaggacggcgagatccccatcccttacaagcccgacgtcgacgtggagaagatcaagttccaccacttctccttcgaggagaccaccgccacgctccacctcaagctcgagaacaagaacgacttcgacctcggcctcaacctgctcgagtacgagatgtggctcggcgacgacagcatcgcctccgccgagctcacacagaccgccaagatcgagaagcaggggatcaccaggatgcaggtgcccttcagcttcaggcccaaggacttcggatccgctgtctgggacatgatcaggggaaggggcacgggatacaccatcaagggaaagatcgatgtcgacactcccttcggcaacatgaagctgcccataagcaaagagggtggaaccacccgcctcaagaaggaggacgacgatgacgacgacgacaactgaagtgaggactgctggggcgctgctgttacctttcacgaaacgcagcgaagcagaggatgcggggatcgtcgtcgacctgatactcatacccttagcgctggttaagctcttgcctttagcttatggtgctctgttgttttgcattgtctgaacatcctctcacatcctgagtgtacgttcagtttgaggtttcctgtgttgtccgtctgaattccttcaaactttgcggttggaactggatgaagaataaaattccaacccgtcctggttc

SEQ ID NO: 27583 - DNA, 1635 bp, Zea mays
  Clone ID: LIB4732-060-C8_FLI
ccgggaaaaaaaaagaccgccgcagaccgggagtagtcgacgcgccgtcactgaatcctcagatcacggctagccgtaatcacgccactctgctgactcccggcgagcagtgtaacattttccttcagccatgggcaaggagaagactcacatcaacattgtggtcattggacatgtcgactctggcaagtcgaccaccactggccacctgatctacaagctcggcggtattgacaagcgtgtgattgagaggttcgagaaagaggccgcggagatgaacaagcggtcattcaagtatgcctgggtgcttgacaagctcaaggccgagcgtgagagaggtatcacaattgatattgctttgtggaagttcgagaccaccaagtactactgcactgtcattgatgcccctggacaccgtgacttcatcaagaatatgattactggcacttcccaagctgactgcgctgttcttatcattgactccactactggtggttttgaggctggtatctccaaggatggacagacccgcgagcatgctctccttgctttcacgcttggagtgaagcagatgatttgctgttgcaacaagatggatgccaccacacccaagtactccaaggcccgttatgatgagattgtgaaggaagtctcttcctacctgaagaaggttggatacaaccctgacaagatccactttgttcccatctctggtttcgaaggtgacaacatgattgagaggtccaccaaccttgactggtacaagggcccaaccctacttgaggctttggacttgatcaatgagccgaagaggccttcagacaagcccctgcgtctccccctacaggatgtgtacaagattggtggtattggaactgttcctgttgggcgtgttgagactggtatcatcaagcctggtatggttgttacctttggtcctagtggccttactactgaggtgaagtctgttgaaatgcaccatgaggctctccaggaggcccttcctggtgacaatgttggcttcaatgttaagaatgttgctgtgaaggatctgaagcgtgggtatgtggcctccaactccaaggatgaccctgccaaggaggctgctagcttcacgtcccaggtcgtcatcatgaaccaccctgggcagattggcaacggctatgccccagtgctggactgccacacctcgcacattgctgtcaagtttgcggagctcattaccaagattgataggcggtctggcaaagagcttgagaaggagcccaaattcctcaagaatggtgatgctggtatggtgaagatggttcccactaagcccatggtagtggagaccttttctgaatatcctcctcttggtcgctttgctgtccgtgacatgaggcaaacggtggctgtcggagtcatcaagagtgtggagaagaaggatccaactggagccaaggtgaccaaggctgccgcaaagaagaaatgatgtgtctggctggttctgtgtttgcttgagggatacctagtggaaacgtaaaatatctcgtcttgttcacgtcattgtctgaactatgctcgcaacgtttgcctggtcgatttagaactgttattttcgttaaaaccagagtgttatttaagacttatccg

SEQ ID NO: 27584 - DNA, 364 bp, Zea mays
  Clone ID: LIB4732-061-C7_FLI
cgaggccggccgggagatagatctacatcatctacaccgccgaggcgccgacaaccacttggcgaccatgagcacgggcacggacgccgtcccggtcgccgtggcgccggcgaagcgcccgcccatcaacaagtacgccttcgcctgcgccctgctcgcctccatgaactccgtcctcctcggctatgacatctcggtgatgagcggcgcgcagctgttcatgaaggaggacctcaagatcacggacacgcagatcgagatcctcgccggcgtcatcaacatctactcgctcttcggctccctcgccgcgggcctcacctccgactggctcggccgccgctacaccatggtgctggcggccctc

SEQ ID NO: 27585 - DNA, 1500 bp, Zea mays
  Clone ID: LIB4732-063-E5_FLI
ccggggcacgtcttccatccccggcggcctttgtgctagtacccacctcgcgatcgacctccccctagctcgaactcaaagatggccggcaccacaaggtgtagtatcagaagcagcaacgctcgcggcttgcaattggccctgccatgcttgctgctgctgctcgcgggcgcaggcgtctccaacggccagctccaggtggggttctactccaagtcctgcccggacgccgagtccaccgtggcgtccgtcgtccggcagtccgggtccgccgaccccaccatcctcccggcgctcatccggctccagttccacgactgcttcgtccgcggctgcgacgggtcggtgctcatcaagggcggcggcaacaacaacaacaacgccgaggtggacaacggcaagcaccagggcctccgcggcctggagatcatcgagggcgccaagacgcagctcgaggcgcagtgccccggcgtcgtctcctgcgccgacatcgtcgtgctcgctgcccgagacgccgtcgccttcaccggcgggccgtcgttcgacgtgcccacggggcggctcgacgggaaggtgtccaacctgcgggacgccgacgcgctgccggacgtgcacgacggcatcgacgcgctccgctccaagttccgcgccaacggccttgacgagaaggacctcgtcctcctcaccgctgcgcacacggtgggcacgacggcgtgcttcttcctccaggaccggctctacaacttcccgctgccgggcggcgggcggggctcggacccgaccatcccgccgggcttcctgtcggagctcaaggcccggtgcgcgccgggggacttcaacacgcgcctggccctggaccgcggcagcgagaacgtcttcgacacctccatcctccgcaacatccgcaacggcttcgccgtcatcggcaccgacgccgcgctctacaacgacacggccacggtcgacgtcgtcgactcctactccggcctgctcagcaacttcttcgggccctacttccggcaggacttcgcggacgccatggtccgcatgggcagcatcggcgtggtcaccggcagcaagcagggcgaggtccggaagttctccttacagcaaggccatcaagaaacttcgcggcatttctcttggttccatgcccatccatggatggttggctggcgggcacaagctggcaagagctttattgcactggttctgtgttttattgggaaaaggactgctggtctgcaagaggagtgtagcatggcgccactgcactatcatgcaactgcaaagtggtgtagcattcatggcgtttttcagcttctagatctggcgtgtctggctagcttcagaggccgcattttgttttcgccaagatttgaactatgggtactttgattttggcttttagtagtgtaccagcaggagctagctagctacctggcagttacacctagatataaaagtttgctggactgaacactgaagtacagttttagt

SEQ ID NO: 27586 - DNA, 937 bp, Zea mays
  Clone ID: LIB4732-065-E6_FLI
ccgggttgttgcctcgttgaggaatattccacatcccctcgtttccggcaaaccgcaatgaagtctctgacccccaccgccgctggctccgccgcagatttttccgactctctgccctccccgatctcccctgcggcggtgccatgccattccagccccggccgccactactacctcgccgtcgaccgcacccagttcaaaatgaggacactcttggagctcctgggggttgtcgcggatcgccgtggtgggctgccgattgcaacatgtgtttcctcccgtgatgagcttgatgccgtctgtgctgccgtcgcaaacctcccctttgtgtcagcgtcacctctgtatagtgatcaggctgaagcagagcgtgcatctattcttgagaactttcgtcaagaaacaactcagtggaataaaactgctaaagctaccaatattgccgaaagttctaagcttgaaagtactggctctaaaataagcattatagttgcaacagatgcttgcttgcctcaggcagcgatggcagaggcaccccttatggctcgagtgctgataaactatgagcttcccacaaagaaggaagcttacttaagacgcatgtcaacatgtttggcggcagacggaattgtgattaacatggtcgttggtggtgaggtggttacactcaaggctttagaagagaacagtggtctgcttattgctgagatgccaatacatgtttcagaaatattatgaccgttccagttgtacaacatttcagaagttactgttctgattgcacactaactactcatggtttacttctactttaatttttgaattgcttttcatgtttcagaatgttctcaaattatatctctaaagcattagaataatgctcattgcttcttttttcctctgtataagaaatgatagaatatagtcatggttcaac

SEQ ID NO: 27587 - DNA, 1070 bp, Zea mays
  Clone ID: LIB4732-066-F3_FLI
tcgaggccggccggggtaacgttgtggagagcggtaccccgcatctcctagccccagctagatcattggacacatatcgaaacagctctagctagcgcgctcgtcgtctaacctggcttccggcatggcttccaagcagatcggagtcttgacctgcttcattgccatcaccgctctcgccttccgtccctgcgcatccgccgtgcccatggacggtggctggtcgaacggcggcgccacctggtacggcccagccaagggcgctggatccgacggtggtgcgtgtgggtaccagggtgccgtcgaccagcctccgttctcgtcaatgatcaccgccggcagccaatccatcttccaggacggcaacggctgcggcacctgctaccaggtgaagtgcaccggacacgcgtcgtgctccggcagcccggtgacagtggtcatcaccgacctgtgccccggcgctgcgtgccaggtggagcccgtgcactttgacctgagcgggacggcgttcggtgccatggcgaagcccggccaggccgaccagctccggaacgccggccgcctgcaagtccagtacattcgggtggcgtgcaactggaacggcttggacatcgccttcagggtggacgccggctcaaacgccaactacctggccatggccatcgagtacgagtccggggacggggacctgcgcgccgtggaactgaagcagagcggcgcggcggcgtgggcgcccatgcaacgctcctggggcgctgtgtggcagtacaagtccggctccaccaatctgcaggcccccctgtctgtccgcctcacctcgggctccggcagggtcctcgtcgccagcaacgtcatccccgccggatggcagcccggcagaacctaccgctccgtcgtcaacttcggaggaaaccatgcataacgagtgatattaaggatgtcgtgtgcagatgtctccatccaacaataagatgcatgcatatatgatctgtgtggccagctagctgctagaccaccatctcactccctgagtctgctgatgctcagccaataaagaatcattccatctc

SEQ ID NO: 27588 - DNA, 1008 bp, Zea mays
  Clone ID: LIB4732-070-E2_FLI
gtccaagctcggctgccccaagtacccggcatgcatgtgtagcagttcgcccacgctgcataaacaactctatctcaacggcgacgacgctcccatcttaacagccaggaagctggcgtcttgcttgtccttgttcttttcccacccggctacccccgtcgtcgccgccgctttccccgtggtttcagagctcgagtcggctagctaggccgcctggctaatctccctgccttctataagtacagagatcagggaggcggcacactccatccactgaccgctcatggcgaaggtccacctctacgtcgccgcggcctgcgccgtcgtcctcgcgctcgccgccccggccctcgccggcgaccccgacatgctgcaggacgtctgcccggctgactacgcctccccggtgaagctgaacgggttcgcgtgcaaggcgaacttttcggcggacgacttcttcttcgacgggctgaggaaccccggcaacaccaacaacccggcgggctccgtggtgacggcggccaacgtggagaagttcccgggcgtgaacacgctgggcgtctccatggcgcgcatcgactacgcgccgggcggccagaacccgccgcacacgcacccgcgcgccaccgagatcatcttcgtcctcgagggcacgctcgaggtcggcttcatcaccaccgccaacgcgctcttcaccaagaccgtcaccaagggcgacgtcttcgtcttcccgcgcggcctcgtccacttccagcagaacaggggccacggccccgccgccgtcgtcgccgccttcaacagccagctccagggcacgcaggccatcgccatgacgctcttcggcgccgtgccgcccgtgccctccgacatcctcgccaaggccttccgcatcagcagcggcgaggtggaccacatcaaggccaacttcgcgcccaagtagagatccaatgtctgcattcccttgattttctcaataataaatccccgcggtgtgcagttcgatttgct

SEQ ID NO: 27589 - DNA, 1121 bp, Zea mays
  Clone ID: LIB4732-071-H11_FLI
ccgggattccgtcgtcgtcatcagcagcttctgcttgctctggggggaaggagagagagagagagcgagagagagatctagtagagaggctagtaggtggtcctcgaacgaagatgttggcggtgttcagcgggcaggtggtggaggtgccggcggagctggtggcggcgggcagccggacgccgtcgcccaagacgaaggcgtcgcagctggtggggcgcttcctggccgcgtccgagccggccgtgtccgtgcagctcggcgaccacggccacctcgcctactcccacaccaaccaggcgctcctccgccccaggtcgttcgcggccaaggacgaggtgttctgcctgttcgagggggtgctggacaacctgggtcgtctgagccagcagcacgggctgtcaagcaagggcgccaacgaggtgctcctcgtcatcgaggcctacaagacgctgcgcgaccgcgcgccctacccggccagcttcatgctcgcccagctcaccggctcctacgccttcgtcctcttcgacaagtccaccaactccctgctagtcgcatctgaccccgagggcagggtgccgctcttctgggggatcaccgccgacggctgcgtcgccttctccgacgacatcgacatgctcaaaggctcatgcggcaagtcgctcgcgccgttcccgcaaggctgcttctactccaacgccctcggagggctcaagtgctacgagaaccccaagcacaaggtcaccgctgtccccgccgacgaagaagagatctgcggtgccactttcaaggtggtggaagggtctactgtcctgacggcgctgcactgatcgatcatcagctggcggaggcgatgcgacgatgatgcagaactttgtacatgcgtggtgggtgtgtaacatagtgtggctggcaacaagccatgctcatgcaaaccgatgaatctatctctgtatcatgcatcgatctcggttgcttgctagtcccgactccagactccagacatggctatatatagctggtgctaataaataggagtataatcgtcatatcgatcgattgcgtgtggaatgccaatcaagtgtgtaatctgttccaaataacaaacctctgttcctctg

SEQ ID NO: 27590 - DNA, 825 bp, Zea mays
  Clone ID: LIB4732-072-C10_FLI
atctcacggctagctagcacaagcatagtgcaggggcttggcatccaaggcctgagagccatggcatccaaggccgtcctcttcttggctctcaacctcctgttcttcacggtggccaacgcctgcggcagctgcccgaccccaacgcctcctgctaccccacccccttcgtccagcggcaagtgcccgctgaacgcgctcaagttcggcgtgtgcgccgatgtgctcggcctcgtcaaaggcgaggctggcaaggtgcctgccgagccatgctgtaccctcatcaaaggccttgcggacttcgaggccgccgtctgcctctgcacggccatcaaggccaacgtgctcggcgtcgtcatcgatgtccccatcaagctcagcgccctcgtcaactactgtggcaagtgcgtgcccaagggctacttgtgcgcgtaagcagcttccggcggtcacacgctcgtagctgttcacgtacgagattacatatgcacgcaccctgcatggcacgaatgcatgcattgtgtctgctgatatatctctcctgtctcagttgcattgtgcacctttcggttctacaaaacctagaaccattccagccaaatacttgtcagttcaattcgcatgtattgtctcttgttgaattcccatttttttttgtatttggtcatttcctcgtaagagtccgacaccttctccaaggaaaaagggcagtgttgagagtcattgttgtgtatgtaaaaccaaacacttgagcttgtagtaccttattcgatttcttatttattcctgtctttcggagtgagaataaagccatctggtcaatcg

SEQ ID NO: 27591 - DNA, 821 bp, Zea mays
  Clone ID: LIB4732-072-C11_FLI
ctcgaggccggccggggaattcggaggcgcagcgccaccaacttccaccattttggcaaccccgcagggaaaaaaaaagggcgaaacgaggccaccagctcaccgccgagcggaagcggcgccgagcaaccaacccctctcctcgtccgccgccgtctccccggaccatggccttccccaccgtgctgaaggatctgatgtatgctgactctcatgaatgggtgaaagttgagggtgattcagcaaccgtggggattactgactacgcccagtatcaattgggtgagcttgttgttgtggagctaccagaagttggcatcagtgtatcccagggaaagacctttggttctgttgagagtgtgaatggagccagcgatatctattcaccagtgtctggagaggtggttgaagtgaacgagaaactaagtgacttgcctggagtggtgaatacaagtccatatgagaagggatggattatgaaggtcaagctcagcaatttaggtgagctcaattcgctcatggatgatgacaagtactcgaaatactgcgaagaaggcaaccattgaagaaatcggagtgtcttctgaggaccaggacctgtttttcaagctttatcaattatcactggttatggtctggagaccagttgtgacaaattggcaaggttcatcgcaaggaataaatgttaggatttgccaatcctacgagggcatgggaaatccaagtttgtgttgtcaatgacgtggtcatatttgatatttctttgtagttgtaatctcgtgaattccttctttttcttaaaaaaggactctttttgatcc

SEQ ID NO: 27592 - DNA, 937 bp, Zea mays
  Clone ID: LIB4732-072-F2_FLI
acctcctaaccgcacacagtcgaacattgttgcttgctcggcccagatctccaatggccgccgcacccgtcgctccgccgctagcctccacggacgacgagatcgtctacgagtccatgccctgcattcgcgtctacaagaaacgcgtggagcgctacttcggtaccgagttcgtcgccgcctccacggacgccgccaccggcgtcgcctccagggacgtcgtcatctcccccaacgtctccgcgcgcctctacctcccccgcctcgacgacgagagcgccaagctccccatcttcgtctactaccacgggggcggcttctgcctcggttccgctttcaaccccaccttccactcctacttcaacagcttcgcgggccttgccaacgttctcgtcgtctccgtcgagtaccgcctggcccccgagcaccccgtccccgcgcctactacgaccggctcagggccagcggatggtccggcgaggcagagatttggcaggcgcccaacaagggacacacgttccacctcctggagccgtgctgcgacgaggccgtcgcgcaggacaaggtcatcagcgacttcctcaaccgctgactcgcatcgccggtgatggcggcgttgttgggcttggatcaaatttagcttcgttcattgtatacctggagattggaataactgcagcttcgtcaccggtgaagaatgctggcgctacactacactcctactagtacgtttcaggttcaaagttgtgtttgtattatttgaaattgggtctaaggatgaagggggctttgccattgttagtaatttgggtacgatgatacagtcatatgtcatacacatgaaattatacttgttagacacacgtaatttgttgaaacatttattccatctttcactacttacaagtacaactgaaatgaaaatcgcctcattatt

SEQ ID NO: 27593 - DNA, 850 bp, Zea mays
  Clone ID: LIB4732-073-H12_FLI
gaggccggccgagacgaaccgtcgcccacacgctcgcgcgctcggaatactccgaggagggtgctcgaggagggcgacggttcgtctcgctttcgtctcgctgcgtgcgctctctatcactcaccctctctctcctcatcagatccggccacttcctgctcgcctcgccgccggtcccgcgccccggagccctagagctctccccgcggcgggaccgccagagtcctcgggcgcgtggagaaaatggaggcggcgctggaggcggcgcgcgccaaggacaccaaggagcgtctggccggggtcgagcggctgcacgaggtgcttgacgtcgcgacgcgtcgcgggctgacggcggccgaggtcaccgcgctggtggacccctgcatggatctgacgcgggatgccaacttccgcatcgcccagggcggcctccaggcgctctccgtcgccgctgtcgtcgccggcgaccacttcaagatccacctcaactccctcgtctccgccgctgtcgagcgcctcggcgacagcaagcagcccgtccgcaacgccgcgcgccagctcctcatcacgctcatggaggtgagctcctttcgtcggcgctctcagtggcctgtcgtctctcccgggaaatgcatgtagctggggagctagattaagttgcgagttcgaactaagagatcgagcaggagcagattggggatttgaggcttgttttttttaggtaggtcgggtggggcacgatacattgcatagttgtgctgaagtgaggaatccaaggtgtattcggctgaccattatagattgacagacattacatttaaatgggtcaatggtctaacatttttgtaag

SEQ ID NO: 27594 - DNA, 948 bp, Zea mays
  Clone ID: LIB4732-073-H7_FLI
ccgggaaaaccccggtgccaccgacggcggcggcgacgaatcgagcaggcgcggcggcgacgacgaagaatcgagcaggcgcggcggccatggcggcggcggttgagagcgtggtggtggtccataacgtggcgaagcggcacaacgtggggacgctggcgcggagcgcgacggcgttcggcgtcgcggaggtggtcgtcgtcggtcgccgcgatgtcagcgcctttggcagccatggcgccacctcgcaccttcgcttccgtcacttcgtctctctcgcgctcgcccgcgcctacctcaaggatgagagaggatgtgacatttgcggcgtggaaatcaccgacgacgcgcagccggtgaccgcccacccgttccgtcggagcactgcgttcctcttcggcaatgagggcactggactttcacaaaaagagtgcgagatctgtgacttctttgtctacatccctcagtatggtggtggaactgcatctctcaacgttactgttgcagcttcaattgttctccaccactttggggtctgggctggctttactgaacgaggccgagagggcaacaaattcgtggtggctgaaagaccacaggggcactcgaggggactttactgtacagactcggttgaagcagtggttgaagagcggaaaatgcgaaaagaaaatgcctgcgatgtactcgaggaaaatgggtgcagccaccttcaggaatcaaacggtctagacttgatgtttgcagactagagtatgacaacatgttatcccatctctgatgttaaatctactccctgcatccgcattgatggcacaaagttgcaatacagggcttatgagagagagaaatttatcctgacacatgtatggttcacatttggttgtcttcttaaaacaagacgcgacaagatatttttttacataatctacaactcacagttatttc

SEQ ID NO: 27595 - DNA, 1138 bp, Zea mays
  Clone ID: LIB4732-075-C11_FLI
ccgggaagccgtcatcgcctcacacaccttccttcgacaaccttccataggcgcaatcacaggaatccccacggcctcgccccagatccctaaaccccgcctcgtctctcatggaaagtgcgtcctctacgctcggctctctccgcgtccgcgacagcccgctatccatggaacgtgggtcctctgccctggatcgccgcgtcggccctcgattcgcgtccgcgacagcctaatcccgcacatggattgggtacccctctgccccgaatcgtcgcccccgcccggcatcagcgtccgcgtccgcgttgtggtgtccgcagtctccatggaaggtgatcccgcgtgtggattagcattagcagatgaagaggcggaatgttcttcttgggatagcgacgatgagtaccagaaattcatccaaaacatgaaccctccaagggtcaccattgacaacacctcgtgtccaagtgctacagttattcatgtggacagcaccaacaagtatggcatactgttggaggtagtgcaggtcctcactaacctcaagctcatagtcacgaaggcatacatatcctcaaacagaggatggttcatggatggtaggagagccattggtttctttccttttcgtcaaaatggaaagtgtccaccgatgaaggagaagccaaagcacaggagcatggtgctatgttcatggagaccagtgcaaaagctgggttcaacgtcaagcccctgttccgcaagatcgctggatcccttccaggactggacgcactttcgtcaggaaagccggaagacatggtcgacataaacctcagacctgccagcggttcgtcggcttcaggtgcagccgcgcagctggagcagaaatcaggcggttgctcttgttgagacttcgacagttttgtgtttagagaagctacaacagtactgcaacatcgagttaagtactttcagagagattgtgacgaagagtgttttcgcccagacgtccagtagtgatatactgacatccatagcgagaagccaatttctgtgtacagatttgtttagcaagctatcatatgctaggatataactgtttgatacacaagggacaaaatctgtggaggtaagggcatctcacatttttttgaag

SEQ ID NO: 27596 - DNA, 1394 bp, Zea mays
  Clone ID: LIB4732-075-C7_FLI
ccgggacgctagctcctcgctatctccgtcctactcctcctcatactttaccgcaaagcgcgcaccacgaattgcacctacccatttcgctaatctccctccacgagccgaccaaatcgaatcgattcgcgcgcagcgcgcccgcgcagcgattgccggcgatggcgagcctcaccctgccgccggcgatggcgaacccacggcaggacgccatcgacctccaaaaggccttcaaagggtttggctgtgacagtacaacagtgataaacatacttactcatcgcgattcagtgcagcgtggactcattcaacaggaatacagggctatgtatcatgaggaactctcccatcgcatttcatctgaactcaatggaaaccacaagaaagctatgttgctgtggattcttgatcctgctggacgtgatgcaactgttttgagagaagctctaagtggtgacactatggatctgagagcagccactgatattatatgttccaggacaccatcacagttgcaaataatgaaacagacttattatgctagatttggtacttatcttgagcatgacattggtcaccacacatctggcgatcaccagaagcttttacttgcctatgtggggattccacgctacgaaggtcctgaggttgatcctaccattgtgacacatgatgcaaaggatttgtacaaagctggtgagaaaaggctcggtacggatgagaagacctttatccgcgttttcactgaacgcagctgggcacacttggcatctgtttcgtctgcttaccatcatatgtatgaccggaaattagagaaggttatcaagagcgaaacatctggaaactttgaattcgcacttttagctatcctcagatgcgcggaaaacccagcaaagtattttgcaaagctcttacgaaaggccatgaaaggtctaggcactgatgacaagacacttataagggttgtggtgacgaggactgaaattgatatgcaatatatcaaggcagagtacttcaagaagtataagaagccattagctgaggctatccactccgaaacatcaggaaactatcggacattccttctttcacttgttggtcctggacattaggttatgtttcgaccatgggacatgatattccacccatccaccctaaatgcagcgacctacctggaaaacttatgatgttgccatttgtcagtggtgactcgtggattcgtctaacttccacatatgcggtatctagtatgcttgactaaagtatccgtgtttaagtttgtatctgggtttcttgttggaaaattctgtgcgggggcacaacagctgttgttggtcacagtaggcttgacttgtgtctccatgacatcaataatattatgtcatgttcgtgtg

SEQ ID NO: 27597 - DNA, 1346 bp, Zea mays
  Clone ID: LIB4732-076-D4_FLI
tctttcttccgctcgccaacacggcgcaaatccccacaaccccaggccggcggggaggaggttcctctgacgtactgcagggacagtagggtcactgcacgcgggccctgtcgcacgcgggggccacgcggcagtgccctctccccacgtcagaggatctcgttccggccggcggacgggcggactcccacccacgaggccacgacccacctcctcgcgacgacgtgctcggctcgcttccagccacctggctcgctgcccgcctcggaatccccgccgcgagatcccgtcccccgggccgggaggatggaggtgaaaacggtaaaagttagcaacctttcattaaatgctttgaaaagagagctcacagagttctttagtttctctggggatatagaatatgttgaaatgcaaagtgaatctgaatggtcacaacttgcttatgtcacatttaaagactcacagggagcagacactgctgttcttctctcgggggcaacaattgttgatcgtgctgtcattataactcctgctgagaactatcagctgcctcccgaagcacacaaacaattatcgggagcaaacgtccctactgaatcagcagtcaggaaggcagaagatgttgtcagcagcatgttgggcaagggatttgtgctcagcaaagatgctctcaacttggcaagatccttcgacgagcgtcacaatatcctatccaatgctactgccactgttgcatctctagaccgccagtatggcctgagtgaaaagatcaatctgggaagggccattgttggcagcaaggtcaaggaggtggatgaacgctaccaggtctcagaactcacaaagtctgccttggctgctgctgagcagaaagccagctttgcaggctctgctatactgagtaaccaatatgtctcatttggtgcctcttggctaacaagtgcattcactttggtaacaaaagcagcaggtgacatgacctccatggccaaagacaaggtagagagagctgaggaggagagaaaggccatcatgtgggaggagaggaatgggctggtgagcgactatgcaaagatccatcttgacgagccctcttcatgggagcccgcagttctgcctttggaatcagtggatgaacagaagctccaggctgtctgatccacaaaaccgaatgccaatcgttgtcacacgttttctcttacttcggagaaagagtggcgctaccagcattgctgctctaaactactatgtgtgtgtgaatggagtactactgtacttgtgtctacttgagtactacagaaacagaatacaacttccttctttagatacagaatgatttaatatag

SEQ ID NO: 27598 - DNA, 1222 bp, Zea mays
  Clone ID: LIB4732-077-C3_FLI
gaggccggccggggaaacggcggccgaggccgcaagcttctcactggccgcaagcaaaccgaacgaacccaaccgaagcgagagctgagcaaggcagaggcggcgtgaccggcgatggagcggctgcagcggatctttggcgcctccggcatggggcagccgccgacggactcgccgctgctcgattcctccgagcaggtctacatctcctccctagcgcttctcaagatgctcaagcacgggagggctggggtgcccatggaggtcatgggcctcatgctcggcgagttcgtcgacgactacaccgtcagggtcgtcgacgtcttcgccatgccgcagagcgggactggtgtcagcgtcgaggccgtagaccacgtcttccagacaaacatgcttgacatgtttaagcagaccggcaggccagaaatggttgtaggttggtatcactcacatcctggcttcggatgctggctatcaggcgtcgatatcaatactcagcagagttttgaagctttgaaccccagagccgttgctgttgtgatagaccccatccagagtgtgaaggggaaggtggttattgatgcattccgcctcattaatcctcagaccatgatgcttggccaggagccacgtcagacaacatcaaatgttgggcacctaaataagccatctattcaggctcttatccatgggctgaatagacactactactcaattgcaatcaattaccggaaaaatgagcttgaggagaaaatgctgttgaacttgcacaaaaagaaatggaccgatgggctaattttgaagaggtttgacactcactcgaaaaccaacgagcagactgtccaggaaatgctaaacctagccatcaagtacaacaaggcagtgcaggaggaggacgaactgcctcctgagaaacttgcgatagcaaatgtgggtcggcaagatgcaaaaaagcatttggaagagcatgtgtcgaatttgatgtcatcaaacatagttcagaccctaggaaccatgctcgacacggttgtcttttagtctactaataatattgttgtcccaaactgaaacatagccacactatcgaagcacacgtgcaatgagcttgacgccggatacattttggttctaaggtttgtttatgaatggatttgtctacatttcattgtcgttaaacttcctaccttttctatcaaagcttaagtgcgttctagttatgttt

SEQ ID NO: 27599 - DNA, 689 bp, Zea mays
  Clone ID: LIB4732-077-D6_FLI
ccggggttccttcttgcttctccatcgagttggattgggttcaaagttgggcttttggacagctgtggtgtgcacggcagctctgtgacttgtgaggaggaagggagcggatccatggcgtcgaagcggatcctcaaggagctcaaggacctgcagaaggatcctcccacctcttgcagcgcaggccctgttgccgaagatatgttctactggcaggcgacgattatggggccatcagatagcccatacgctggtggcgtatttttggtcactattcactttccaccggactacccattcaaaccaccgaaggttgcattcaagacgaaggtttaccatccgaatatcaatagcaacgggagcatctgtcttgatatcttgaaggagcaatggagccctgcactgacagtttctaaggtcctcctctcaatttgttcccttctgacggacccaaaccctgacgatccgttggtcccagagattgctcacttgtacaagactgatcgcgtgaagtacgaatctactgctaggagctggactcagaaatatgcaatgggctgacaagctatgggtctctcatagacctaaagcacgtactgccttctgtaactgaaaccagatgtctaaattaatttgtccattcgtgcatcgaacttctgatatataatggaaggagaaacattgatagg

SEQ ID NO: 27600 - DNA, 1284 bp, Zea mays
  Clone ID: LIB4732-077-E12_FLI
cgcctcctcgcttctgctatccctggccatcgagctcgcggccgtgctcgtctcagtgtcggcgcagcagaaattcgggatcaactacgggcagatcgcgaacaatctcccggacccgacgcaggtggcgaccctcctccggtcgatgaacgtgaacaaggtgaagctctacgacgcggacccccgggtgctgacggcgttcgccaacacgggcgtggagttcatcatcgccgtgggcaacgagaacctgcagaccatggccggcagccccgccgcggcgcggcagtgggtggcggcgaacgtgcggccctacatcccggccacgcgcatcacctgcgtcaccgtgggcaacgaggtcttctccggcaacgacacggccacgatggccagcctcctccccgccatgaaggccgtccacgcggcgctcgcggacctgggcctcggcggccaggccaccgtctcgtcggcgcactccgtgaacgtgctcgccgccagcttcccgccgtcgtcgggcgcgttccgggaggacctggcggagtacatgaagcccatcctggacttccacgcccagacggggtcgccgttcctcatcaacgcctacccgttcttcgcgtacaaggcgagcccgggcagcgtgtcgctgccgtacgtgctgttcgagcccaacccgggggtgcgcgaccccagcaccgggctcagctacgacaacatgctgtacgcccagatcgacgccgtgtacgccgccatgaaggccatggggcacacggacgtgggcgtccgaatctcggagaccgggtggccgtccaggggcgacgaggacgagaccggggccacggtgcagaacgccgccgcgtacaacggcaacctcatgcagagggtcgccatgagccaggggacgccgctcaagcccaacgtgcccgtcgacgtctacgtgttcgcgctcttcaacgagaacatgaagccagggcccacgtcggagcgcaactacgggctgttctaccccaacggctcgccggtgtacgcgctcagcgccggctccggcggcggttcaggtccgggcgggtcgctcaacccgtactacacatccatgttctcctcctcgtccagatccgcggtgagcgcgacctttttgagagagagagtgatgctgttactgctgctgcaagcaactgtaatactccgacactactgctagtcagcgaataccttgtaatcttgtatacgaaaaaaaaaatgcatctcaattcaacccatagggtaggccttagattcgaaaatttggcg

SEQ ID NO: 27601 - DNA, 1092 bp, Zea mays
  Clone ID: LIB4732-080-H6_FLI
ccgggaaatctgacctgcattgcgagctgcggctgtcccccgcgattattccaagctccccgagcccatggccgcaatggcgatggctccagctgccgtgtcgttcctggcgctggcgctgctgatgctcagtgacgcggaggccaagttcctgcccaacaacttcaccgtcgttggctccgtctactgcgacgcctgctccaacaataccttctccaagcacagcttcttcctgaaaggggccagggtgctgatcaagtgcagcttcaaggtgaactcgacgtcgtccgaagggctgtccctggaagcggagcgcaccaccgaccagcacggcgtgtacaagctggacgtgccccccgtggacggcttcgagtgccgcgagggccacgagctccggtcggcgtgccgcgccacgctcgtccggagctcctccgccgcctgcaacgtcccgggcctcggggcctccacgcagcacatcgagctccgctcccgcgccaccagcgcctgcttcctcaacctcaacgcgctcaacttccgccccgccaaacgggacggcgcgctctgccacgcccaagggggcgacgcgttcggctcctcgcttttcttctggcccttcctgccgctcttctggccgccgttcagggtcccgggcggcggcgccggcgggacggtgtcgttcccgtggccgttcccggtgccggcctggctggtgccgttcctgcggccaccgttcttgccattcccgctctacgagccggcgccgtcaccaccgccgccgttctaccgtttcccgcctccccgagaagcggtctctcggccttgaaatcccatgagccaagaagcttgtcaagatacgctattttagcctttcttggcattagattgtgtgttagtgatgagaaactgatcagaggtcgtgtgatatttggcccggccccatgataggttgacctccgtgcgcatgtaaccgatgctagtactgatgctgccatgtagttcattgtgctcgtgaactgatgaacacgtgtggtctgatatttagtagtggcaacctggcaatggttacttgttacatctcctatttgaaggttc

SEQ ID NO: 27602 - DNA, 586 bp, Zea mays
  Clone ID: LIB4737-002-C3_FLI
gaaagtttcccgcccgagcccctcgaaccctagtaccatcaccgactggcgacgcctcgccggcggccggcgagatgcacatcaaggaggtaactctcgaggggttcaagtcgtacgcgggacggactgtggtgccggggttcgacccgctgttcaacgccatcaccgggctcaacggttccggcaagtccaacatcctcgactccatctgcttcgtgctcggcatcacagatctccgtcaggtacgcgctgcctcgctccaggagctcgtctacaagcaaggccaggccggggtcaccaaggctaccgtgtccatcgtcttcgacaattccgaccgctcccgctccccgctcggctacgaggactccccggagatcactgtcacgcgccagattgttgttggtggaaggaacaagtaccttatcaatggccatcttgcacaaccttcccgggtgcagacccttttccactcagtgcagcttaatgtaaacaatcctcattttctaattatgcaagggcgcataacaaaagtgctgaacatgaagcctccagaaattttgtcaatgttagaagaggcagcaggtac

SEQ ID NO: 27603 - DNA, 215 bp, Zea mays
  Clone ID: LIB4737-002-F10_FLI
gttcatcattggaccagagaaggaggtcaggaaagctgaggccatctttcgaggccgaatgctggagttctagagatgttaccctttgcgatacaggtttcaactgctttatattttgaacgtaaaaaggggaatatccaaaaggtgtatgcgggaccgtggatcccttgaccgtctgtgaatcatgaaaacaaaataaaggatttcaacttggc

SEQ ID NO: 27604 - DNA, 319 bp, Zea mays
  Clone ID: LIB4737-002-F8_FLI
gtactcatggaacaaagcatcttcatgatcatttgaagatttgtgttttgcgcaagataaagctcactagccagaacaagactatgtcacaatcatctttgaggtttagttcacaagaaggggggaaagtatccgtggagagctacacttttgatcctgaagttgctagaaaggagcttgctgctatgatagcattgcatgaatatcctttgtgcatcgctgagcatattggctttcgtcgatttgtgagtgcatgtcagccattattcaagatggttagcaggaatactattagaaaggacattatggatgcatatac

SEQ ID NO: 27605 - DNA, 813 bp, Zea mays
  Clone ID: LIB4738-001-A2_FLI
tcgaggccggccgggaacggctaattgaggggttgatggaggggccatcagatccaagaagagggaagagcaccaaggaccttcggcgcccgttcaggatccacatcttcccgagcgagttcttggttgacctcttcccccttcggaccacctccaaggctcttggtgtagcttgccactctcaccaatcaagttttcatgtctgatctcgacattcagatcccaactgccttcgatcccttcgctgaggccaatgctggggactctggtgcggcagcagggtcaaaggactacgttcacgtgcgcatccagcagcgtaatggtcgcaagagcctgactaccgtccagggattgaagaaggagttcagctacagcaagatcctcaaagatctcaagaaagagttctgctgcaatggtacagtggtccaggacccagaacttggacaggtcattcagctccagggtgatcagaggaagaacgtctcgaatttcctcgtccaggccggcattgtgaagaaggagcacatcaagattcatggtttctgagcaaccgccgggtccatagcaaaccaaccctgcatgcagggccagcttattatatataatatctgaggtggagcatatctatctggctgtgtactacaagcaggcctagtacgccgcctgcgcgttcctcctattacacataacacatatagccccctccctgcgtgtatgcttgttgccgtcgtgtcgaatcttgtactacgaggctccatcgaacatcgatggcttgcttctttatcagaacatgtttgaataaacgctatttgg

SEQ ID NO: 27606 - DNA, 626 bp, Zea mays
  Clone ID: LIB4738-001-H8_FLI
ccgggcacagtccagagtgacacacacttacacttgaagctctcattggtcctccgtcctcctcctctcctacggtcctaccactctaccagcgacgatggccgcgcagcggcgtcggtcgggggcggcggacgtggcgtcgtggtgcgccctgctggcgctcgtgatggttgtcggatcgctcgccgggtcggggaaggaggaggagcagcaatacaacagagccaggctggtggtggtgcgcgggccgcggctggccgcgcggccgtgcgacgagctgtacgtggtggcggagggggagacgctgcacagcatcagcgccaggtgcggcgacccctacatcctggagcggaacccgcacgtccacgaccccgacgacgtcttccccggcctcgtcatcaagatcacgccgcgcgccggcggcagccccaactccggcgacgctaactagtaaaacagagatcgcgcgcgcaatcatacctgcatgtgtgtcgccccggaacctcctgccgggttgaacgcggcgccgacgtgagcggtcggggcgtcgggcacgggcaggagcgcagagcgctctctcgttgagttccagtcgtgtcgtcctgtacatactgcatgtgggaaag

SEQ ID NO: 27607 - DNA, 882 bp, Zea mays
  Clone ID: LIB4738-002-A12_FLI
gcacatcccattcccctcgtctcatctcatctcaagagcgacaagagagagaggaagagaacaagcgataagctcatctcgcacgcaagatgcgggctccaaggggcggaggcggctgccgcggcggcggccaggagcatgtggaactgatccctggcatccccgacgacgtggccgtggactgcctggcgcgcgtcccccacgcctcccaccgcgcgatgcgccgggtctgccgcggctggcggagcgccgccgccgcgccggccttcgcgtcggcgcgcgccgcggcgggcgccaacgaggacctcgtgtacctgatgcagttcgggaacccgtcgggcgacgacgggcccaaggacggcgacgacgggcccggcagcaccccggcgtacggcgtggcggtgtacaacgtgacgacgggcgagtggcggcgggagcgcggcgcgccccccgtggtgccggtgttcgcgcagtgcgcggcggtggggacccgcgtggccgtgctgggcggctgggacccgcgcaccttcgagcccgtggcggacgtgcacgtgctggacgccgccacgggacggtggcgccgcggcgcgcccatgcggtcggcgcgctccttcttcgcctgcgccgaggccggcggcaagatctacgtggcgggcggccacgacaagcacaagaacgcgctcaagaccgccgaggcgtacgacgccggggccgacgcctgggacccgctgcccgacatgtcggaggagcgcgacgagtgcgacggcatggccaccgtcgccggcgaccgcttcctggccgtcagcggctaccgcacggcgcgccagggcggcttcgagcgcgacgccgagtggttcgacccggcggcgcgcgcgtggcgca

SEQ ID NO: 27608 - DNA, 2798 bp, Zea mays
  Clone ID: LIB4738-002-A2_FLI
ctcgaggccggccgggggccagagccgaaaccaaatattcttccgccgccggccgactgctgcattcaattccccttcgcgccccgaaagccgaaccaacgagcctcgcaggtcggcggtctcgattagggaggaggaagggagtggcccctgatctgggtggcgggcgagatgaggctactgcgggtcgccacgtgcaacctcaaccagtgggcgatggacttcgacaccaacctccgcaacgtcaaggagtccatcaagcgcgccaaggctgctggggccgtcatccgcgtcggccccgagctcgagctcaccggctacggctgcgaggaccacttcctcgagcaggacaccaccgcccacgcatgggagtgcttaaaggacattttaactggggactatacggacaacatcttatgcagcataggaatgccagttattttcaatagtgtgcggtataattgccaggtcttctgcctaaatcgtaagataatcatgatccgaccaaagatgtcccttgcaaatgatggaaattatcgggaattccgttggttttctgcttggacatttaaaggcgagattgttgattttcagctccccgttgaagtctcagaggcaatatcccaggatacggtgccttttggttatggatacatgcggtttatagatgtgtctttggctgctgaaacctgtgaagagctctttacagcaaacgctcctcggattgacttagcattgaatggtgttgaggttttcatgaatgcaagtggaagccaccatcagttaaggaagctcaatcttcgtattgattccataaggagtgcaacccaaacatgtggcggtgtttacatgtatgctaatcagcagggttgcgatggtggccgcctttattacgatggttgttgctgcattgcggtaaacggtgatttggtaggccagggatctcaattctcgttgaaggatgtagaagttctggatgctctggtagatcttgatgctgtatcgagttatcgagcatctgtttctagtttcagagagcaagcaagccacaaaacaaatgtaccttttgtgaaggtaccatataaactttgccaaccatttcggagtggaatggttccgacttctccagttgagattatgtatcactgtcctgaagaagagattgcatttggacctagttgttggctatgggattatttgaggcggagtcaagcatcaggatttttgcttccactttctggtggtgcggatagttcatctgttgcggcaatagtcgggtgcatgtgccaacttgtcataaaagatatagagaaaggagacgagcaagttaaggcagatgctcttcggattgggcagtataaagatggggcaattcccatggatagcagggaactggctaaacgtttgttttatactgtttacatgggaactgaaaatagttctgaagatacccgatcacgtgccaaaaggctagctgaggagattggttcattccacttgaatgtacccattgatagtatagtatctgcttttctttccttgtttgaaacattgactgggaagcgaccacgctacaaggttgatggggggtcaaatactgagaatctgggattgcaaaatattcaagcccgaatcaggatggtgttagcctttatgatggcttctctaatgccatgggtccacaacaaatctgggttttatcttgttcttggaagctccaacgtcgatgaagggttacgtggttatttgacaaagtatgactgcagttcagctgatgtaaaccccattggaagtgtaagtaagcaagatctgagagcttttttacgatgggcagcaattcatcttaagtattcttccttggccgaggttgaagctgcaccacctactgccgagcttgagccaatacgagcaaactacaatcagttggatgaaatagacatgggaatgacatatgaggagctgtctatatatggaaggttaaggaaaattttccgatgtggtcctgtttcaatgtttcagaacctgtgccacagttggtgtggaagattatctccgtctgaagtggctgacaaagtaaagcacttcttcaagtactacgccataaaccggcacaagatgactgttttgaccccatcttatcatgctgagagctattcaccagaagataataggttcgaccttcgccagtttctttacaactcaaggtggccctaccagtttcggaagatcaatgagcttgtgcaagagatggacaaagatggcaaatggggaacttctgcagaagggaagctgggagcgcagacaggtgcacagggaactggaatgggagtggtggcagcggggtctgccaatcccagtgccggcttctgaagagaaccatactaacgcgtggaagctagttcctccagtttttcggccttgacagaataatgcaccagccgtccagcccccaccccaggacacgggctgctaatgttaatttgtctgcttggttcccttgtactgcatcacttctccctgctagagagctggaatccccacaaaattttaggctaccagttctgtttcttccatttgtcatagtacgatctacaaagtatcaaccaaagaacatgtgaaaaataagatggaatccctttaatcagattgtttgtccgaagtggcatggcgatgaaaaggaaaacatcagtataaagaactagttactcataattctttgttctgtaaagagtcctttctaaataatgctgtgtgcatgatgatgatgatgtgatgtgatttctaccatgacttcaaag

SEQ ID NO: 27609 - DNA, 928 bp, Zea mays
  Clone ID: LIB4738-002-D1_FLI
ccgggccatttcgaagcccaccgaattccctgcgattcctctcccctcgcctcctcgtctccccctaggggatcgtcggagaggaatcgcaaagagggccgtctcatccgagttaaggaagccatggagcacaaggaggctgggtgccaggcccccgagggacccatcctctgcatcaataactgtggcttcttcggcagcgcggcgaccatgaacatgtgctccaagtgccacaaggagatgataacgaagcaggatcaggccaagctggctgcctcctctatcgacagcatcgtgaacggcagcgacgccgtcatggagccggttgttgctggcagcaacacggtagtagctgttgcccaagttgagttgcaaacaatgaacgtgcagcagcccgctgatgttgccggacccagcgagggggtggcggcgatctccaaaggggggaaggtagggccgaaccggtgcagcgcctgcaggaagagggttggacttacgggattcaactgccggtgtgggaacttgtactgcgcactccaccgctactccgacaagcacgactgcaagttcgactaccggactgctgccagggacgccattgccaaggctaatccggtggtgaaggcagacaagctcgacaagatctagggggggttccctacggttgggtatcaggaagattgtaaaccgcggtaactcgtcatgcggaactgctgccttgccccccgcgcctttctcttccatgtttgctgctacaatcttgttgttgggcattgcagtgcacggtgcacacttgtgtagcccgcctccgagaattctcctgcctctgcatctggtcagttcaaaaatgatttgcatgttggctatgttgtgtaagctctatttatggtggtctcgctgagacgggtatttggcttcgcagttatct

SEQ ID NO: 27610 - DNA, 644 bp, Zea mays
  Clone ID: LIB4738-002-D12_FLI
cctcgaggccggccggggtgcccgcggtgctagtaacggttgctctagatccgttcatcctggtggttttgtgaggtcgaaagcggcgagcgaattagaagatgctggacaagctgtgggacgacgtggtggccgggcctcgcccggagacgggcctggagaagctccgcaaggccaccaccgcccgcccgctcgtcatcaacaaagacgcggacggcggcagctacaagcgggcgcagtcgacgccgtcgaccccgacgacgccggtgacgccgtcgtcgtcgacgacgccgcgcggcgccggcaacgtgtggcgcagcgtcttccacccggggagcaacctggccaccaagggcatgggcgccaacctcttcgaccggccgcagcccaactcccccaccgtctacgactggctctacagcgacgagaccaggagcaaccaccgctagatcgggcgagatggacagtgaagaggcccggtgtctctgtcaggccatgtttgctggtccttgtggttatctaaaacgcatgcatgctctattatagctagtcatcactatatatatacttgtgtttgtgtattgttgttcttgttctgctggtgtttgaggataaagactccgccgtttaagttgacctatggt

SEQ ID NO: 27611 - DNA, 1563 bp, Zea mays
  Clone ID: LIB4738-002-F2_FLI
ccgggacccgaagcacatcccgtcgcatcccatcccactaccacccatctcgtcgtccgccgattcgatccggttcttccaacccaggggctgtgatggcgacgaagaggagcgtgggcaccctcggcgaggcggatctgaaggggaagaaggtgttcgtgcgcgccgacctcaacgtccctctcgacgacgcccagaagatcaccgacgacacccgcatccgcgcctccgtccccaccatcaagttcctcctcgagaagggcgccaaggtcatcctcgccagccacctgggtcgtccaaaaggtgtcaccccaaagtacagcttgaagcctcttgttccacgcttgtctgagctccttggagttgaagtcgtgatggccaatgattgcattggtgaggaagttgagaagttggctgccgctttgccagaaggtggagttctgctcctagagaatgttagattctacaaggaggaagagaagaacgaacctgagtttgctaagaagctagcatctgttgctgacctttatgtcaatgatgcttttggcacggcacacagagctcatgcttcaaccgaaggagttaccaagtatttgaagcctgctgttgctggcttcctcatgcagaaggaacttgactaccttgttggagctgttgccaacccaaagaagccatttgccgctattgttggtggatccaaggtctcaagtaagattggtgtcattgagtcgttgctggcgaaggtcgatatcctcatccttggtggtggtatgatctacacattttacaaggcacaaggatattctgttggaaaatctctcgtggaagaggataaacttgagctcgcaacttctcttattgagaaggcgaaggcaaagggggtttctcttttgcttcccactgatattgtagtagcggacaagtttgcagccgatgctgagagcaagattgtccctgccactgctatccctgatgactggatgggtcttgatgttggccctgatgccacgaaaaccttcaacgaagcattggacaccaccaagactgttatttggaacggccccatgggagtgtttgagttcgagaagtttgcagctggaactgaggcgattgccaagaagctagctgagcttacaaccacgaagggtgtcactaccatcatcggcggcggcgactctgtcgctgctgtcgagaaggctgggctggcggacaagatgagccacatttcgaccggcggcggtgcgagcttggaactcttggaaggcaagactctacctggtgtccttgccctcgatgacgcctagatccgctgctgctgctgctgctgctactcaggttctgccagctttgcgtgtcatcttgtttcggaccttggtgtaacgctgcaaggttaaggtttactcctccacacatggacttttggggataggcttgccatcgtgttttgctagatgagtcgtgaaataagcttttacttcctcgctgctgtgggtgaagtaactggaattcggaaatttggaactaacaaaaccccccgtggatttgtatgatatgttttgttcg

SEQ ID NO: 27612 - DNA, 998 bp, Zea mays
  Clone ID: LIB4738-002-H4_FLI
ctcgaggccggccggggcaattctcaccctcgcacagtcgtcttctcctactgcactcaacgcatccgggcttttggtccacccccgccactacatacatagccgatagccccaggctcttgccgtgccgtgccactgccagaaacgaggaaccacctctcgatggagtccaacaccaccccgttcgccgcggttggcacggccgccgaggaggcatcgacgcggcgcgtggccaaccgcatcatccgcgccctgcagcaccagctccggctgctgcaccgcgccggcgccgagttcttcgtgctcggcgtcacgggcaacgtgtacacggtgacgctgtccaccacgccggcgtgcacgtgtccggacccagccgtgccctgcaagcacatcctcttcgtgctgctccgcgttcttggcctctccctcgacgaggcctgcgtttggaggcagactctgcacccgtgccaggtcgcgcggctcgtcggcacgcccacgtacccggacgtgctcgctggtgcgcgcgcccgggagaggttccaccagctgtggtcggcccgtccagccaacaatgttgctgacgacaggcaggaggcgtcgtcccacaggccgctcgacggcgcggcatgcccagtgtgcctcgaggagatggcgccggcacaaccgtcacagggcagcggggccaccgcacaggcgatcctgacgtgtaggacgtgccggaatgcggtgcacgccgagtgcttcacgcgctggaagcgaagccgctcgcggcgggccgcgacgtgtgtcgtttgccgctcgcggtggaagaagccaaaccgggagcatgagcatgagcagtacatgaacctcgccgcctatatgaacgacgacggcgacgtcaccatgctgagcgccgacggctggctgtgtgcggggtagttgcaggctttcgattattcaacaggctaattgtcacataactgtgcctgtacagaatatagaaccattgtgatctc

SEQ ID NO: 27613 - DNA, 1314 bp, Zea mays
  Clone ID: LIB4738-003-B4_FLI
acccttgccagagctcaagagctacctcctggtccggttggacagatcccttcgggcgctgcgtccaccgggattcaggcaaagtggtgtaacataagatgcaagggggaagaggtgggaggcagggtttgttcggttttggggacccttttgttggtttcggcggctttggacagccagggaacataatgtccggtttctttggtggcgcaaatccctttgatgaccctttcttcacaaacccctttggtggcatgatgcaacctagtttctcaacccctttcagcggcatgatgcaacctagcttcatgaacccctttggtagcatgatgcaacctagcttgcttggatcaagtatgtttgcagcccatggcaatctcaatggaggcacttttggaagccagacacatctcaatcaaggcatgagcaatgccagtggtttcattcagcaagcctctgaatcgagcaggcctaaagggccaattatcaaggagttgtcttcagatgacgaggataaagcagaggatgataaagaagatgacaagaagaatggtaactttaggaagcatccaagggaaagcagagaaccgtgtgtggaggacccagatgaagaagaagaagaagaagataataaaagacctaaacatagacaatttgggagggagctcagcagatctggtacatcacgtctacagcctcagacatttatgtttcagagttcaactgttacatatggtggtccaaatggagcctgttatacatcttcaacgactaggaagactggtgcaaacggaattacactggaagaaagcaaggaggcagacacaactactggtaaagccacccacaggatctcacgtggcattggcattaagggtcactcgttgacaagaaaccttaactccgatggacgtgtgaacacccttcaaactttacacaacttaaatgaagatgagcttggtgggttcgaagaatcatggcaaagaaatgccagggagaatatgcctggctgggatcctagaatgaacatgcttggcaacggaaaccttcacactggcttccgagatgcgaatcagaggccagcacttcctgccccaggacgatcccgtggcgcgaattcctcatggaacttccagaatggctcttccacgggtcgtgcaccccgcacatgagttcttctgtgccatacgcaggatcacagtgctcagtaccggtggcatccactattttgcagaaaaatgttgcaacccgagcgctcattcgaaagactactgtatagcttatgacagttttttaatattcgaaagacaactg

SEQ ID NO: 27614 - DNA, 1019 bp, Zea mays
  Clone ID: LIB4738-003-D8_FLI
gaggccggccgggcccatttcgaagcccaccgaattccctgcgattcctctcccctcgcctcctcgtctccccctaggggatcgtcggagaggaatcgcaaagagggccgtctcatccgagttaaggaagccatggagcacaaggaggctgggtgccaggcccccgagggacccatcctctgcatcaataactgtggcttcttcggcagcgcggcgaccatgaacatgtgctccaagtgccacaaggagatgataacgaagcaggatcaggccaagctggctgcctcctctatcgacagcatcgtgaacggcagcgacgccgtcatggagccggttgttgctggcagcaacacggtagtagctgttgcccaagttgagttgcaaacaatgaacgtgcagcagcccgctgatgttgccggacccagcgagggggtggcggcgatctccaaaggggggaaggtagggccgaaccggtgcagcgcctgcaggaagagggttggacttacgggattcaactgccggtgtgggaacttgtactgcgcactccaccgctactccgacaagcacgactgcaagttcgactaccggactgctgccagggacgccattgccaaggctaatccggtggtgaaggcagacaagctcgacaagatctagggggggttccctacggttgggtatcaggaagattgtaaaccgcggtaactcgtcatgcggaactgctgccttgccccccgcgcctttctcttccatgtttgctgctacaatcttgttgttgggcattgcagtgcacggtgcacacttgtgtagcccgcctccgagaattctcctgcctctgcatctggtcagttcaaaaatgatttgcatgttggctatgttgtgtaagctctatttatggtggtctcgctgagacgggtatttggcttcgcagttatctagctatgtgatgtactgttgtcttgtccctgggtattatatggtacactgcagccagtaatagtaatctgcaactgtgcgac

SEQ ID NO: 27615 - DNA, 1256 bp, Zea mays
  Clone ID: LIB4738-004-B6_FLI
cctcgaggccggccggtaccgtgtgacgctgtggatatctgacccactctcgtcgcacgcaacgcaagtagcaaagcaggacccatcctctcccatctctcggtctccccatcccaacccgccgccgccgccgcttctcccgtctccagcgcccacagcgccattgtatccgcggggcgagctgagtcaccaagctggtctagggcccatccatttggaaccctcgcgagaagcaaagcgggcggagcgccagcgttcttagatcgattgctcgccaggctgttgccgaggagtcgtcaaccctcacggcagccatgtctgtggagttcatcctgtggcttttctccttcgtctccgtcatggtcctcatcggcctcaccgcataccagcttatctgtctgtcagatttggagtatgattatatcaacccatatgattcatcgtctcgcatcaacgctgtggtgctgatagaatactcactccaaggggccctgtgtgcttctttcctcttgacattgcattggttcccgtttctagtcatgacaccagtaacatactaccatgtcaaactgtatttggctcggaaacatcttgtagatgtcactgaaatttttagacaattaagtgacgagaagaagtacaggatgatcaagcttgccttctacttctgcctatttattataactatttacaggcttgtaatgacagctgtgatgttgtttattgatgaggacataaatttggcagaaactaggagtatctagacttcgccaccaacttgtcatggggatggagcagagttgtagcttgaaccagggagaccacactcaatgccttgacttagttgtgagaaacaagatcagtttgtgccctgtagctggaggagctaacctggtactccttttaccctaaatcgtaagttgttttagttttttctagatgcatagcttttacgatgtatcctccagatgcagagtaaaagttatatatttagaaaaaccagaacaacttataatttggaatggagtattcatttcatccatcagattgtgatgtacaatgaattcacatagtttggtccatcggtaccatgtttgtaaattgggcagtcaatgatgtgcatcactgcaggatgaacgcacgtttggtaattgttgtgcaactctttgtacttgtggacaagtgctgtattctacacattgtttgcatacagacgatgtgtggttggtgtcataatttaccactaaacctttggg

SEQ ID NO: 27616 - DNA, 1373 bp, Zea mays
  Clone ID: LIB4738-004-C7_FLI
ccgggacaagctcgaccaccaacccagctcgctcgtcccagctgatcaggtcgagcacctagtagcgacctgctcgatcatcagtgtagagtgtcggtaggtgtctgtctctcttggtggctggttgcaacggtcatggcgacgtcgtctcgtcgggtgcccttgctgctgctgtgcctgggcgtgctggtgtcctgctccttcgcggcgggcagcttggaccaggagctggacatcacgtggggcgacgggcggggcaaggtccttgacaacgggcggctgctgacgctgtcgctggaccgcacgtccggctccgggttccagtcccggcacgagtacctgttcggcaagatcgacatgcagctgcggctggtgccgggcaactccgccggcaccgtcaccgcctactacctgtcgtcgcagggcggcgcgcacgacgagatcgacttcgagttcctgggcaacgtgtccggcgagccctacacgctgcacaccaacgtgttcacgcgggggcaggggcagcgggagcagcagttccgcctctggttcgaccccaccgccgacttccacacctactccatcctctggaaccccaagcacgtcatcttcatggtggacgacatgcccatcagggacttccgcaacctggagagcaagggggtggcgttccccaagagccagccgatgcggctctactccagcctgtggaacgcggacgactgggcgacgcagggcgggcgcgtcaagacggactggtcccacgcccccttctccgcctcctaccgcgggttcaaggccgacgcctgcgtcgccgtcgcgggcggccggacccgctgcggcgccaccgtcggcaccgagggcaccggcgcccccgcctccgccgccggcgccggggactggtacaaccaggagctggacctcaccctgcagcagcggatgcgctgggtgcagcgcaagtacatgatctacaactactgcaccgaccccaagcgctaccagcagggcctccccgccgagtgctccatgcagtagcgcccggttattcctcgcccgtccaacaatggcgcgcgcgcgcgtgtgtgtgcatgtggtccgctctactgctaccgctacgacgatcggtgtcgatcaccggatcaaggcaagacgaaaggcatcgaaacatggtagataaataaaggacttgacgatttgtaacgcagtagctggtgcgtgcgtggtgtggtggtaagaaattcttctgctgcctgtgttcttgtagcctcctcgtcctcgcccaccctgttggtacgtgtacggtgtacgtagtctgccgccgcgcgctgtccgtgttcgtcgtgtctcgtgtctgtattatactcgtcctccccatc

SEQ ID NO: 27617 - DNA, 926 bp, Zea mays
  Clone ID: LIB4738-004-F5_FLI
ccgggcccatttcgaagcccaccgaattccctgcgattcctctcccctcgcctcctcgtctccccctaggggatcgtcggagaggaatcgcaaagagggccgtctcatccgagttaaggaagccatggagcacaaggaggctgggtgccaggcccccgagggacccatcctctgcatcaataactgtggcttcttcggcagcgcggcgaccatgaacatgtgctccaagtgccacaaggagatgataacgaagcaggatcaggccaagctggctgcctcctctatcgacagcatcgtgaacggcagcgacgccgtcatggagccggttgttgctggcagcaacacggtagtagctgttgcccaagttgagttgcaaacaatgaacgtgcagcagcccgctgatgttgccggacccagcgagggggtggcggcgatctccaaaggggggaaggtagggccgaaccggtgcagcgcctgcaggaagagggttggacttacgggattcaactgccggtgtgggaacttgtactgcgcactccaccgctactccgacaagcacgactgcaagttcgactaccggactgctgccagggacgccattgccaaggctaatccggtggtgaaggcagacaagctcgacaagatctagggggggttccctacggttgggtatcaggaagattgtaaaccgcggtaactcgtcatgcggaactgctgccttgccccccgcgcctttctcttccatgtttgctgctacaatcttgttgttgggcattgcagtgcacggtgcacacttgtgtagcccgcctccgagaattctcctgcctctgcatctggtcagttcaaaaatgatttgcatgttggctatgttgtgtaagctctatttatggtggtctcgctgagacgggtatttggcttcgcagttc

SEQ ID NO: 27618 - DNA, 1241 bp, Zea mays
  Clone ID: LIB4738-005-B2_FLI
ctcgaggccggccggggatgagtgtgtgttcgtttgtgttaaaatccgcgaccccgagcaagaagccaggaaccagctcaaagttattcgtccaagaaccccaccccacccccacaacacatagaaatttcgtcttggagagccaccaatggcttgttccactgcatctttagcggcgacgctgctggcgttcgcgctgatgttccaggcctgcgtcgcggggaggaggaggctcaccgcgctcgtgcaggagccggccatcaccatgaagtaccacaagggcgcgctcctgtcgggccccatcgccgtcaacttcatctggtacggcgacttcacggcgccacagcgggcggtgatcaccgacttcgtctcgtcgctgtccgcggccccgcgggcggcggcgcagtcgcagccggagccgtccgtgtccacgtggttcaagacggcgcgcaagtactacgacacctccaaggcgcgtttcccggcgctgcgcctcggctcccacgccgtcgaccggaactgctccctcggcaggcggctcacggagcgggacctcctcaggctcgccgccaggggggcaccgagccgcgccatcaacctggtgctcacggccgccgacgtggccgtggacgggttctgcgcatcccggtgcggcacgcacggcgcgtccccacggtcccgcgccggccggttcgcgtacgtgtgggtgggcaacccggcgtcgcagtgccccggacagtgcgcgtggccgttccaccagcccgtctacggcccgcaggcgccgccgctcacgccccccaacggcgacgtcggggtcgacggcatggtgatctcgctggcgtccatgatcgtcggcaccgtcaccaacccgttcggcaacgggttctaccaggagggctcggccgacgcgccgctcgaggccgccacggcgtgcgccggcgtgtacggcaagggcgcgtaccccggctacgcgggggcgctgctggtggacccggccagcggcgccagcttcaacgccaacggggcccacgggagaaagtacctggtcccggcgctcgtggatccggacacgtcgtcgtgtgccaccttggggtagatttcgcggatcgtaaattagtgtttgcgatgtggcggtggtagtgctgtggagagtgttccacgcggctaaaagtttgtgctaaagtagtactgaccaggttgcattatttcatttgttcaatgaaaatgaagtattttcacgt

SEQ ID NO: 27619 - DNA, 743 bp, Zea mays
  Clone ID: LIB4738-005-F3_FLI
ccggccggggagcctacccaaagagcccagagcccgggaggttacttcgctgcctgaggagtccccggcaccggaggtcttgctaccggctggcggcttcttcttccgttcctccccaagtcctcttcccggaggaatcatgatcgtctgcgtcgccgttgtcggccaccagaacaatccgctgtacctgcagagcttcacggaggcggacgacgccctcaagctccaccacatcgtccactgctctctcgacgtcatcgacgagcgagtgagcaatcctaagaggagtgcacctacattgaatgagacatttttgggtcttctatacccaactgagaactacaaagtgtatggctatttgacaaacacaaaggtcaaatttatcatggtcacgactgatcttgatgtcaaagatgcagatgcccgaaattttttcaggaagttccatgctgcatatgtagatgccgtctcgaacccgttccatgtcccagggaagaagattgcttcaagaagctttggcgcaagagtaagcaccatcgttaaatccttcggttcagggtccagttgatcgaatgccacttttgtcagactttctgtaatcaaacatatgtgttctctctctgtttgacaaaattactccctaccgtgtactgcttgtctggtgaacgagatgctattggtactgattgctgaacaaagaaaaatagtggtttattcattcaaaatcctcctcaattccctcc

SEQ ID NO: 27620 - DNA, 1037 bp, Zea mays
  Clone ID: LIB4738-005-H3_FLI
ctcgaggccggccgggctttttttctctcatccgaattcccaggcaggcaggtcggcgaggagggcaggaagaccgaagaccgagccgtgcgggggctcgggacgggaacgggacaggaccccaaaatctcagatccttcctgcccgcccgcccgtgcccgtcgacgcgtcgttcttgccggccgcgccccacctccgccctctcctcctccaggctgcgcgatggtgctgtgggtcttcggctacggctccctcacctggaaccccggcttcgacttcgacgacaaaatcctcggcttcatcaagggctacaagcgcacctttaatctcgcttgcattgaccacagaggcacaccggagcatccggcgaggacctgcacgcttgaaaccgacgacgaggccacatgctggggaattgcatattgtgtcaagggtggtccagaaaaagagctaaaagcaatacagtacttggagagaagagagtgtgagtacgaccagaaaatatccattgatttctacaaggaaggagatcccttgaaaccagctgtgacgggcgtcttagtgttcgtttccactccagatccaattggcaacaagtactatcttggccctgctcctctgcaggatatggcaaggcaaattgctacagccaatggccctactggctataatagggattacctgttctcaatggagaaggcattagccagcattagccacgaagatgattcgatcatagagcttgcaaacgaggtgaggaaggtgctcaacagaacaaaggagaccaagatcactggtgccaatgcttccatgaaatcacatgcccctcttgtgcacctgtccgcgcttccagaaggcaccgttgtggactcgagatagcgacctctactcggaatttactttcagctcttgcatgtttgtggttgtggccatcatgtactgattttcccttttcaacagttgtcgtgaggctgtatcgtctggagtaaaaaaaaaaagctaaaagccggcactaataatgatattaacttgaaaag

SEQ ID NO: 27621 - DNA, 560 bp, Zea mays
  Clone ID: LIB4738-006-C5_FLI
ggccggccggggcgcagtcttcttcagaattccctgatcacgttccatgcagctgagagcccgcgtactagccggacaggaggcgacagcgacaccgcgagacgtgccatcatgttggaaggaaaggcggtggtggaggacaccgacatgccggcgaagatgcaagcccaggcgatgtcggcggcgtccagggccctggatcgcttcgacgtcctcgactgccggagcatcgcgtcccacatcaagaaggagtttgacgcgatccatggccccggatggcaatgcgtggttggctccggcttcggctgctacatcacgcacagcaaggggagcttcatctacttccgcctggagtcgctcaggttcctcgtcttcaaaggggcggcagcatgatgacaagccccacggctaacatcgcgagttcacgaccaggcaaagcaggtggaggatgggtttttttttcaccggcctttgtggacggcttgcctcgctgtatacgatatcaccatggtaataccaaccagtagattgaaacgttgtgggagattatattggaaacg

SEQ ID NO: 27622 - DNA, 1176 bp, Zea mays
  Clone ID: LIB4738-006-E8_FLI
aagcaccagaccaattaactagcttcttctagctctagctaggctcgtttgctgcaagaaggtaacagcgcaggcatggaggggaaggaggaggacgtccgcctgggcgccaacaagttctcggagcgccagcccatcggcacggcggcgcagggcacggacgacaaggactacaaggagcccccgccggcgccgctcttcgagcccggggagctcaagtcctggtccttctaccgcgccggcatcgccgagttcgtcgccaccttcctcttcctctacatctccatcctcaccgtcatgggcgtctccaagtccacctccaagtgcgccaccgtcggcatccagggcatcgcctggtccttcggcggcatgatcttcgccctcgtctactgcaccgccggcatctccggcgggcacatcaacccggcggtgaccttcgggctgttcctggcgaggaagttgtccctcaccagggcggtgttttacatcatcatgcagtgcctgggcgccatctgcggcgcgggcgtcgtcaaggggttccagcaggggctgtacatgggcaacggcggcggcgccaacgtcgtggcgcccggctacaccaagggcgacggcctcggcgccgagatcgtcggcaccttcatcctcgtctacaccgtcttctccgccaccgacgccaagaggaacgccagggactcccatgtgccgatcctcgcccctcttccaatcgggtttgccgtgttcctcgtccacctggccaccatccctatcaccggcaccggcatcaaccccgcgcggagccttggcgccgccgtaatttacaaccagcaccatgcctgggctgaccactggatcttctgggtcggccccttcatcggcgctgcgctggctgccatctaccaccaggtgatcatcagggcgatcccgttcaagagtaggtcttaaaggagccgatgctgctgcttcgagatgctgccggtcttgaaaggatggattcgtggctgttccaaatgatcccctactatgttacgtgcagttccattccattcctctttcaaagttcggagctgcttttatccgaacccagacttgtaattcatctgtaccaattgtgtaatatgccgcgcctctgttatgtgcaattcaaaattatgagacagcgagtcaagctttaagagc

SEQ ID NO: 27623 - DNA, 745 bp, Zea mays
  Clone ID: LIB4738-006-H6_FLI
aacgtgctagtgacggggacgccggggacggggaagacgacaacgtgctcgctccttgccgacgccgcaggcctccgccacgtcaacatcggcgacctcgtccgcgagaagagcctccacgacggctgggacgccgacctcgagtgccatgtcatcaacgaggacctggtgtgcgacgagcttgaggacatgatggaagaaggtggtatactagtagattaccacggatgtgatttctttccagaacgttggtttgacctcgtagttgtgctccagactgacaactcaattctgcatgatcgcctgacgggcagaggttacatgggttccaagctcgccaacaacatagagtgcgaaatcttccaagtgctcctcgaggaggcgagggagagctacagagaggacatcgtgatgccattgcgaagtgacaacgtggaggatattagtaagaacgtaggtgcattgacagactgggtaaacaattggagacctagttagacctgtcaaaagaaatgttgccttatgtgttgtatttggatatgtattgggtggaccagctgccatgtttgtaatgtacggggtgttttggttaaagaaacgaagtcgttcatcctcgtcttattcttttcttttaatagagtgaattacttaaatcattaccacaacattacttaagttaatgtttgctacatgcacaaggaatgcgatgatgctataaaaattcatgaggcagtgtggtctgcgc

SEQ ID NO: 27624 - DNA, 1281 bp, Zea mays
  Clone ID: LIB4738-007-F3_FLI
ccgggctcaggccaagcaaagcatccagcggagccacaccacaccacccttggtccggcactagcactagctatccagtggagacgaagatggcgacggcgcggtggctgcaggttgccgccatggcggtggcgctgctggcggagtgggcgacggcggcggcgcctcggaagcccgtggacgtgccgttccagaagaactacgtgccgacgtgggcgcaggaccacatccactacatcgacggcgggcgggaggtgcagctgtacctggacaagtccaccggcacgggcttccagacgcggggctcctacctcttcggccacttcagcatgcacatgaagctcgtcggcggcgactccgcgggcaccgtcacggccttctacctgtcgtcgcagaactcggagcacgacgagatcgacttcgagttcctgggcaaccggacggggcagccctacatcctgcagaccaacgtgttcaccggcggcaagggcgaccgcgagcagcggatctacctctggttcgaccccaccaaggagtaccactcctactccgtcctctggaacctctacatgatcgcgttcttcgtggacgacgtgccgatccgggtgttcaagaacacgagcgccgacctgggcgtgcggtacccgttcagccagccgatgaagctctactccagcctgtggaacgccgacgactgggcgacccgcggcgggcgcgagaagacggactggtccaacgcgcccttcgtcgcctcctaccgcggcttccacgtcgacggctgcgaggcctccgcggaggcgcgcttctgcgccacccagggcgcgcgctggtgggaccagccggagttcagggacctcgacgccgcgcagtaccgccgcctggccgacgtcaggcgccgctacaccatctacaactactgcaccgatcgcgaccgctacggcgccgccgtgccgcccgagtgcgcccgcgaccgcgacgtctgatgatgatgcgttgggccggcaagctgcttgatcgagagcagcctgtaatgtatgtatggtatggtattgttgtgtgtcaggttcgtcgtcgtgggtctgcagagacacagagagagtccgatccggcgcgtacgtgtgcccgcgtgggcacatgcatacgtacatgcttgtgttgtactgtacgctcgtatctcctcacaccgaaatgaattgcgattagtatcgaaatttcggcagcttatccatcatgtaatgagttcctctgcagtacttaaaactctcatcgtctcttgtctgg

SEQ ID NO: 27625 - DNA, 977 bp, Zea mays
  Clone ID: LIB4738-008-A6_FLI
ctcgaggccggccgggctccggccgcttgccacgagtcatcgggcgcgaacgcacggcggcacacacccacgcgcggatttatatggcgaccgcgcgcgcaagttcacctcgtcacacgccacaggctgtgtagagcgcgcgcctggcatgacgatggctcgtcctggggcggctttgccgctgctgctggtcgtggtcggcgcttgctgcgcgcgcctggcggcggcagtgcacctctccgcgctcggcaggacactcatcgtcgaggcgtcgccgaaggccggacaagtcctgcacgccggcgaggacacgataaccgtgacatggcacctcaacgcgtcggcgtccagcgtcgggtacaaggcgctggaggtgaccctctgctacgcgccggcgagccaggaggaccgcgggtggcgcaaggccaacgacgacttgagcaaggacaaggcgtgccagttcaggatcgcccggcatgcatacgccggcggccaggggacgctccggtacagggtcgcccgcgacgtccccaccgcgtcctaccacgtgcgcgcctacgcgctggacgcgtccggggcgccggtgggctacggccagaccgcgcccgcctactacttccacgtcgcgggcgtctcgggcgtccacgcgtccctccgggtcgccgccgccgtgctctccgcgttctccatcgccgcgctcgccttctttgtcgtcgtcgagaagaggaggaaggacgagtaggccgtaagcggcacacgcgatatataccagggaggcgccaccgtgcgagctagcgcttggtgagccgtcatgttgtgtagtgcagttgtaacacaagtattaagctaagcacaagtcgtaccatgtatccagctccagcatgaatccaaacccagcgtcagtcacaagctggacctgcatggtgcctgtcaaccaaaattcttcttggatcatactaatactatcgtctacagcg

SEQ ID NO: 27626 - DNA, 1371 bp, Zea mays
  Clone ID: LIB4738-008-B11_FLI
ccgccgggaggccaaagtataagcgcagatcgagtcatcaagctagctagcccggagcacgcctagacgccagcagcaatggcggctcagctggccgtcgcgttcctcgccttgttgtcctcctctgccttcttggccgtgtctggccagaagttcaacgccatcttcagcttcggcgactccatgtccgacaccggcaacctgtgcgtgaacggtccccccgccggcctgacgctcacccagccgccctacggcgagaccttctttggccgcgccacctgccgctgctccgacggccgcctcgtcgtcgacttcctggccgagaagttcgggctgccgctgctgaagccgtcgaagcagggcggctcagacttcaagcagggcgccaacatggcgatcattggcgcgaccaccatggactcgggcttcttccagtctctgggcatcgccgacaagatctggaacaacgggcccctcaacacccagatccagtggttccagcagctgatgccgtccatctgcggctcgacgcaggcctgcaagtcgtacctgtccaagtccctgttcgtgctgggcgagttcggcggcaacgactacaacgcgcagatcttcggcggctacaccccggagcaggcgagcgggcagagcgccaccatcgtggacgccatcggcaagggcgtggagcagctcatcagcctgggcgccatgtacgtggtggtcccgggcgtgctgcccgtggggtgcttcccgatctacctgacgctgtaccagacctccagcgccggcgactacgaccagtacggctgcctgaagcgcttcaacgcgctgtcggcgcagcacaactcgctgctgcaggccaaggtgtcgagcctgcagagcaagtaccccggcgcgcgggtcatgtacgccgacttctacagccacgtgtacgacatggtgaagagccccggcagctacgggttcagcaccaacctcagggcctgctgcggcgccggcggcggcaagtacaactaccagaacggcgcgcggtgcggcatgcccggcgcgtacgcgtgctctgacccggcgtcgtcgctcagctgggacggcatccacctgacggaggcggcgtacaggaagatcgccgacggctgggtcagcggggcctactgccacccggccatctcggcctagaggctgctccgggaccgggggtcgggggctggttggtggttcgctggcccctcaagttagggaaggggaatcggattaattgtaatttttttagctggaatcgaagcaggcaagaggacgatggagtggtctgcaactgcaagaaataatcaattatacaaaaaaaaaaaataaaaagcgccctcgagtccagttttg

SEQ ID NO: 27627 - DNA, 723 bp, Zea mays
  Clone ID: LIB4738-008-D4_FLI
gggtaccctcgaggccggccgggatcaatagccagttctaatctcaggttgggggaaataggcctcgcgggtcgcaaaccgctctctgctgatttgggatttgggaggcgctcgagttttcaggtaaaccatagtttagtgacccatggctcgtactaagcaaactgctcgcaagtccactggagggaaggctcctaggaagcaacttgccaccaaggctgcccgtaagtctgcacccacaactgggggagtaaagaagcctcatcgttaccgccctggaactgttgctcttcgtgaaatccgcaagtatcagaagagcactgacctgctcataaggaagcttccgttccaaaggcttgtcagggagattgcccaggatttcaagactgatcttcgtttccagagccatgcggtgcttgcgctgcaggaggctgcggaggcgtacctggtgggtctattcgaggacactaatctgtgcgccattcatgccaagcgcgtcaccatcatgcccaaggacattcagctggctaggaggatccgtggtgaaagggcctagattctctatttactgctactggggtggctccgtagtgtatggtttgcatctgttcgatgcttgcttttgtgaaagtttacgtttgtgggtgttcgaatttgtaatattcatccgtagtggacaagtggtaggaagtgccgcaatctgactatgttttcaaatttaac

SEQ ID NO: 27628 - DNA, 1039 bp, Zea mays
  Clone ID: LIB4738-008-E6_FLI
ccggggtgtgcacggcactgcttagttctttccaaagagagagagaaacaatcaggggtccatccatttttgtcagccatgacgaacggctatctgttccgcgagtacatcggcgcgcagtccaccggcgtccagttctccgacgtgcccatcaacgccttcgttagcttccacttcatcctctccttcgccatcgactacacgcccgtggggcagcagccgaagccggtgccgaccaacggggtgttcagcccgttctgggacacgggcaacctgtcccccgccgccgtggccgctataaaggcctcgcaccctaacgtcgccgtcatggcggggctcggcggcgacagcgtgcaggacatcgtcaaggccttcttcaccccgacctccgtcgacacgtgggtggccaacgccgtgacgtcgctcacgggcatcattaacaggtacgggctggacggcgtggacgtggactacgagcacttcgccgacggcgccgacgtgaatacgttcgtcgagtgcatcggccgcctcctgacacagctcaagcagacgatgcccaacatcgccacctccatcgcgccgttcgaggacccagtggtccagaagtactaccaggcgctctggagcaagtactccggcgtcatcgactacgtcaacttccagttctacgcctacggcttcaagtacgagaccgaggcgcagcagatcattgccaaccactgatcgatctgcgatcaggacttagcttaacaagggatcacacattttacaataaataaatgataacctctcaggtcaacaacaattacttgcaggttaaggagttcggctgttgatttaaggacagaatgatggtgagtgaaaatgcaagtttaaagaaaatcgtcattattctgtcctttaaacttgtactagcaaagtaccagtgtgttgttacgatttacatttatgtttaagtatacaataaaaacataaacacatgtgtgttatgttggttggatatatgtaaatatgagtttagagccaacaatcatggttt

SEQ ID NO: 27629 - DNA, 876 bp, Zea mays
  Clone ID: LIB4738-008-F9_FLI
tcgaggccggccgggcccatttcgaagcccactgaattccctgcgattcctctcccctcgcctcctcgtctccccctaggggatcgtcggagaggaatcgcaaagagggccgtctcatccgagttaaggaagccatggagcacaaggaggctgggtgccaggcccccgagggacccatcctctgcatcaataactgtggcttcttcggcagcgcggcgaccatgaacatgtgctccaagtgccacaaggagatgataacgaagcaggatcaggccaagctggctgcctcctctatcgacagcatcgtgaacggcagcgacgccgtcatggagccggttgttgctggcagcaacacggtagtagctgttgcccaagttgagttgcaaacaatgaacgtgcagcagcccgctgatgttgccggacccagcgagggggtggcggcgatctccaaaggggggaaggtagggccgaaccggtgcagcgcctgcaggaagagggttggacttacgggattcaactgccggtgtgggaacttgtactgcgcactccaccgctactccgacaagcacgactgcaagttcgactaccggactgctgccagggacgccattgccaaggctaatccggtggtgaaggcagacaagctcgacaagatctagggggggttccctacggttgggtatcaggaagattgtaaaccgcggtaactcgtcatgcggaactgctgccttgccccccgcgcctttctcttccatgtttgctgctacaatcttgttgttgggcattgcagtgcacggtgcacacttgtgtagcccgcctccgagaattctcctgcctctgcatctggtcagttcaaaaatgatttgcatgttggcg

SEQ ID NO: 27630 - DNA, 955 bp, Zea mays
  Clone ID: LIB4738-008-H8_FLI
tcgaggccggccgggactccccgtcgccgacctcacccgcctcatggacggtggccgagccgcagccgtcggcggcgacccctctcccatcgctgctccttccaatcccccggcgctgagcagcaggcccgtcgacgtctccttgttcacccacaccccgtgctactgcgaagaaaatgtttacatgttatgtaacgagcttattagaaccggagtggctgatcctgcgggcactgatctttatgttgttttcatatccaacgaggaaaaaaagtgtttcatggtacttcttgatgtgcatatggaagtctaggcgaagcaaagaagttcttgattttgtttgggatctggactccgatcttcctttcccttccccattcatccaatatgtttctgaggcgattcaaccactatcattcggcaattccagatatgcaagactcttccgtgtggttcatgctcctgtgtttcttcaatcgtttgcctcagacagaagccatatgaaggatcctgaggggaactggattcagttacccccaaaatatgaaccgatcgtggctgaagatggaaccaccaataacctcaatgagtacatcatgatgtctgtgggggacgtggcagacagagaaaggatggctaatgatgtttattgcaacaagcttggtgtggtgctaaatgaaacgatcttccctgaattcttcgcccagctgcctgctccacatacttagcaagcgctctttctgttgtgatgggttactctgtacacttctatagtgcacccacaagattatgaattaaaataattgggcacatggtgcctctaagtagcgtttcagatagatccttgcctgttttggaatgcaaaatatggggatctcatagttctgttagcctagacatctgaaagctttatcttgtcccaaataatgatgactaggtcatgtttgacggcttc

SEQ ID NO: 27631 - DNA, 1045 bp, Zea mays
  Clone ID: LIB4738-009-A7_FLI
ccgggcacaatccagcggctgccgcacggctcggcctcggtcctacagctacaagaaccatctctctctctctctctctcctctcactcactcactccccccattcctacctttcttctcctccacctcgtcaggcaccctcaaaccctcgccgcaagaaggaagaggtcaatcaagtcgaaccaaaacctcccgaccccacaaggccaagctcatttccatggtggtgtacacgcaggaacatgtgtaccggcacccgtgggaccgggtgacagcggcggcgtggcgcaagttcacggatccggcctcctgtacggcgctctcccacgtcgcagacgttcacaccctacaccgccgcctcgactccgacacgggccgcctccaggccgcgcgctccatcaccgtgcggtccccgccgctccctttcgtcctgcgccgactcctcccgtccgccgcggcgtccccaaacggcgccgcgctctgccactgcgtcgagacctcgctcgtggacgcccagcgccgcgccatggacgtcgtcgtgcgcaacgtcagcctccggggcctcatcgaggtcgaggagcgcgcctcctacagaccacatccggaccggcccgacgactggacgcagttcaggcaggagaccacgatccggtgccgcccgctcgcggccctcgccgccgtcgctgagaaggtcgagacccggtgcgccgaggggtttctgcagaatagcgccaaggggagggaggtcgtcgagcggatctgccggtacctcgaggccgagtccgccggcgccgcgccctccgtaacctgatctcgtttgcacatctttgcttgatccgaacggatccaagggttcctcgatctgtgctgtgtgcgcccggataaatcgaaccccgcctgctaggcgcttgcttttcttcattttttgtgtgtgaaatgatgagctgaattcggaatagaataaagcttctggtcatacttgtttcttctgttgtaagtatgtggaaccgctttaacctccctgattttgatcatgagccttgcc

SEQ ID NO: 27632 - DNA, 1872 bp, Zea mays
  Clone ID: LIB4738-009-D2_FLI
attttcaccacgcgtgcgctctctctgtctgcgacgactgggctacgccgccgccgccgtcctccgtctggtgccgaggtcttcgttggacccttcgcccgcgactagcgtccgccaggtgccaggctgaaggcgatggcgacggagaggaggcgcgcgtcagtcgtggtactgggcgacatcggccgcagcccgcggatgcaataccactccctctcgctcgctaaccaggccagtatggaagtggacattgttgcaaatggaggaagtgatcctcacttgtcactgagagagaatccatcaattcacatccacgagatgaaaacagtgcagttaactggaatttcaaagatatctggtgctctgtcacttctacttaaagctgctgtccagttcattttgctggtttggtttctttgttttaagattcctcgccctgatgtcttttttgttcagaatccaccctctgttccaacactggctgctgtaaaactggcaagctggctgagaggtgctaaatttattgttgattggcataactttggatatacattgctggggttgtcgcatggcagaagtcacattattgtcaaaatctatttctggtttgagaagtactttgggcagatggctgatggtgccttttgtgttacaaaagcaatgcagcatgagcttgctcaaaattggggaatcagggcgacagttctttatgatcaatctcctgatttttttcaccctgcttcattgatggagaaacatgggttgtttagcaggctagggaattccatgtgtagtgctatgggcaatgctgattgcatatcagtggaggaagtaggggaagacatgaacactactgcctttaccagtaagattgatggccaagctttcttgaagcctaacaggccagcacttgttgtgagcagcacaagctggacgccagatgaagatttcagcatacttttggaagcagcactaatgtacgacagacgcgtcgctgcagctttaggtgaagatgattcaatggatgaggggcaactttggattgatatcaagaacgggaagcagtttgtctacccaagattactgttcattattacaggtaaaggacctgataggaagaaatatgaggatcaaataaaaaggttgaagttgagacgtgttgccttgcggacaatgtggcttgcatcagaggactaccctttattgctcgggtcagctgatctaggagtgtcgttgcatacatcttcgtcagggctggacctaccaatgaaggtggttgatatgtttggatgcggattgcctgtttgtgctgcttcattctcctgcattgaggagcttgtaaaagtaaacaaaaatggtcttcttttctcaacatcttcggagcttgctgatgaacttatgatgctctttaaggggtttccagaagaatgcaatgccttgaaatccctcaaagaaggtgccatgaagtcagcatcatcttcgaaatggtcaacagaatgggaaaccaatgcactacctttggtggaccaggtcattggatgagatgtgtgcttacatacatcagatagaattgttgtattgcagagaaccagagatcggtgtactagagagaccagatgtacattaaagggtacggtttgctttcaccaaaaatcaattgctagttgctgccagtgccatgtgcaccacttcagcaaaacttgggcaagtttgtagctacgaagctctttcctttttaggctgggaaacatactctgctgaacacatgtctaagttgtttcaggatgtatactactgtaggccagcactttgtttgataatatggcctgtattggaatacctctaatctgttacgtcagaaggaaaacatag

SEQ ID NO: 27633 - DNA, 1360 bp, Zea mays
  Clone ID: LIB4738-009-F7_FLI
ctcgaggccggccggggccgccctgccgaggacccttccttcctcgtccgcccacgaatttccggccagaccatcctacaccgcccgtccgggacacgcgcccgcctctgccaagaatttcgccttctccggcgccgatcccgcccattcttgtgccgccggcaggccaaggatgcggaaccttctcacggattcgtttgagctcggcaaacgggggcagtcctcaggaaatgtcgacatcgagcttggattgcagggtgacctgactagttctgcgcagccaggttttgagggattctatgaacaggtcaaagaggctgaaagcttgctcaacacattgacaaagttactgaaggaccttcagaactcaaatgaggagtcaaaagttgtcacgaaggcatctgcgatgaaagaggtaaaaaaacgcatggagaaggatgtcaatgaagtgacaaagattgcacggctggcaaaatcaaaagtagagcaactgaacaaagataatgctgtgaacagaggaaaaccaggatttggcaagggatcgggtgtggaccgatcccggacaacaaccactgtcgcattgacaaagaagttgagagaacgtatactggagtttcagacattacgagaagaaatccagcaggaatatcgtgacgtagtggagcgtcgtgttttcactgtgacgggggagcgtgctgatgaagagacaatcgacaagctgatagaaacaggcgacggcgagcaaatctttcagagagcgattcaagagcaagggcgaggaagggtactggacacgctgcaggagatccaggagcgccatgatactgtgaaagagattgagaggaagcttcttgatctgcagcagatcttcctggacttggctgtgttggttgaagctcaaggtgagatgctggacaacattgagacgcaggtcacaggtgcagctgaacatattcagaccggaacaaaccttctccagaaagcgaagaagctgcagaagaacacacgaaaatggacctgcataggcataatcatcctcctcataatcattctcatcattatcctctccttgaaaccatggtcctggggtaaataagcagcaaacaagaagcgtcgttcccatgttggttttggttgatgatattacctatagtattcttgttatagctgtgcatatgtcagaaggtgctgtacatcgtattgcaatctttgtttttttttccttttggaagagaaactttgggtgtgaactttcagattttgcttgattcgaatttgctgtattggttgtgcaactaaaggcctacacatactggtttcttgggaaattggtaactctgtctacgtagacagtaagcct

SEQ ID NO: 27634 - DNA, 911 bp, Zea mays
  Clone ID: LIB4738-009-H1_FLI
ctcgaggccggccgggacacgcttcagcattcttcaaatacttgcataagatggcaggttccgtggcaatcgtgggcatcttcgtcgccctcctcgccgtggccggcgaggcggctgtgttcacggtggtgaaccagtgcccgttcaccgtgtgggccgcgtccgtgccggtgggcggcgggcggcagctgaaccgcggcgagagctggcggatcacggcccccgcgggcacgacggccgcgcgcatctgggcgcgcacggggtgccagttcgacgcgagcgggcgcgggagctgccgcacgggggactgcggcggcgtgctgcagtgcactgggtacgggcgcgcgcccaacacgctggcggagtacgcgctgaagcagttcaacaacctcgacttcttcgacatctccctcatcgacggcttcaacgtgcccatgagcttcctccccgacggcgggtccgggtgcagccgcggcccgcgctgcgccgtggacgtgaacgcgcgctgccctgccgagctgcggcaggacggcgtgtgcaacaacgcgtgccccgtgttcaagaaggacgagtactgctgcgtcggctcggcggccaacgactgccacccgaccaactactccaggtacttcaaggggcagtgccccgacgcgtacagctaccccaaggatgacgccaccagcaccttcacctgccccgccggaaccaactacaaggtcgtcttctgcccgtgaggccgctgaactagcgtgcgcgcgtcgaccaagaacaagaaataaacgaccgaggctgtgtatgttgcccgtgtgctcaactggagcaaaaataaagccaacaaaacaagcacgtgtgatctctatgtcaccaactctatcaccttaattaatggagcattatgaagttgtgtctct

SEQ ID NO: 27635 - DNA, 1762 bp, Zea mays
  Clone ID: LIB4738-010-C5_FLI
ctcgaggccggccggggtgactgtgagcacgagacccccccaccggccaccggccaccgccgcgagaagaaccgacaaccgagcatgaaggccgggcctccgcacgtggccatgctggccacaccggggatgggccacctgatcccgctggcggagctggccaagcgcctggcggcgcggcgcggggccacggccacgctcatcaccttcgcgtccgccgcgtcggccacgcagcgcgcgttcctcgcgtctctcccgccctccgtcgccgcgcgcgcgctcccgcccgtcgacctctccgacctgccccgcgacgccgccatcgagacgctgatgaccgcggagtgcgcgcgctcgctccccgcgatcgcggccgtgctcgcggagctgggcgagaccgcccgcctcgtcgcgttcgtcgtcgaccagttcgggatggagtccttcaacgccgccggcgtcagggcggcgcggtgcctcttcatgccaatgaacctccacgcgctctcgctcgtgctccacctccccgagctggccgcctccgtgcccggcgagttccgggacctggccgacccggtgcggctgcccggctgcgtgcccatcccggggcccgacatcatctcgccgctccaggaccggtccaacccgtcgtacgcggtgatggtgaacctcgccgtacgctgccgcgaagccgccgccgccatcctcgtcaactccttcgacgccgtcgagcctgaggccgccgaggcgctgcgccacccagcagagcccggctggccgcccgtgtaccccgtcggcccgctgatccttcagtccgagcccgagtccggcggcaccggcgccgatgtcgacggcacgcctccacgtgcggcgtgcctcgattggctcgaccggcagccagccaggtcggtcgtctacgtctcgttcggctccggcggcgcgctgccgaaggagcagatgcacgagctggcgctcgggctggagcgcagcgggcagcggttcctgtgggtggtgcgcagccccagcgacgacgaaggcacgctcaacggcaactactacgacgcggagagcaagaaggacccgttcgcgtacctcccagagggcttcgtcgagaggaccaaggaggtgggtctgctggtgccatcgtgggcgccgcagacgcaggtgctggcccacggcgccaccggcgggttcctaacgcactgcgggtggaactccacgctcgagagcctggtgcacggcgtgccgatggtggcctggcccttgttcgccgagcagcggctcaacgcggtcatgctgtcggagggggcaggggctgcgatacggctgcccgagaccaaggacaaggagagcatcgcggaggtggtgagggagctggtggaaggggaagggaagggcgccatggtgagggccaaggtggcccagctgcagaaggctgcggcagagggcctccgtgagggtggtgccgcaacgatggcacttgacgaggtgatcgacaagtgggaggcggaagccaactagaaggtgcattcgcatgcatgcccaacaacacaatcctctccgccaaactctttaaatcatgagttgtcagtgttcatgttcttcaaactctcttaattcgttaattatatgtatgcgtggcgtggataaaggttcgagagattcgtgatgtttatttgggtcaagttaatcactggaatatgcctgtaaaatatgcgtcgtcatagattactttgccgccaaaataaaagtaccgttcttc

SEQ ID NO: 27636 - DNA, 737 bp, Zea mays
  Clone ID: LIB4738-010-C8_FLI
tcgaggccggccgggggctccagcagcctgagctagtgagctcagctgagccccgagctgctataccgtacagccagcgcagaagcggatcggatcggagcgagatggccgcggccggtctgggcgtgaaggcgacgccgttcacgtacgcggcgcacgcgctggccgcgctggcggcggcgctggtgctggtgtggtgcgttcacttccgcggcggcctcgcgctcgaggcacagaacaagaacctcatcttcaacgttcatcctgttcttatgctgatcggctacattatcctcggcagtgaagccattatgatctacaaggtgtttccgaacatgaaccacgacacggccaagctgacgcacctgatcctccacgccatcgcgaccgtgctcggcgccttcggcatctactgcgcgttcaagtaccacaacgacagcggcatcgccaacctctacagcctgcactcctggctcgggatcgggaccatcgctctgtacgccatccagtgggtgttcgggttcgtgaccttcttcctccccggcgcacgccgaggaaccgcggggctacgccccgattccggtcagctagagggggaggagttcgctgggcagtcagaagagggcagctgtgttttgtttttgaattgtaccatgacatatcaggcgtgtgcgtggctcacatccgggtttacttcaaggggaaagcggacgagagtacgcgacgggtttcggtcg

SEQ ID NO: 27637 - DNA, 1251 bp, Zea mays
  Clone ID: LIB4738-011-B8_FLI
ccgggctcctcttcgtcccctcccacccgcaaccgcacagagaaaggggaggaggctctctacccagcgcagcccgagcacccctcccccccggatcgggacccctgctctgcgcaatccacccatggcggaggaatcaggccgccccttgccaaagtttggcgattgggatgttaatgatccagcttctgcagacggattcactgtcatattcaacaaagccagagatgagaagaagggtgggaacggacaagacactgagtcaccttccaaggacaccaggactgagagggtggaatcttatgctgcaaagccaagcacgaagaaatggttttgttgtgtgacagccagccctacgcaatcctgaggaagacaactgcatgcgctttggaaatactgtccctttaattttctatacatactatccataagacaatgtaggggtacccaggcctctccgggctccaggatgggctatctcgtaaaactcttgcgtgcgtgtatgtatggtgtgagagaattcgcaaagtggacttctggttgtaattcttagtcgtctctctctctctctctttgggttggtcacggttctatgatccagcaatccactgaactgtttggtaaaaaaaaaaaaaaaaagccaagcaaataagacgacttgtttcattgattcttcaagagatcgagcttcttttgcaccacaaggtcgaggatgtcttgcagctgcggatcaagctgcggctgcggctcaagctgcaagtgcggcaagaagtaccctgacctggaggagacgagcaccgccgcgcagcccaccgtcgtcctcggggtggccccggagaagaaggccgcgcccgagttcgtcgaggccgcggcggagtccggcgaggccgcccacggctgcagctgcggtagcggctgcaagtgcgacccctgcaactgctgatcacatcgatcgacgaccatggatatgattattatctatctagcttgtggtggtggttgaacaataataagcgaggccgagctggctgccatacataggtattgtgtggtgtgtgtgtgagagagagagaaacagagttcttcagtttgctatctctctctgcatgtttggcgtcagtctttgtgctcatgtacgtgtgtctacatgcatgttggttgatccgattgcgtctgctgtaaccatatattaattggtccacgatgatatgatttgatactatatatatatactaaaaccggacttattag

SEQ ID NO: 27638 - DNA, 1597 bp, Zea mays
  Clone ID: LIB4738-011-G10_FLI
ccggggactaggatttgggatttagctgaaacaaaaatatccctccattaactctccaactcctcttcctcttcctcttcttctgcctcttcatttccaattccggcttcttcctcgcatcacaaaattccgattgcggcgcaatttcagattgcttgctccagggcgcaaatggtcatcatcagcggcagcaacttcccagcggattcgtgatccttccgcgatgggtcccgtcgccaacgatgcgtggcagaagcggttcttcagcgtcgcgccgccggccacgctggtcttcttcttcgtgctgatattcgtcgccggtgcaattgttacgcttgatcataaggagagcctggccatactgcagctgcagccaagaggagtgatcgcagcagagcagatgaggcctccagcgacgagcgagctgcgcgctgagccagcagcagaggaacccgacatctgtgagaataaatgtaggcctgcaggcagcgaggcgttgccgaggggcatcgtgcaggacaagtccaacttcgagatggagtctgggtggcaaccctgaacggaaggagaagaagggcaacggcaggcactcgaaaagcctcctcgccatccccgtcggcatcaagcagaaggcgatcgtcgacaagctcgtatccaagttcccggacaccaatttcatcgtgatgctgttccactacgacggcgaggtggacgggtggcgagacctggagtggtcgggccgcgcgatccacgtcggcgtacgcgaccagaccaagtggtggttcgccaagaggttcctgcacccggacctggtggcggagtacgactacgtcttcctctgggacgaggacatcgaggtggacagcttcgacccgctccggtacctgcgggtcgtgagggaggagcggctggagatctcgcagccggcgctcgaccggcggtcgcagatccaccaccggctcacggcgcgcgccgcgcggagcgggggcgtccaccggcggtactacaagacgagcgggcacggccggtgctacggcaacagcacgggaccgccgtgcgcggggtgggtggagatgatggtgccgtgttctcgcgcgcggcgtggcggtgcgcgtggcacatgatccagaacgacctcatctacgcctggggcatggactacaagctcggctactgcgcgcagggcgaccggagccgcaacgtcggggtcgtcgacagccagtacgtgctccaccggggcatccctacgctcggcgacggcggcaaggcgacggcgacggctgccgcgtcggcattggggacggcagaccggttagcggtcaggcagcggtcctacaccgagctgcagctgttcaacaggaggtggaagaaggccgtggcggaggacgggtgctggaccgacccttacccgaacccggcgacgaccaccggctgaccgttggacggagcgaggcagcgcagggaagtacagtagttggtagctgtcagattgaccttgcctagaagatggtagtagatcatacactcgcattaatttacaggttcacagagagctatacatataatgtacagaactacagattgttttttttccacg

SEQ ID NO: 27639 - DNA, 1410 bp, Zea mays
  Clone ID: LIB4738-011-G12_FLI
ctcgaggccggccggggtcgcgacctcgccacccaaattcatcaagctcaacacgatctcaattcgattccagttcatccatccaacgcctcccgcctgtacgtatagaagaaagaaggaagaaccgtcaccgtacgtcctcgccagtacaaataatggccctgctcaaagccgcgcgcgtcgccgatgtgcccaccctggacgtggtggtggcccccggcctggtggcggttgccaaggcgaggagcgccgcggctgtgggcggccggttctcggtgatcggccaccgcggcaaggggatgaacgcgctggcgtcggaggacccgcgtctgcgggatgtgcgcgagaacacggtccgctccttcaacgacgccgggcgcttccccgtcgactacgtcgagttcgacgtccaggtcaccaaggacgggtgcccaatcatcttccatgacaacttcatcttcacacaagacgatggtaagatttcacaaaagcgtgtggccgatattcagctggaagacttcctgcagtatgggctccagaacgagcaggggaaggttggcaagcccctgcttcgcagattgaaggatggcaggatggtgaactgggacgtgcaatcagaggacgctctttgcacactcgaagaagcgttcgacaaggtcaatccaaggttgggcttcaacgtcgagctgaaatttgacgacagtcttgaatacaccgaggaagagctcactcgcatcctccaggccatccttaaggtggttttcgagtacgccaaggacaggcctatacttttctccagttttcagcccgacgctgcgcagctcatgcgcaaattgcaaggcacataccctgtctacttcttgacgaacggagggacggagctatacgccgacgtgaggaggaactcgctggaggaggccgtcaagctgtgccttgccggtggcctgcaaggaatagtttcagaagcccgcgggatcttcaggcaccccgccgccgtgccaaagatcaaggaagctaacctctccctgctaacctatggaacattgaacaacgtgccggaggcggtttacatgcagcacctcatgggagtgaacggggtcatcgtcgacctggtgccggagatcaccgaggcagtctctgagctcatcgccctgcccctgcccgagcccgacctggaagtgggcagcttgagcaaccaggcggcagctagaggagccacaactccgaatttctcgcagcgcgagatctcgttcctgctgaggcttattcctgagcttgtccaataatgcctagacttcctggtgttctgtctgtctatcatggatgaattgactaatgtgttactgatgtactgatccgcatacaagaaaagaagcccttgtgcagggtattatttgttgtcgtgggttg

SEQ ID NO: 27640 - DNA, 774 bp, Zea mays
  Clone ID: LIB4738-013-B3_FLI
ctcgaggccggccggggagaggcatgtttcactcgcttgaccctcctcctcttcactcgcttctcccagaagtcacgcaccaaacaccaccaccaaagaaggcgagaacgctccccttcccctcacaggctccaggaccgtctcctcgcctgctcatctgccgctgctccccttctctgggctcggagaatcggagagaagcgcgcgcggccatggcgtccagcgcctctcggttcatcaagtgcgtcacggtcggcgacggtgccgtgggcaagacatgtatgctcatctgctacaccagcaacaagttccctactgactacatacctacggtgttcgacaatttcagtgcaaatgtagttgtggatggcaccactgtgaatttgggcctttgggataccgctgggcaggaagattacaaccgcctgaggcctctaagctaccgaggtgcagatgttttcgtgcttgcattctcacttgtgagccgagctagctatgagaatatcatgaagaagtggataccagagcttcaacattatgcacctggggtgcccgttgttttggcaggcacaaaattggatcttcgtgaagacaagcactacttgatggaccatcctggattggtgcctgttaccactgcacagggggaggaacttcgtagacaaattggtgctatgtattacattgaatgcagctcaaagacacagcagaatgtcaaagctgtgttcgatgctgccatcaaggtagtaattcagcctccaactaaaataagag

SEQ ID NO: 27641 - DNA, 1108 bp, Zea mays
  Clone ID: LIB4738-013-C1_FLI
ctcgaggccggccgggccacccgcccgcactagcccactccggagtccggccctcgccctgctcgccgcaatgcatcaccggttcgcgggcctcgtgcccaccgcccgccccgctctgccgccgatccacggcggagtcgtcggccggagctatccgcccgtccaccggtccttggcgcttcgcctggcgccgtttgcctccgcgtctgtccgacgcgcgtgccgccccctcgccgtctccgcccaatccaccagcctccggccggagaagttttttgaagtggagatgaaggtgcgcgactatgaaattgaccagtatggtgttgtcaacaatgcagtctatgctagctactgccaacatggtcgtcacgagctgcttgagagcgtaggcatcagtgcagatgcagtggcgcgcagtggggaatccctggctctctctgagttgaacctcaagtactttgcccctttgaggagtggcgataagtttgttgttaaggtgaggcttgcaggcatcaaaggtgtacggatgatattcgaccacatcattacaaaactgcctaatcatgagctaattctggaggcaaaggcaacggctgtttgcctgaacaaagactactatcctacccgtattcctcgtgaactattgtccaagatgcagctcttcttacccgtggacagcagagggtcaaatgaagacgttaataatcggaataacagctgcaactaattctggaggcaaagacaagggctgtttgttcgaactgaagactaccatctcatctccaaaactgtttatgtcatccaagctgcagcacctcatcgaagaatatagtagaatctagttttggggactggtggctgcataatagtaatccatccgttcttctttatttatcgcagtttagttaaaaatgaactagcggacgacaaatattcgagtacggttgtagtagaatctagtcttggagactggcggctgcttggtcctgcaatgccaacgaaaaccacctatgtatctcaggagcactgtcatagaagagcgcagtccatcttcaatctttgtaactgttcacccgaaacatttgatccgttacggcagtcgtttgcg

SEQ ID NO: 27642 - DNA, 1424 bp, Zea mays
  Clone ID: LIB4738-013-C5_FLI
ccgggatcctctccagtctccacccccactccacgaacacgattgctgcttgcctgctgcttctgcggctcgcggccatcagatccagcgccaccgatgccgccgcagccgaacgggggcaaggtgaccccgaacctggcgatggacgcggaggccacgcgcctgctcaacctcacggtgctccagcgcttggaccccgccgtcgaggacatccttatcaccgccgcgcacgtcacactctacgatttcaacatcgacctcaaccagtggagccggaaggacgtcgaggggtcgctgtttgtcgtcaagaggaactctcagccccgattccagttcatcgtcatgaaccggcgcaacactgataatctggtggaggatctcttaagtgattttgaatacgagcttcaacctccatatttgttgtaccggaacgcttcacaagaagtcaatggaatttggttttacaaccaacaggactgtgaagctgttgcaagtctatttggaaggatactgaatgcttacgccaaagtacctccaaaacctaaagtgccttccacaaaaagtgagtttgaggaactggaggctgttcctacatctgctgctatagacggcccccttgaacctccgccagcgtctgccgctgtagtccttgatacccctgatgaattattaatcagttacttcagtggcgctgctagcattggaagtgtatcaaacgcacaaccgtctggaagggtgcacccatctactgagagcatcccatcttcccatgtgccattgatcgttccatctgctgcttcaacacatcaactgcccccttcagtagcttcaacagcttcaccattgcccgtccatggaactaatgcccacactagccggccaacaaatcttgtgacaccagatttctttgcgcctccaccatcctcttcagctccactggctccgccgggtgcatctgtggttcctactgcgccacctcttcatcccacttcggcggcatctattcaacgttctcagtatggcaccccactgctccagccctttccaccgcccactccacctccttcccttaacccctcacacagtgatagacttactgttacaagggatagagtcaaagacgctctacagagacttgttcagagcgacgagttcgttgatctggtgtgccgggaattgcagagatcacttgtataggctgcttgcttagtcttgtcgggagttttctggctcgtggcaagaatgtgcctgtaattttcctttgacttttttgcatgcttcccttcccgtactattgtataggtttgtgttagtgtattggtgtagagtactataggaatggttggtagtatctgtggggtcccttggttccaaatatccgtgttggcagtgtgagaagcggaagtaaaactagcctgttcaag

SEQ ID NO: 27643 - DNA, 1217 bp, Zea mays
  Clone ID: LIB4738-013-D9_FLI
ctcgaggccggccggggagaccccagagcgaagaagccccggccctcctgtagagctggtctccctctgaccctctctcctctgcgcttccgctgcgtcggccctgctcgtagcttggaggcggcggcattctccggcaatggggtgcaaggcgtgcgataagcccaagcccaactaccgcaagggcctgtggtcgccggaggaggaccagaagctccgcgactacattctcctccacggccacggctgctggagcgcgctccccgcgaaagccgggctccagcggaacggcaagagctgcaggctgcggtggatcaactaccttcggccggggctgaagcacggcatgttctccccggaggaggaggagacggtgatgagcctccacgccacgctcggcaacaagtggtccaggatcgcacggcacttgcctggcaggaccgacaacgaggtcaagaactactggaactcgtacctcaagaagagggtcgaggccaaggaccaggggcccagcacgcccgcgccggcggcgtccaattcggacgacgactcgcactgcgtcaagcagcgcagggacgacggcgacacggcggcgggagccaacggcccggcggactccggcgcgtcggagccgcgcgagtcgtcgtcggccgacgactcgagctgcctgacggacccgcacgcctgcaggccccacgcgcccgtgccgcccaaggtcatgttcgcggactggctggacatggacatggactacgtgggcggtgccctgccgtcgacagcaccagcagcacctggtctgctcggcgctgcgggcgtggccacggccagcacgggcgaccgcgaccgcgatcagcatcaggtgatgagcatgagccaggggtccgtgcaggtggatgggccatccggtgccgatgtgtccctgcacggcttcggtgacagcggcgccggctgttgggagttccaggagcacttcgatgccatcgatcacatgcaggcggccggcttctgcgacctgctctccatgaccgactacttcggcctcgactagactccaaccctggttggtgatccatcgttggtgaaaggatttgcgtttttttttaattacactttgttagaagtctcggtgaaaggcttgcttgtggctgtaaattactgtcgtgtacgtatagatagaggaattttaaaagcagataaaagtcaaggacctacattgg

SEQ ID NO: 27644 - DNA, 764 bp, Zea mays
  Clone ID: LIB4738-014-E7_FLI
gacgccggcgactacaccatctacatgggcgccgacaagaacgagaacgaggagctcatcaaatacggcctccccgaggacgtctggttccatgtggacaaggtatcctcggcacacgtctacctgaggctaaagaaaggcgagacgatacacaccatcagcgaggccctcctggaggactgtgcgcagctcgtcaaggctcactccattcaagggaacaagatgaacaacgtcgaggtgatctacacgccctgggctaatctcaagaagtccccatccatggatgtcggccaggtacatgtgcttatagtcgagaagcgtgtcaacgagatcatcaacaggctgaataaaacccgggtagaacgccgggcgccagacttgaaagccgagaaagaggcatcaaatgcagcagaaaaggccgagaggaagatgcagctgaaagagaagaaacggaaggaggagatggaaaggctggagaaggagaaatgggcggagatacggagctacaagggcctcatggtggccgagaagatgacgtccaaccgccagatcgcctccgccggcaagtccatgcaggaaatggaggatgagttcgtctgaagacgactgtcatcgtcactggagtctacatctctctctctctctctctctctgtctgtgtgtgtgttgtgtgtgtacgtacatatgtccatgctcgcgtgataacgacgagtcgaagcaaccaaaagatctcatggatcgattattcgatccgttcctgatcc

SEQ ID NO: 27645 - DNA, 978 bp, Zea mays
  Clone ID: LIB4738-015-E1_FLI
ctcgaggccggccggggaagaaaaaaaatctcacgccatctgcacctccctcctatcggtcgccctctcgccgacgccacccatggaggccgccgcgatcgcccccacctcccggtctctcccgctccccttctcatctacccagctccagcgccggcgccgtgccaccttcatacccatcgccgcctccaagcgtcacgaagacgacaaggagaccgctaaaggttccggctcggaaccccggcgcgagcccactagcctggcgccgtatggcatctccatctcgccgctctccaaggacgcggctatggggctggtggtgagcgccgccacggggagcggctggaccacgggatcgggaatggagggcccgccgacggcgagcaaagctggtggggcgggcagaccggaggtgtcgacgctgccttggtccctcttcacgaaatcaccacggcggcgcatgcgggtggccttcacctgcaacgtgtgcgggcagcgtacgaccagggccatcaatcctcatgcctacactgatggaactgtgtttgttcagtgctgcggttgcaatgtgttccataagttggtcgacaacctgaacctgtttcatgagatgaagtgctacgtcggtccagacttccgctaccaaggggatgctccattcaactaccttgacccaaacgaggataacgacactaccttccctctctgaagcctaaagcctcctttatgttgccagtacaaaattggtcggtgtcgttctaatttgctcgtatagatgtacttaataagcaggtgtacgtaccttcatgaacctgtaagattgttcagatgtatataattctacttagtgcacacaggtagtggataataatggatagacgaggaagtttatgcattcggctttgtgctccaggagcctgtagtgtgtgaacatgatatgtatgaatgtattatatatctcaagtgtgtttatggagt

SEQ ID NO: 27646 - DNA, 1985 bp, Zea mays
  Clone ID: LIB4738-016-E11_FLI
gaggccggccggggaacagaagcaaccaacccaggccaacccgaaccccagaccaaactgcccccttccgcctcgccgccggcgatcgccggagatgtcgtggctcgcccgctctctcgccacatccctcaacatgcccgacaactccggcgctgacgatgacccggatgcctcccacaccccttctccctccgcgcgcatcccgccgtcgccgccgctacccactcaccctccgcattcgggcgcggcggagggcgtcaaggaggaccttaccgagctctccaaaaccctaacgcgccagttctggggcgtcgccaacttcctcgcgccaccgcccggggagacgttgccgtcaccctcgcactctccccaatcagcggggggtcaatccgccgatgcgaggacaccacccgagatcgccgggatccggaacgacttcgctgagatcggtgggaggttcagaagcgggatctcccggatctcaggtcacaaggccgtctctgggttctctaagatggcctctagtttcttcgctcctgatgacggcgaggaggacgagtgggaagaggagcggagacgacagattaggcatgagatgggagaggaggcggtatggcacgaggaggcggagggcgacgaggagtggcatcagtgggaggagagggtaagacttagggtggaggatggcgatacaaggcatgagttggagatggagagagcgagggatgaagaagatgacgaattggaagagcagagagcgaggcatggggatggtggcgaatcaggggagcagacaacaaggcctggtgaggatggcgaactggaggagctgaggataaggcatgaggaggaagtggaggaggaatgggatgtgattggaatcactgaggaggttcttgcattcgccacaaacattgccaggcacccggagacctggctcgatttcccgttgctgcctgatgatgatgagtctgatggaccattctcatattttgatatgtccgatgctcaacaagaacactccttggctattgagcatcttgctcccagattagcggctttgcggattgaactatgcccaatacatatgagtcaagaatgtttttggaaaatttactttgttcttctacatcctagactgaacaaacatgatgctgagcttctatctaccccacagatcgtggaagctagagcaatgcttatgcaacgtttgcaataccagtccaaacttgaaactgagcatctaggtcatcataaggatgaccttggagttcaattacgaggagacaccttgaaagatgctacagaagcattcccattcacgcgatgggaagcagcttctgttatgcccataacagaaattgagattgagaagcatcctatccaagtaactgaagttgcagttgtggacaaatcggtcatcgaagaggagctgcccaagggtcatgctgagacctcaaatgttttgcaagaggcctttgatgatgacatagacgattggttcgaggaggctgatcttgctggccacccaactatccacataggtgacgaggaagacgtgtcttttagtgacttggaagaggatgacgtgaaatgatttatagttgcaattgcaatttgcaaagggagaaatcgacctgtgtattggaaactggacacctctgctgtaaaagaaaatggaggtgaaagttgttcgtagacacctctgctgtgcaagaaaatggagaggtgaaagtttttcgtgaatgggattgggtgtacattgaaaactgagcggtgttgttcgcgaaaagggtgtacattgaaaactgagcggctttgttttgcactcaagctgctagggtgaacgcaatgtgatccactcaagatatgatggggtgctacattttactagctttacagtttgtaatttgattcatactcttgtgtacataagcattcgtgatgttctaaggtcagacaataaagttccatgtgttacaatc

SEQ ID NO: 27647 - DNA, 771 bp, Zea mays
  Clone ID: LIB4738-016-H10_FLI
ccgggacttttccggctcccattcctcgcgcggcgaccacccgattcgaagcgtgcggagagaccgaagaagcgggagagatggctcgtaccaagcagactgctcgcaagtccacgggagggaaggctcccaggaagcagcttgccaccaaggctgcccgtaagtctgcccccaccactggtggagtgaagaagcctcaccgctaccgccctggaactgttgccctccgtgagatccgcaagtatcagaagagcactgagctgctgatcaggaagctgcccttccagaggctcgtcagggaaattgcacaggacttcaaaactgatttgcgtttccagagccatgcggtgcttgccctccaggaggctgctgaggcataccttgttggcctgtttgaggacaccaacctgtgcgccatccatgctaagcgtgtgaccatcatgccaaaggacattcagctggcaaggaggatccgcggcgagagggcctaatcgccacctcaaacatcgtgacaaaaacatgaagtcctggggttattgttaatctggtgccattgtaaggacatatgagtagggtttgttttgtggatcgcaggtttctcttctgctactgttgctgctacctttgctggtgttattgttagggtcgaatacttaagttaactatgcgctgacagtctggactagcagtgttatgtgcgctgctggaccttgcgcgcaatgctgtggccgatttgttcgttaatgtcaagaattgtgttacagtgcgtgc

SEQ ID NO: 27648 - DNA, 893 bp, Zea mays
  Clone ID: LIB4738-016-H4_FLI
cgggacccacatccccgcgcgggggatacgcggtggaaaacccggcgaccacatcaaaacacgagacgtctcccgcaggactggtcactcggcacgcaggcagaggcagcatagcagcagccaactccatccatcctctttcccctcctcgcttcgcttcctcggcggattcctcctccctcgaccgtccccgtccccgtccccttccggcgcgcgagctcgcccgagatggcaaacgcgagatcgggtgtcgctgtgaatgacgagtgcatgctcaagttcggcgagctgcagtcgaagaggctgcaccgcttcctaactttcaagatggacgacaagttcaaggagatcgttgtggaccaggtcggggatcgcgctaccagctacgaggacttcacaaacagcctccccgagaatgactgccgatacgcgatctacgatttcgactttgtcactgcagaagatgtccagaagagcaggatcttctatatcctatggtccccatcctccgccaaggtgaagagcaagatgctttatgcaagctcaaaccaaaaattcaagagtgggctcaatggcattcaggtggaactgcaggctactgatgcaagtgaaatcagccttgatgagatcaaggatcgggctcgctaggcatcatgatcatgcatcatggactcggcctactactgtggatttgtatgccattatagacttggtgctgtgaaagactgcttgatgatttgcgggtttgttgctgtgtaaaaaaaggtcccatggctcccagaagaccatgaaggttcggatctatcatgtaattccttgttatctgccaattatgtatggactatggacatgtgttgcgctgttcaacttactactacaaataagtaatcgat

SEQ ID NO: 27649 - DNA, 1001 bp, Zea mays
  Clone ID: LIB4738-016-H5_FLI
ctcgaggccggccgggagttgtgcccttgctgtgtttggttgggccctcctcttcctcttctccttctccagtcctgttggcatcgcgtacaagagggcagccagtggaccctcgctgccgccattgctggggtgggccgtgctccagccttgtgcggttggcaggcctactagctgtagagtatagtggaggtggagtagtatttctcgcttccattggcctccatccacctctcctccactcgacctgcgcttcactacagcccactggcaggggaaggggagcgtcgaccaattcgtcccgccctcgccgcgccgctggcctcgctcgcgtgccctccccgatggcggcagcggcgatccaccagttcgccgagtgtatcacctgccacgcctggagccccgaccagtcgatgattgccttttgcccaaacaaccatgaagtacatatctataaattcttcacagacaaatgggagaaacttcatgttttgtcaaagcatgatcaaatagtttcgggaatagactggagtaattcatccaacaaaatcgtaacagtttcacatgatagaaattcatatgtttggacacaagaaggatctgattggatacctactctggttattctaaagttaaatcgtgcagctttatgtgttcagtggagcccaaaagaaaacaagtttgccgtgggaagtggtgccaaatctgtgtgtatttgttattatgaacaagaaaacaattggtggattagcaaagttatcaggaaaaggcatgaatcttctgtcactagtcttgcatggcatccaaacaatgtgagtttaaagtaatgagaggtttcagtaggaaactaacaagaaaaacatttttgatgtgttctcagtatgtttcttttgtgttgtattcctgaacctccatctatacctgtaaaatttctgtatatgtatgccactatgtaggaatcggtattgtcatgtaatgcaactgcaagatcgttcccattg

SEQ ID NO: 27650 - DNA, 797 bp, Zea mays
  Clone ID: LIB4738-018-F2_FLI
ctcgaggccggccgggatccatcaccaccatctccgatccatctcttcggctgcctgtgctacccttcccttcacctcacacaggaatactacaggataaagcagctccttcgatacatatatacttttttccagaaaaaaaaggctgagccggtgcgagcgaggcttgaccgcttgagcaatggcgagcgcttttagctcgagggcatgcgcgctggtggcgctgctaatggggctctgcaccgccggcgcggcggcgggcaggatcgacgacgggctggaggtgacgtggggcgacggccgcgggagcgtctcgtccgacggccaggtgctgacgctgtcgctcgaccgcacctccggctccgggttccgctccaaggacacgtacctcttcgcgcgcgccgacgtgcagatcaagctcgtccctgacaactccgccggcacggtcaccaccttctacttcatctcggaggggccgtgggatgtccacgacgaggtcgacctcgagttcctgggcaacgccagcgggcagccgtacacgctgcacaccaacgtgtacgccagcggcaacggcagcagggagcagcagttccacctctggttcgaccccaccgccgacttccacacctactccatccagtggacgcagcagcacatcctcgtgctggtggacgggacgccgatccgggagttcaagaaccacgcggaccggggcgtgccgcacccgtcgtcgcagcggatgcgcctctacggctcgctgtgggacgccgaggactgggccacgcagggcggccctc

SEQ ID NO: 27651 - DNA, 1251 bp, Zea mays
  Clone ID: LIB4738-018-G5_FLI
cggtcgtgacgcccgcgtgaaaccagcgtctcgtgcatcctacggccaccggctttccccattttgtccttaactcaaacgcgcaagccaccccctcttcgcttccgttcctgtcctctcctctgtccctctacggtgcttctgctcgccggcccaaaatcgcctcatcgaccacgcccccttccaggctcccgtctccatgggtctcctctcaaacaggattgggagggagagcctcaaggcgggggatcatatctactcctggagggcggcgtgggtctacgcgcgtcacggaatatatgtgggcgatgataaggtgatccatttcacaagaggaagaggacaggaggtcggaacaggaactgtcgtcgatattattcttgtgagttccaccccaaaacgaagcaacacgccttgcccggtgtgcaccgacgaaaccagcgacagcagcacagagacgaacggcgtggtatcctcctgcctcagctgcttcctagctgggggtgctctctaccgtttcgagtacgcagtcaacccggcgctcttcctcgccaaagcgcgaggagggacgtgcacgctcgctccctctgaccctgacgacacggtggctcgccgcgccagatacctgctgagcaacggtttcaggtgctacaacctgttcaagagcaactgcgaggacttcgcgatatactgcaagactggccttcttgtcgctgagcagggcgttgtcgggcagagcgggcaggctatctccatcatcggtggacctctcgccgcggtggtctcgaccccattccgcttggttaccacgaacatctatgggatggcggtgatggccgtcggggtgtactgcgcgagcaggtatgcagctgatattggcaaccgccgtgatgtggtgaaaatggaagtcgaggacctgacggccggactggccagcggcaggatatgtgctgtggagaacatcgcccagctggtggctccggaggcagaaggcccggccgatgccacggccacggccacgctggctgcttaacggaccattgtgccattgttgctgtgagagagatgtgcgtcagccaacatgtgtgctattgctttggcttatttgtgttcagaatccacttaaactcggtcgaagtgagctttccgttcggcaacgtctgtactcttacgaatctcgatcgtgtatgtctttaagtattgtgttgtgtttcaaagataaaaaaaggtgacctttgtgtatgattttct

SEQ ID NO: 27652 - DNA, 1352 bp, Zea mays
  Clone ID: LIB4738-019-A6_FLI
aggcaaccaaacctcgtctcgtcttctctccgctaccaccaccactgctcgttttacagaaaccggaaggaaccaaacgcctttccgccccgggccgccgctacccaagcccagcaaccaccactcgttgtcgtcgactactaggcggcaagcaggcgtcctgttttttttttttttggtcctcgtcgtcgtccggactccggacaggacaggacatgggcgcggaggcggcggagcgcgacagaatcaggggcccgtggagccccgaggaggacgaggcgctgcggcggctggtggagcggcacggcgcgcgcaactggacggcgatcgggcgcggcgtcccgggccggtcgggcaagtcgtgccgcctgcggtggtgcaaccagctgtcgccaagggtggcgcgccgccccttcacggccgacgaggacgcggccatcgcccgcgcccacgcccgcctcggcaaccgctgggccgccatcgcgcgcctgctccccggccgcaccgacaacgccgtcaagaaccactggaactgctccctcaagcgcaagctcggcgccgccgccgccgcgtccggttcggcggtttccgctgacgactccgccgccgccgccgagaccgaggcgcgccggggcaagatgatgatgatgagcatctcgccgcccgacagcccctcggggtcggggtcggggtccgaccgtagcgacctcagcagccacggcgccgggtccgggtccgggtccgggtccggccagatttaccgccccgtggccgcgcgctccggcgggttcgagccggcggactgcgccatgagccgtccgcaggaggaggacccgctcaccgccctcagcctctcgcttcccggcacggaccagcggtttcaccaccacagcgccgccgccgacagccacttccaggagctcccgccgtcgccctcctcacccgcgccctcggcctacccgttcagccccgagttcgcggcggcgatgcagcagctgatccgcaccgaggtgcagcggtacatggcgagcgcgggcctgcgcgccggctgcggcgccgttggcgcgaccgacctctgcatgccgcagctggtggacggcgtcatgcgcgctgccgccgaacaggtcggccggatgcagtagccccgcgcccccggcgggggcatcaaaccgtcagtgctcccaaatcgtcgtctagctagggcgaccgcaacgcaacggttgttggagtagcaaacttggttttaaggtgcgagggaaaaattggctgggctgaaagcagaaagccttgtaatgtacatgaaagaaacggaacggatggcgcgctcacaatctgagctcgccattgccgct

SEQ ID NO: 27653 - DNA, 1053 bp, Zea mays
  Clone ID: LIB4738-021-A3_FLI
ccgggactgcacccaccttttcaatccaatcctgccgcattgcataattcgcatcgaagatcgatgtgaatccgtggaagggagggcggaggagaaggaagaagaggggtcgaggccgaatccgccggtgagaaggggagcgatggcgagttcgtgcggcagctgctgcgcagaagcgatggaggccgcgtcgtcgctacgtgccgcacgccgggttccgcggccgagctccagaagctcagggaggagcacgcgcccgggcgcctcaccgtgctgccgctcgacgtcaccgacgagagcaccatagaggcagctgcggcctcaatcacggagacccacggttctcttgaccttctgatcaactccgccggcatcctctcgatcccgaacgtgatacagccagagactacgctaagcaaggttcagaagtcgtccctgatgctggcatacgaggtgaacgcagtcggccctatcctagtgatcaagcacatgtggcctctgctgaagatcggaggccgctccgagactaggagagggttcgcgcttgttgcaaacatgagcgctcgagtcagctccataggagacaacgctctgggtggctggcatgcgtacagagcttctaaaacagcgctgaatcagttgaccaagacagtgtcggtggagttcggcaggaaggacaacatcgcctgcgtcctgctgcatcctggaaccgtggacaccgacctctcgaggccgtttcagaggaatgtccccgagggtaaactcttcacgagggagttctctgtgcagaggcttctctccgtcatcgacagcgtcaagaaaggcgacaacggcaagttcttcgcgtgggatggccaagaaatcccttggtgaacggtcatcgtaactcgcttgagtctatagcacagcacacagcagtcaacaacgcccctggttttaatccaacgttgtttttttttcaacaagccaagcgaacagatgcattatttctagctaaagggtcctctttttgtgttatcaccgacctaaagttcaagatgttttttttcttac

SEQ ID NO: 27654 - DNA, 1043 bp, Zea mays
  Clone ID: LIB4738-021-C3_FLI
ctcgaggccggccgggcccttccccgcttcgacaagtctcgtcccccgcccccttattccattacgagcaactccgccgccgccgtaaagccatctcccccatccgccgccgccgccaccgctgctggtgggacgggccgtgcgtccgttccagcgaagaggagcagcgggtcggaggagccgccggcgaggtcgggccgcgggggatcgagatggtgctgtgggagctcacggccatcaccgcctacttcctcgggctgaggcgcacctaccgcctcgcgctccgcatccagcgccgcctcatcccgcccaaccaccccaggatccgggacttcgtctacaggcgcacacgggatgtcttcaacgttgcagtgtcggtccacaagaacattcagcagagagacatagaggtcggccggaacctcggaaacgcgatccttcgctggcttgatcgcatgaagccatcagcggagatccgcccccgtcttccaggcccaccaaacggcagcacggccgagcagttcagacatgtatcgagcgcgagcaggggcgcgggggcacagaagacctcctcctcctccaaagcttcgccccacgactccagcgggaagatgctgttctcgcgcctcaacattgggcccaagcacttcccggttctgcccacgctagcacagcccaacaggatcagcgcgagcagccagtgcaggcgcatctcctactcctacgccccgttcccgtcggtcactgccaggaggaagggtgtcttccgcgaggacattgcacagctgatggtgtaaggatctaaaatacttgccagcgatctcgtgtactgtttttttttgtttttggaacactggacttagtgatttgcccagatcagatgtctgatgtgtcttggtttaataataaagaagcgagcgagcgcaggggaaattgtcactgctgctgcggtttaggccattagatttgtaaccaaatgctcagatgaacagcatttcgtgtttggtaatgaacaccagaacatgtgcactcgtttatgtgcg

SEQ ID NO: 27655 - DNA, 1106 bp, Zea mays
  Clone ID: LIB4738-021-F3_FLI
cctcgaggccggccgggacaccgcatcccacaacccccgagctcagcttagctccactccagctccaatcgcagtcgtgaccagagcgcgaaagctagctagagggccgtgaaaatgccgatcaataggatcgccctggggagccaccaggaggtgtaccacccgggcgccctcaaggcggcgttcgctgagttcatctccaccctcatcttcgtcttcgccggccagggctccggcatggccttcagcaagctgaccggcggcggcccgacgaccccggcgggcctgatcgcggcggcggtggcgcacgcgttcgcgctgttcgtggcggtgtctggggcgcgaacatctccggcgggcacgtgaaccctgccgtgaccttcggcgccttcgtgggcggcaacatcaccctgttccgggggctcctgtactgggtggcgcagctgctggggtccaccgtggcgtgcttcctgctccgcttctcgacgggcgggcaggccacgggcaccttcgggctgacgggcgtgtcggtgtgggaggcgctggtgctggagatcgtgatgaccttcgggctggtgtacacggtgtacgccacggcggtggacccgaagaagggcagcctgggcaccatcgcccccattgccatcggcttcatcgtgggggccaacatcctggtgggcggcgccttcgacggcgcgtccatgaaccccgccgtgtccttcggccccgccctcgtcagctgggagtggggctaccagtgggtgtactgggtcgggcccctcatcggcggcggcctcgccggcgtcatctacgagctgctcttcatctcccacacccacgagcagctcccctccaccgactactaaaagccgaagccgaccgacctaggggtgcgcagcgcagctagcgcatccagctctctctccccgctcgccgccgtttagtttctctcgtgcacgtgcatgcatcgtcgactgtctcaggccgccgctgcgccggcgccgctcgcatcgtttgcttttccttggatcagcagtcgtcgccgtcaggttgagctgcttgtaaccgtgaattccggacccgtttgcttctgtaagatttgtgcg

SEQ ID NO: 27656 - DNA, 1029 bp, Zea mays
  Clone ID: LIB4738-021-H9_FLI
ccgggcccatttcgtagcccaccgaattccctgcgattcctctcccctcgcctcctcgtctccccctaggggatcgtcggagaggaatcgcaaagagggccgtctcatccgagttaaggaagccatggagcacaaggaggctgggtgccaggcccccgagggacccatcctctgcatcaataactgtggcttcttcggcagcgcggcgaccatgaacatgtgctctaagtgccacaaggagatgataacgaagcaggatcaggccaagctggctgcctcctctatcgacagcatcgtgaacggcagcgacgccgtcatggagccggttgttgctggcagcaacacggtagtagctgttgcccaagtcgagttgcaaacaatgaacgtgcagcagcccgctgatgttgccggacccagcgagggggtggcggcgatctccaaaggggggaaggtagggccgaaccggtgcagcgcctgcaggaagagggttgggctcacgggattcaactgccggtgtgggaacttgtactgcgcgctccaccgctactccgacaagcacgactgcaagttcgactaccggactgctgccagggacgccattgccaaggctaatccggtggtgaaggcagacaagctcgacaagatctagggggggttccctacggttggtgtcaggaagattgtaaaccgcggtaactcgtcatgcggaactgctgccttgccccccgcgcctttctcttccatgtttgctgctacaatcttgttgttgggcattgcagtgcacggtgcacacttgtgtagcccgcctccgagaattctcctgcctctgcatctggtcagttcaaaaatgatttgcatgttggctatgttgtgtaagctctatttatggtggtctcgctgagacgggtatttggcttcgcagttatctagctatgtgatgtactgttgtcttgtccctgggtattatatggtacactgcagccagtaatagtaatctgcaactgtgcgttaaatggtccgtcgttttct

SEQ ID NO: 27657 - DNA, 1478 bp, Zea mays
  Clone ID: LIB4738-023-D6_FLI
ctcgaggccggccgggagaagaaaagaaaaggaacagagatatcgtcaacgttttccggccttcaccgagagacacgccgaagtctgcaaatcccctctcagtcaactccaagggccaagaccccaatttcccctagaggttgggattttgtgggttcagtcatgctcgagcggcaccgcgttcatcgcgacgccgacggcgatctccccgccgccgtgaccgccccccttctcgcgcacccaccgtcgccggctgagccttggcctgcgaactttggttcatcggagataaccgacgaggagatcgacgccgcctccgccgcctgctgccgcatctgcctcgaatccgagtccgagcctggtgatgtgctaatatctccatgtatgtgcaaggggacacagcagttcgtgcatcgctcctgccttgaccactggaggtctgttaaggaaggaactgccttttcacactgcacaacatgcaaggcgcgattccatctacgggttgaatttctggaggatgacatttgtcgtagaatgaagtttcggatgttcgttgcaagagatgttatcattatattccttcttatacaagccaccatcgcagctataggtggtatggcatattttttggacaaagacggaaacttcagaaacaaattttctgatgattgggaacggtttctgtcaaagcatccagtgcccttttactactgtgttggtgtggttgtgttctttgtaatggttggatttttcgggctaatactacacctctcctcttacaacaacaacgatccgtgcctggttggctcccgtgattgttgctttgggtgtggtctggtggacttaccggcttcaatggaagcttgtttcgctttcgctgtcatatttgttattatgttggccatccttggagttgcctacgggtttcttgcggcgactgtggccatccagaggatctggcagcggcactatcacatacttaccaagaaggagctcacgaaggaatatgtggtggaggacctccctgggggttacacgccgccgaagatggatccagagcatgagcagcggttgaaggtgttgcagctcatgtagcttgcactttcgcaggtgatggacatgaagtatcgcatcttttttgttgcattgcatgtatgtacttttgcatgctgtgagtgttattagttggggtaaacatgtattttagtgacggaagtccatgtgcttataatgtacaaatatagaaccacggttaccagtcccaggtggggaatcacatacaggctaggaacaatgcaagttaaattgatcgactgtttcgctgcacatactgcattactgccgagagacaatggtaatgctcattgtatcgaaacgttagtttccttttttttcactgctttggcgcctcggtgtttcgtccctttgtatctggatatgttgtacttcacctggaccaatcagaatcactctactac

SEQ ID NO: 27658 - DNA, 865 bp, Zea mays
  Clone ID: LIB4738-023-F12_FLI
gccgggagatcagatcacaccacagccgcggatagagaaggaaaaatttccccaaaccctagcttcggatctcgatggcgaacccccgcgtcttcttcgacatgaccgtcggcggtgccccagccggccggatcgtgatggagctgtacgccaacgaggtgcccaagaccgcggagaacttccgcgcgctgtgcacgggcgagaagggcgtgggcaagtccgggaagccgctccactacaagggctctaccttccaccgcgtcatcccccagttcatgtgccagggcggcgacttcacccgcggcaacggcaccggcggcgagtccatctacggcgagaagttccccgacgagaagttcgtccgcaagcacaccggccccggggtgctctccatggccaacgccggccccaacaccaacggctctcaattcttcatctgcaccgtggagaccccctggctggatggcaagcacgtcgtcttcggccaggtcgtcgagggcatggaggtcgtcaaggccatcgagaaggtgggctcccgcagcggcgccacctccaaggaggtgaaggtcgctgactgtggccagctctagatctctggtctgtccggctgccctccctccgtcatcgtcgactccgcctgcgtccgtcccttttcatttccttcgatctgaataagatgatggcgatctgagtggtggtcttagttgagtcttcaagtcgtttgtgtctgtgtccctcgcggttttaatttagcggtttaggtgtggatctgtgaatcccgtggcgcctctgcttaatccttgtttcagctgttatgttatgggatccatgataatgctataaaactgaaattccgtttcgtgct

SEQ ID NO: 27659 - DNA, 789 bp, Zea mays
  Clone ID: LIB4738-023-H4_FLI
tcgaggccggccgggattccttagctctgccctccgcccctcccaaatccattcactaccgccggcgccggatccaataggaggaggaggaagatgactgtgggcatgatcaacgcaaacccggtggtgcacgagcggccggagcgcgcctcgcacccccacgccgccgatgtgctcgaccctctcgatgtctttggtagagtacttcagtcctctcctcatacggtgcgggacatcaaggacccggagcacccgtactccctggagcagctcagcgtgccgtcggaggagtccgtctccgttgacgagacgctcggacgcatccagataaccttcactccaactgtgcagcactgcagtatggccacagtcattggcctgtgcctccgacttaagttgatgcagaacttccctccacatttcaaggttgacatcaaagttgctccaggatctcttgctaatgaagaatcagtaaacaagcaattgaacgacaaggagagggttgcagcagccttggagaaccccaacctacgccagctggtcgatgaatgcttatgcttcaatgatccatactcacgttaacttgttccatgctgcttcacaagtcgcaaccctgcctgctgtacagtagtaaccatgcatgctgtagtctgccctatatgttgacgctgtcgttgtacctggcaacgtgtaattaactgccccggagacatctgtttttgccatctttaaaacgtatggatctcaataatatgacaagagttgcctgcttatgtgacattagcatcg

SEQ ID NO: 27660 - DNA, 1490 bp, Zea mays
  Clone ID: LIB4738-024-D5_FLI
atctgatttcgggcgccggaggactacatggaggttagggagatggcgatggccgcggcggctgcggctgcggcgtccggcgggggaggcgtcaagctgccgccgcccaatcccaacctgccctacagggaggactgctggagcgacggcgagacggcagctctcgtctccgcctggggcagccgctacgtcgagctcaaccgcggtaacctgcgccagaagcagtggcaggaggtggcggacgccgtcaactcgcgccggggagcctccgcgcggcgccgcccgccgcgcaccgacatccagtgcaagaaccgcgtcgataccctcaagaagaagtacaaggccgagctcgcccgcaacgcgccgtccgcctggtcctacttccccgagctcgaccgcctcgtcggcccaaccctcagcgcctccgcctccaagagacccttggcgtctctgcctcctcaattcgctttgcccatgcatccaccagccgtgcggaggcccccgtcgccttcgccgtcatcgtcctccccgccgcagccgcctatggctttgcctctacccaattaccgccgtgggtccccgctccctgctgctgccctcatccagaaggaagccgcggctgctgcggctgctgcgtctgattcagaggactccgatgatgcggctggcggcaataatcacaaattgccccggtcgccttcgcgctcggtgtcgtcactctctgccagtaacaagaagcgctgcagagatgaggctggcagcagtgctgacaaaggtttcagagagttagcaagggcgatcgaagcttttgcggagatgtatgagcgtgtggagagtgctaagcaaaagcatgtggtggagatggagcgccagcgaattgaattcctgaagcaactggaggtgaaacgcatggagaatttcgttgatgcccatgtgaagctggctagagcaaagcgcacgaagaagactacagggggtgctgccgacggtgctggtggtatggagttggttgccaccgttgctgcgctgcctttcgtctccacctccaccttcctctgatattgaggaagagtttagagaaagagggagcaaaaaatggtggtccaaggaagcaagctaatccgaaagatagcaagtgaagcgtttggccgggcgtttgggtggtgcgaatttctgggtgatcaaaactggaatgtggattctgcagttggagatagcctttcttttagttgatgacttgaatctgtgccttttgttttcgcctgtctgtcgtgatctggttgtaaataagaaagtcttatgccgctagtcgcaggtcgaactttatcttctatcctaggccctctacttatctaggttgatagtgtaaggtgtctagatagagatctgacctaattgctattctgtcggatcgtttgatcgcgatggatgtcgttgttctgaaactttcctatttcctaatgaaatagggggcttcgccccttcgtcgc

SEQ ID NO: 27661 - DNA, 1318 bp, Zea mays
  Clone ID: LIB4738-026-D3_FLI
aaaaaaaaaaaaaaaaatccacccttcccctttctcttcgtctccgtccgctcccggcatcgtcccctcttccccgtctcgcggtcgccgcccacgggcttcgattgatcttcttccggtgctggtggcaggtggacggatcgtgtccttgcttggccgcccacagcagcaatggacgacggggacctggacttctccaacccggacacgtacctgtgcccggcgctcggcactgacccgcccagcagctgctccatggacagctacttcgacgagatcctcaaggacacggagcaccacgcctgcacgcacacccacacctgcaacccgccggtgcacgacctatcgcacacccacacctgcgtccacgtccacaccaagatcgtcgcggcctcgcccggcgacgacactgccgactcgccgtccgagaacaacaccaacggcagcggcggcaacggcagcaacgccgcctccaagaagcgcccctcggggaaccgcgccgccgtcaggaagtaccgggagaagaagaaggcccacaccgcgtcgctggaggaggaggtggtccatctcagggcgctcaaccagcagctcgtgaagaagctccagagccacgccgcgctcgaggcggaggtggccaggctccgctgcctgctcgtcgacatcaggggcaggatcgagggggagattggcgcgtttccgtaccagaggccgccgccagcggccaagaacgtcgacctcgtgtccggtgttgaccaaggagggttccttgccggggctgctgcccaggttaccagttcctgtgatttcagatgcaacgatcaaatgtactgcagccctggaatgcagggcgctgttggcggccaggtgttgggacaaggtgcctgtgatgtctcgagtatccaatgcgttggaagcaccaggtctgcgtccactaagctacctgtctgcggggggatggatgcagcacctgctgcctgcttgccaaatgttcaaaacaagtgatggattatataactgaagaagagtataactcggctctcttgtcgccgagccattgttttgtggttccattggtttcctgctgtctggctgaatgcaattttgagtgaattgccatctaattgtcaacgatgaagatcagatttgcttctgtcccatcttgtcaatccagagctagacttgctcttgtctattttcagctggatgtcttgtgccccttttaaaggcattgctagtcttgttgacacaccagaaactaagatgctctgtatgaatcaactggctgtttattctctgagatttgagaaaaattcttatc

SEQ ID NO: 27662 - DNA, 1153 bp, Zea mays
  Clone ID: LIB4738-029-F2_FLI
ccgggacaagcaccagaccaattaactagcttcttctagctctagctaggctcgtctgctgcgagaaggtaacagcgcaggcatggaggggaaggaggaggacgtccgcctgggcgccaacaagttctcggagcgccagcccatcggcacggcggcgcagggcacggacgacaaggactacaaggagcccccgccggcgccgctcttcgagcccggggagctcaagtcctggtccttctaccgcgccggcatcgccgagttcgtcgccaccttcctcttcctctacatctccatcctcaccgtcatgggcgtctccaagtccacctccaagtgcgccaccgtcggcatccagggcatcgcctggtccttcggcggcatgatcttcgccctcgtctactgcaccgccggcatctccggcgggcacatcaacccggcggtgaccttcgggctgttcctggcgaggaagttgtccctcaccagggcggtgttttacatcatcatgcagtgcctgggcgccatctgcggcgcgggcgtcgtcaaggggttccagcaggggctgtacatgggcaacggcggcggcgccaacgtcgtcgcgcccggctacaccaagggcgacggcctcggcgccgagatcgtcggcaccttcatcctcgtctacaccgtcttctccgccaccgacgccaagaggaacgccagggactcccatgtgccgatcctcgcccctcttccaatcgggtttgccgtgttcctcgtccacctggccaccatccctatcaccggcaccggcatcaaccccgcgcggagccttggcgccgccgtaatttacaaccagcaccatgcctgggctgaccactggatcttctgggtcggccccttcatcggcgctgcgctggctgccatctaccaccaggtggtcatcagggcgatcccgttcaagagtaggtcttaaaggagccgatgctgctgcttcgagatgccggtcttaaaaggatggattcgtggctgttttcaaatgatcccctactatgttacgtgcagttccattcctctttcaaagttcggagctgcttttatccgaacccagacttgtaattcatctgtaccaaatgtgtaatatgccgcgcctctgttatgtgcaattgaaaattatgag

SEQ ID NO: 27663 - DNA, 1278 bp, Zea mays
  Clone ID: LIB4738-029-H6_FLI
ccgggcaagagtttgagacagcagaggacactcctcctcagaactctcccttccctcttgtaggggccaaaagggtcagagatctaggaagaagagaactagtccccaagcctaacaagaaagcaagctcttctgcaactgttggcattcgccttaatttgtatccatatcccaatggcaggcctatctctgcaacacccctgggcattcactttcggcctcctaggcaacgtcatctccttcatgaccttcctggccccgacaccgacgttctaccgcatctacaagagcaagtcgacggagggcttccagtcggttccgtacgtggtggccctgttcagcgccatgctgtggatcttctacgcgctgatcaagtccaacgagacgttcctcatcaccatcaacgcggccggctgcgtgatcgagaccgtctacgtggtcatgtacttcgtctacgcgaccaagaagggcaggatgttcaccgccaaaatcatgctcctcctcaacgtcggcgccttcggggccatccttctcctcacccttctcctcttcaagggtgacaagcgcgtcgtcatgcttggctggatctgcgtcggcttctccgtcagcgtcttcgtcgcgccgctcagcatcatgaggcgggtgatccagaccaagagcgtggagtacatgcccttctccctctccctctcgctcaccctcagcgccgtcgtctggttcctctacggcctcctcatcaaggacaaatacgtcgcgcttccaaacatccttggcttcaccttcggcgtggtccagatggtgctgtacgtggtgtacatgaacaagacgccgctgccggttgccgacggcaaggctgccggcaagcttccctcagctgcagatgagcacgtcgtcgtcaacgtcaccaagctcagcccgggccgactcccaccagtaacacagatggcggcggttcccaccaagagctgcgctacagaagcagccgcgccggcgacgctgcccagcagggacgtggtcgacgtcttggtcaaccgccacagccccgccgtccatgtgacctagctagatctcacgcccgtgcagcatgcgcccgccatatatacggactggtcatgagcatatgatggaattataagtaattaattgccatgtaagctagctaatgattcatggagacataggtcagaggtagagggccaagcgcgctctctctctctctctatctatctatatctatttttatatctatatagagagtctatattcatgtttaaaaat

SEQ ID NO: 27664 - DNA, 1323 bp, Zea mays
  Clone ID: LIB4738-032-B5_FLI
ccggggtaaaattatgtccaaacccaccctactcccgcgagcgcatttataaaataaagggcactgatgcctgctgtcttgttctgcccccctgttttccttttattctgctccgctctgttctcctgcgggcctggctgcgccggggaggcaaatgcttagcacaggacttggccttctggtatcccccgctaaaccataggcgtgttctattggaagttggaacaaaaccatggagagtgaaatcatggcctcctatgaaacaaagcagaattgcgaaattagggtatttgagagttcagacgagatggcaacagatctggcagagtttatttcacaagcttcagaaatttcagttaaggaaagaggatgctttgctattgccctttctggaggtcctcttgttagacatatgcggaagctctgtgaagcaccatacaacaagacccttgattggcctaaatggtacatcttctgggctgaagaacgtgcagttgcaaagaaccatgcagagagtaactacagattaacaaaggaagaatttctctccaaggtgcctatccttaacggccacgtctactccatcaacgacaacgcgacggtggaagaggcagcgagcgactacgagttcgtgatgcggcagctggtgaaggtccggacggtgggagtctcggagagcaacgactgccccagattcgacctggtccttctgaacatcgggcctgacgggcacgtagcctcgctgttccccaaccacccagcgctggagctgaaaggcgactgggtgacctacatcaccgactccccggagcctccgcccgagaggatcaccttcacccttcccgtcataaactcggcgtccagcgtcgccattgttgccaccggagaggacagggcgagagccgtgtccttctccgtctctgcctgccaggaccaggaggaggaaggcccagcagacgacgacgctggaacgacgatgataccgccggctagcatggttcagccaaccgatgggaagttggtatggttcctggacgaggcggctgcttcgtctcttgaggcttcgaatggcgcttgcgagcatcaagaagggtactgagaacaaactggatgctacctctgcgaacgccgcctactctctggtttcttcagagtcgaaagtttgcatgcagttggatgtgggcaattaagagtgaagcggtttgtgtgtttttatgtcaagacctcacgcatatcgcgcggagtagctaagctcgaccgtatattggttgcgacgtatgatccttgttttatttaagtgtgttggcggttttatcctacccg

SEQ ID NO: 27665 - DNA, 1225 bp, Zea mays
  Clone ID: LIB4738-032-G6_FLI
ccgggagcctcagcctcacacggtcgaagcagaacccgtgaacacctcaaacctcacggctcacgccaccgtcctccagccccgttctccggcgatcctgtcattccagacgcgtctccgcccctctcggtccaccaccccgacgccgccacatgtcgacgcagtccatttcgccggcctctgcgtccgcgcagttcacctacccggcggcagcggccccgtcttacttccccgtgcccttccacctccagaacgcgcaatacaccgcatggaccgcagccgcgccggcggtgcctgtgtacaacgccatctatcccatgccccaagtccagcaggcccaacagttgttccaaaaggactcgaagataattactcctgaagctctagctactgttaaggctgctattgcaaatagtgagaaagacaagaaggttgatgcaacaaaaaaggcagtgcctcgaaaggcagctgggcaaagttgggaggaccctaccttggctgattggcctgaaagtgctcaaggatgtgatgagcccaacagattgccacacgtgatttagatgatttccgtttgttctgcggtgatcttggaaatgaagtgaatgatgatgttcttgcaaaggcattctcaaaatatccatccttcaatatggccagggttatacgggacaaatggactggtaaaactaaaggatatggttttgttagttttgctgatgcgtctgatcttacttctgccttgaaagatatgaatggtaaatatgtaggaaatcggccaatcaaattacggaagagcacatggaagaacaggatagacttagaagctttggagaagggaaagacccaaccacagaagaaaatcaaactgcagaaaagaagtgttcttcacaaatgaaactgaaaaaatctgctcgttcatcgtctgtcagtatcgtttgggaaagctgtctgaagcattaacagttttacttaacgtcagatgtgtaggactgatggtcaccaagttcccggtgacactgtatacaatcgcagacgcgatgctatgttggtgattgaacaggtgtagccgaatagttggatccaataacttcacctgtagtgtaatggtccaattttatcatgggaactgtagttctaaatactccagtgaccagtgctattgtggtgaattattctgtgatctttattcagaaatattcgtgggtgttggcctgtttgaatcatt

SEQ ID NO: 27666 - DNA, 1259 bp, Zea mays
  Clone ID: LIB4738-035-B9_FLI
ccgggaggattccagggcatatataaataataaaaccctcgaggaggcgcaggcgcgcagcgcatgcacagtcatcaggtccaaaaggcttccaccacccaccagaccgacgaccactctcacaagcggcagtgcagtgcacccaaataaatcagctgggaggaggagcaccagcaccccaagagcagagctgagcagagcagcgtgcgtccaggatgtacccgtaccgcatgagcaacgtggcgatcggctacctgaacctggcgacgctgctggcctcgatcccggtcatcggcgcgggcctctggctggccaagggctcggcaacgcccacgtgctcctccatccttcaagcaccgctcctcgccgtcggcttcgccgtgctgctcgtgtccctcgcgggcttcgtcggcgcctgcttccacgtggcctgggcgctgtggctgtatctcgccgccgtgatgctcctcatcgccttcctcctcggcctcaccgtgttcgggttcgccgtcaccgcaggcggcggcggcgagcaggtgtacggtcggccgtaccgggagtaccgcgtcgccgactactccccgtggctgcagaggcacgtgcgggacgccaggtactggcgccccgcactcgcctgcgtcgtcgggtccagggcgtgccccaagatccacaactggactcccatggactacctccagcacgacctcacgccgatacagtccggctgctgcaagccgccgacggcgtgccagtacagcgggggcgtggccgtcggggcgcaggacgaggactgctaccgctggaacaacgccccgggcgtcctctgctaccagtgcgactcgtgcaaggccggcgtcatggagcaggtgcgccaggactggcacaagatcgccgtgctcaacgtcgtcgtgctcgtcgccctcgtctgcatctgctcctgcggctgctgcgccttcaggaacgcccgccgctccctctccgagtacccgtacggggtaaaccaaatgtccaagattgacccgcgctgggactactactggtggcgatggtggcgtggtagaagagaacagctctactaggctagctctagcttctcaatgcttgtatgatatcttagctcctgtcttccatcgaaaagatgaaataatacttgagagctgtgttagccccctatggtgctctacttgtttctagttgtacagcttcctccctgtctgcataattaagcttctgtacatatctgagttaagaggagactc

SEQ ID NO: 27667 - DNA, 1151 bp, Zea mays
  Clone ID: LIB4738-037-F12_FLI
ccgggacaagcaccagaccaattagctagcttcttctagctctagctaggctcgtctgctgcaagaaggtaacagtaacagcaggcatggaggggaaggaggaggacgtccgcctgggcgccaacaagttctcggagcgccagcccatcggcacggcggcgcagggcacggacgacaaggactacaaggagcccccgccggcgccgctcttcgagcccggggagctcaagtcctggtccttctaccgcgccggcatcgccgagttcgtcgccaccttcctcttcctctacatctccatcctcaccgtcatgggcgtctccaagtccacctccaagtgcgccaccgtcggcatccagggcatcgcctggtccttcggcggcatgatcttcgccctcgtctactgcaccgccggcatctccggcgggcacatcaacccggcggtgaccttcgggctgttcctggcgaggaagttgtccctcaccagggcggtgttttacatcatcatgcagtgcctgggcgccatctgcggcgcgggcgtcgtcaaggggttccagcaggggctgtacatgggcaacggcggcggcgccaacgtcgtcgcgcccggctacaccaagggcgacggcctcggcgccgagatcgtcggcaccttcatcctcgtctacaccgtcttctccgccaccgacgccaagaggaacgccagggactcccatgtgccgatcctcgcccctcttccaatcgggtttgccgtgttcctcgtccacctggccaccatccctatcaccggcaccggcatcaaccccgcgcggagccttggcgccgccgtgatttacaaccagcaccatgcctgggctgaccactggatcttctgggtcggccccttcatcggcgctgcgctggctgccatctaccaccaggtgatcatcagggcgatcccgttcaagagtaggtcttaaaaggagccgatgctgcctgctgcttcgagatgccgccggtcttaaaaggatggattcgtggctgttttcaaatgatcccctactatgttacgtggagttccattcctctttcaaagttcggaagctgcttttatccgaacccagacttgtaattcatcagtgccaattgtgtaatatgccgcgcctctgttatgtgct

SEQ ID NO: 27668 - DNA, 703 bp, Zea mays
  Clone ID: LIB4738-037-H6_FLI
gtgcccgcggtgctagtgacggttgctctagatccgttcatcctggtggttttgtgaggtcgaaagcggcgagcgaattagaagatgctggacaagctgtgggacgacgtggtggccgggcctcgcccggagacgggcctcgagaagctccgcaaggccaccaccgcccgcccgctcgtcatcaacaaagacgcggacggcggcagctacaagcgggcgcagtcgatgccgtcgaccccgacgacgccggtgacgccgtcgtcgtcgtcgtcgtcgacgacgccgcgcggcgccggcaacgtgtggcgcagcgtcttccacccggggagcaacctggccaccaagggcatgggcgccaacctcttcgaccggccgcagcccaactcccccaccgtctacgactggctctacagcgacgagaccaggagcaaccaccgctagatcgggcgagatggatggacagtgaagaggccatgtttgctggtccttgtggttatctaaaacgcacgcatgctctattatagctagtcatcactatatatatacttgtgtttgtgtattgctgttcttgttctgctggtgtctccgccgtttaatttgacctatgttatggagtgagtgatatatgtgccgtcactcctagtatatagtagtgagtgactagttggtatgtgtagtactgtactatcttttctccatatgt

SEQ ID NO: 27669 - DNA, 693 bp, Zea mays
  Clone ID: LIB4738-038-A8_FLI
ctcgaggccggccgaggagacgaaacccactcgcgttttcttctttcatcagaagacgaaatccactcaggagcgaggaaagagggagagaggagggatagatccccgggttccacgcctccacaaccatccgtcccgatcccgaccagctctgagatcgcgatggcggacggccgctgctgcaccttcctggagatcctcttcgccatcatcctcccgcccctcggcgtcttcctccgattcggctgctgcagaatagagttctgcatctgcctgctgctcacaatccttggctacgtccccggaatcatctacgcgatctatgtccttgttgctctcgactctgaccagcacgagagggaatactacacccttgcttagagcatctggttgtgccaggcgggcctgcacagttgagtcgaaatcagtattttttttctcatgtggattgtctgacatggcataagcggcaatgggtaaccaagtgttgtggtctatatctctgttacccaacttgtgagctctctttattgtgctccagttattcaatctgtaattgtgatactacaagagaataagatgcgcatgtatctctgagagcaactgtgatttatgattggtgctaccttgggctcaaaaacaggtgaacagtcgttctatgaaatgcgatgtgtacacacatgttctttgaag

SEQ ID NO: 27670 - DNA, 915 bp, Zea mays
  Clone ID: LIB4738-040-D9_FLI
ccgggatcgaccgcaccatcaaaactaactcgttgagagcggcctcctcaaagcccgcagaaaaaaattcccaagatcgtcgtcgtcccgagctcaaacaagcgcagatggagcagtccggcgccaagaagtcgaacaagatcaccgagatcgtgcggatgcagcggatgctgaagaagtggcgcaagctgtcggtcacccccaaggagccaagctcgccgaccggcggcggcggcggcaatgccgttggcgagagcaaggctaagaagttcctgaagcggacgctttctttcacggacgcaccgccctcggggtccccgcccaagggccacctcgccgtgtgcgtgggccccgcggcgcagaggttcgtgatcccgacggagtacctgaagcaccgcgccttcgcggcgctgctgcgggaggccgaggaggagttcgggttccagcaggagggcgtgctccgcatcccctgcgaggtccccgtcttcgagtccaccctcagggccgtcgagaagaacaagaaggacgccgccgcctcctgttactgcagcgccgagtacgccgccgacgaggtcgggcgcggcacgcccaacaacccgctctgcagataggtggggctcgaggacagaacaaaaatgtcttcttcctcttcctttttttgtttctttcttcttgctctatgtaacgtggtgtggtgagggattgagccgatagcatctccccccgcggattacaattactgctccgatttctctctctctctgctgaaccgagctgatcttgactgggtaatgcagccctcgtggatgcaacgaattatggaaaaattgatgtggaaacgacgggtgttacgtgttctattgaaaggcaatgaggaggatctacctctgactgaaagattcgattttgttttct

SEQ ID NO: 27671 - DNA, 1704 bp, Zea mays
  Clone ID: LIB4738-040-G11_FLI
ctgctgctcctctcctcccatctcaccacacacctacacctccatgctcgcgctcctgtccctctgcccgcccttcgtcatcctcctgtggtacacgatggtgcacgcggacggatcggtggtgcggacttacgagcacctcagggatcacggcgtgctcgaggggctaaaggccatctggcccatgcccaccctcgtcgcgtggaagatcatcttcggcttcggcctcttcgaggccgtcctacagctgctgctccctgggaagcgcttcgaagggcccatctcgcctgccgggaacgtgccggtctacaaggcaaatggcttacaagcatatgcagtgaccttgataacttaccttggtttgtggtggttcggtatatttaaccctgcaatagtgtatgatcacttgggggagatatactctgctcttgtttttggaagctttgtattctgtatttttctctacataaagggccatgtatttccatcttcatctgactctggatcctctgggaatgtgataattgacttctactggggtatggagctgtaccctcggattggcaagtactttgatatcaaagtcttcaccaactgtcgtttcggtatgatgtcctgggctgttcttgccgtaacctattgcataaagcagtatgaaatgaatggcagagttgctgattctatgcttgtgaatactgcacttatgttgatctatatcactaagttcttttggtgggaatctggatattggtgtactatggacattgctcatgatagagctggtttctatatctgctggggatgcttggtatgggttccatccatatatacttcccctggaatgtaccttgtaaaccaccctttgaatttgggcccccagctagcactctcaattcttctagctggaatgttgtgcatatacataaactatgattgtgaccgtcagcgccaagaatttcgacggacgaatgggaaatgctcggtctggggcaaggctccatctaagattgttgcctcttatcagactacaaagggagaaactaaaaccagtcttctcttgacttctggatggtggggcttgtcacgtcacttccactatgccccagagatactatctgcatttttctggactgttccagctcttttcaatcacttcctaccatacttctacgtgatctttctgactatattattgtttgaccgagcaaagagggatgatgaccggtgctcatcaaagtacgggaagtactggaagatttactgcaacaaagtaccatacagagtcattcctggcatttactgagcatctcgagttctggacgactcttgatattaagctcaacagatgccacgatatccagtcttcataccgatctgctactgattgtgtaatgtcgttggtaggcttgggctgtacgcagtattaggtgtaggcaacttggcttttggcatctaccttgtatgtgtcgtgtatctagggctggggcttgctccttcagttgttagacagtagggggtaatctcaggggtgcaatgtactccctccgtcctaaaataaaagcatatctagtatttaaattttgttccaaataaaaatgcacaatgaactataatatcgtgtaacgatgtctttgattgtgggacaaactagctggggatgatggtggatttgagggatatgaaaggatcatgatgttgaagagg

SEQ ID NO: 27672 - DNA, 1278 bp, Zea mays
  Clone ID: LIB4738-041-F1_FLI
ccgggctatccaaccttcccgatggctgcaccatccgaaagcccaagacactgagctggtctgtttagttggaaagccatctgtacgtttttcgccgatcatggaggatgagaggaacacccagcagcaccagggcggtgagcaggcccaggaccaggagaacgaggtgaaggacaggggactcctggacagcctactcggcaggaacaagcacgacgaccaggagaagaagaaccagcaggcggaggaggagctggcgaccggcatggagaaggtcacggtggccgagcccgaccacaaggaggagggacacgaggccgccgagaagaaggacagccttctcgccaagctgcaccgcaccagctccagttccagctcgtcgagcgacgacgaggaagaggaggtgatcgatgagaacggcgagattgtcaagaggaagaagaagaagggccttaaggagaaggtcaaggagaagctggcggcccacaaggcccacgatgagggcgaccaccaccagacgcccgcgccgcccgtggtggtggacacgcatgctcaccaccaggagggagagcacttcccggcgccggcgcctcccccgcacgtggagacgcaccaccccgtcgtcgtccacaagatcgaggacgacgacacgaagattcagaccccaccacaggcaccggaggaggagaagaaaggcctgctggacaagatcaaggagaagcttcccggtggccacaagaagccggaagacgctgctgccgccgccgccgcgccggccgtccacgcgccaccgccggcgccgcacgccgaggtcgacgtcagcagcccggatggcaagaagggcttgctgggcaagatcatggacaagatacccggctaccacaagagctcgggtgaagaagaccgcaaggacgccgccggcgagcacaagaccagctcctaaggtcgcagcgtgtgcgtgtccggcgatcagaagcgttgcgttggcgtgtgtgtggttctggcttgctttaattttaccaatgtttgtttcaaggtggatcgcgtggtcaaggtccgtgtgctttaaagacccaccggcagtggcagtgagtgttgctgcttgtgtaggctttggtacgtacgggctttatttgcttccaagtcagggtctggatgttgtgtactacttgggtttgtcgaattattatgagcagttgcgtattgtaattcagctgggctacctggacattgttatgtattaataaatgctttgcttaattgagagagattgaaagg

SEQ ID NO: 27673 - DNA, 1180 bp, Zea mays
  Clone ID: LIB4738-042-B11_FLI
tcgaggccggccgggacaagcaccagaccaattagctagcttcttctagctctagctaggctcgtctgctgcaagaaggtaacagtaacagcaggcatggaggggaaggaggaggacgtccgcctgggcgccaacaagttctcggagcgccagcccatcggcacggcggcgcagggcacggacgacaaggactacaaggagcccccgccggcgccgctcttcgagcccggggagctcaagtcctggtccttctaccgcgccggcatcgccgagttcgtcgccaccttcctcttcctctacatctccatcctcaccgtcatgggcgtctccaagtccacctccaagtgcgccaccgtcggcatccagggcatcgcctggtccttcggcggcatgatcttcgccctcgtctactgcaccgccggcatctccggcgggcacatcaacccggcggtgaccttcgggctgttcctggcgaggaagttgtccctcaccagggcggtgttttacatcatcatgcagtgcctgggcgccatctgcggcgcgggcgtcgtcaaggggttccagcaggggctgtacatgggcaacggcggcggcgccaacgtcgtcgcgcccggctacaccaagggcgacggcctcggcgccgagatcgtcggcaccttcatcctcgtctacaccgtcttctccgccaccgacgccaagaggaacgccagggactcccatgtgccgatcctcgcccctcttccaatcgggtttgccgtgttcctcgtccacctggccaccatccctatcaccggcaccggcatcaaccccgcgcggagccttggcgccgccgtgatttacaaccagcaccatgcctgggctgaccactggatcttctgggtcggccccttcatcggcgctgcgctggctgccatctaccaccaggtgatcatcagggcgatcccgttcaagagtaggtcttaaaaggagccgatgctgcctgctgcttcgagatgccgccggtcttaaaaggatggattcgtggctgttttcaaatgatcccctactatgttacgtggagttccattcctctttcaaagttcggaagctgcttttatccgaacccagacttgtaattcatcagtgccaattgtgtaatatgccgcgcctctgttatgtgcaattcagagttatgagacat

SEQ ID NO: 27674 - DNA, 1397 bp, Zea mays
  Clone ID: LIB4738-042-B5_FLI
ccgagcttcggcggtcataaacctttgttacaagctcgaccaccaacccagctcgctcgtcccagctgatcaggtcgagcacctagtagcgacctgctcgatcatcagtgtagagtgtcggtaggtgtctgtctctcttggtggctggttgcaacggtcatggcgacgtcgtctcgtcgggtgcccttgctgctgctgtgcctgggcgtgctggtgtcctgctccttcgcggcgggcagcttggaccaggagctggacatcacgtggggcgacgggcggggcaaggtccttgacaacgggcggctgctgacgctgtcgctggaccgcacgtccggctccgggttccagtcccggcacgagtacctgttcggcaagatcgacatgcagctgcggctggtgccgggcaactccgccggcaccgtcaccgcctactacctgtcgtcgcagggcggcgcgcacgacgagatcgacttcgagttcctgggcaacgtgtccggcgagccctacacgctgcacaccaacgtgttcacgcgggggcaggggcagcgggagcagcagttccgcctctggttcgaccccaccgccgacttccacacctactccatcctctggaaccccaagcacgtcatcttcatggtggacgacatgcccatcagggacttccgcaacctggagagcaagggggtggcgttccccaagagccagccgatgcggctctactccagcctgtggaacgcggacgactgggcgacgcagggcgggcgcgtcaagacggactggtcccacgcccccttctccgcctcctaccgcgggttcaaggccgacgcctgcgtcgccgtcgcgggcggccggacccgctgcggcgccaccgtcggcaccgagggcaccggcgcccccgcctccgccgccggcgccggggactggtacaaccaggagctggacctcaccctgcagcagcggatgcgctgggtgcagcgcaagtacatgatctacaactactgcaccgaccccaagcgctaccagcagggcctccccgccgagtgctccatgcagtagcgcccggttattcctcgcccgtccaacaatggcgcgcgcgcgcgtgtgtgtgcatgtggtccgctctactgctaccgctacgacgatcggtgtcgatcaccggatcaaggcaagacgaaaggcatcgaaacatggtagataaataaaggacttgacgatttgtaacgcagtagctggtgcgtgcgtggtgtggtggtaagaaattcttctgctgcctgtgttcttgtagcctcctcgtcctcgcccaccctgttggtacgtgtacggtgtacgtagtctgccgccgcgcgctgttcgtgttcgtcgtgtctcgtgtctgtattatactcgtcctccccatc

SEQ ID NO: 27675 - DNA, 811 bp, Zea mays
  Clone ID: LIB4738-042-D9_FLI
ccggggcgggcacccatccctcggccaggccacttaccagcagtcaccactcccaagccagtaccgagtcctacgagcagtcgcacgcaagtgtcaagagacgaaacggtcgacatggctcgcacgcaatctgccgtagcggtcgccgtggtggccgcggtgctgctgctggcagcggcggcgacgacctcggaggccgccatcacctgcgggcaggtgagctccgccatcgcgccctgcctctcctacgcccgcggcacggggtccgccccctccgcgtcctgctgtagcggcgtcaggaacctcaagagcgccgccagcaccgccgccgacaggcgcgccgcctgcaactgcctcaagaacgccgccaggggcgtcagcggcctcaacgccggcaacgccgccagcatcccctccaagtgcggcgtcagcatcccctacaccatcagcacctccaccgactgctccagggtgaactaaaacctagaccacgcgcgacgacggccgcctgatcgatcgaccaaccattccgccgtcgccgccggccggatcatcgatcgtcgtcatgatgatatctatcaatctacgcgtgatgatcgatgactacttgtctactgctatgtactactaaataaaatctctccgtgtgtacacgtacgcttgcatgtgcatggtagcatgtacgtacgacgtcgtccatgtatgtgtgtgtgacgtgtgagacggacagagagagagagacaggatcgatcgagagacggtcatgtccttttggctgtttggtttattcatatcacaacttttgagtatg

SEQ ID NO: 27676 - DNA, 1540 bp, Zea mays
  Clone ID: LIB4738-048-E3_FLI
ccgggaaaatcccttccccgcggaagcggcagcccgtcaggttatatagctcactcttgatcgcttcctggtttgctaagcgatttgcctctcgtggttcggtgacggatcggaggcgctgcgagttcgaagctggtttctctgggctaagtcggttcggacttacttgttcagtaggtgtagtgtagctcgatagacgagaagaatatctggcgtggaagtttcagcaaagctcctggattaaattggcatcatagagggcgcaggatccaaatctgccggaaacctgtatcttcatccagtatcaaggggaagttctgttgttgtgagttcggtgatggatacatccaaaagcaagcaaggaccagaacatctccttgttcttgtccatggtatcatggcaagccccaaagactggacatatggggaagcagtgctgaagaggcggttgggtgatgattttttcatatatgctagttcaacgaacagctacaccaaaacctttgatgggattgatgttgctggaagaaggttagcaaatgaagtcttggatgtggttaacaagatgcccagcttgagaaatatttccttcctagcgcattctctgggtggtttgtttgctagatatgctattgcaatactccacccagtctcagtggaaacaaagaatgctggacaaagtagtgcacttactgttcctacaacaagagggccagcaaaatcaagatgtgcttcaggattaggttctattgctggattgcagccaattaattttattaccttagcaaccccacaccttggggttagagggagaaatcagcttccgtttcttcaaggcctatcaatcctagaaaagcttgctgcgcctttggctcctttaattgttgggcgcaccggtgctcaactcttcctcactgatggtgatcctagcaagccacctctcctgttacagatggcatccgactgtgatgacaaaaactacatatcagccttggcagcttttaagaaccgtgtcctgtatgccaacgtctcgtacgaccacatggtcggctggcgaacgtcttcactaaggagagagaagaatcttataaagccctcacatcgttcactggatggctataagcacattgtgaatgtggaatactgttcgcccgtgtcatcggagggcccacatttcccttccaaggctgccagagctaaagaagctgcacagcgaacgccaaaccgagaaaataccgaggagtaccaccaaatgatggaggaggagatgctccatggcttgcagaaggttggctggaagaaggtggacgtcaacttccattcgtcattctggccttactctgctcacaacaacatacacgtcaagaacgagtggcttcacaatgctggcgctggtgttatcgcgcacgttgcggacagcatcaagcagcaggagtcacggccatgtcttcctgccaatctatagcagtagcattcagcaatccatttgttcaaattatctgtcgctagcaaataaacccatgaccaaactctgttcgtt

SEQ ID NO: 27677 - DNA, 1329 bp, Zea mays
  Clone ID: LIB4738-049-C5_FLI
ccgggaacctcagactcctcccggaccagctgacctccgctccattcaccccacaccttcttcttcgtcgtcgtcttcccctgctgcggttagcctggccgtggccgcctcctgctcttcgatctcacgctgcgatggagcggtacgaggtgatcagggacatcggctcgggcaacttcggggtgacaaagctcgtccgggacgtcaggaccaaggagctcttcgccgtcaagttcatcgagagaggacaaaagattgatgagcatgttcagagggagattatgaaccaccggtccctgaagcacccaaacataattagattcaaggaggtcgtgctaactcccacgcatttggcaatagttatggaatatgctgctgggggtgagctatttgaaaggatctgcagtgcggggagatttagtgaggatgaggcaaggttcttcttccagcaactgatttcgggagtgagctattgccattccatgcaagtatgccatagagatctgaaactagaaaacactctcctagatggtagtgtcgcaccccggctcaagatctgtgatttcggttactccaagtcttctgtgctgcactctcaaccgaaatcaactgttggcacacctgcatacattgctccagaggtcctctctagaaaagagtacgatggaaaggttgctgatgtctggtcttgtggagtaacactatatgtgatgctcgtcggcgcgtatcctttcgaagaccctgatgacccgaagaacttccgcaagacgatcacgagaatactcagtgtacagtactcaattccagactacgttcgcgttacaatggagtgcggacatctgctgtctcggatatttgttggaaatcctgagcagagaataaccattcctgagatcaagaagcacccgtggttcctcaagaacctgcccatcgagatgaccgacgagtaccagcagagcatgcagttggcagacatgaacaccccggggcaaagcttggaggaggtgatggcgatcatccaggaggctcggaagccaggggacgccatgaaccttgccgggcagctgccctgcctggggagcgtggaccttgacgacattgattttgacgatattgacgacatcgacactgagaacagcggcgacttcgtttgtgcagtgtgactgtgtgaggctcagcagggcaggagctagcttcctttggtcgttggtgtctgtagatccttgttgtgctatgcttccattcgttcctggatcagatatgttgttgtgtaaccgagaaaattggcgttgctgtggacaatagaaacagacccataaacttatgcgg

SEQ ID NO: 27678 - DNA, 729 bp, Zea mays
  Clone ID: LIB4738-049-H3_FLI
ccgggcttcgctgcgccgccgcctccgacatcgtctcttcgtccccacgagcaaccgataatccgccggcgctgagatgttggtttatcaagacctcctatctggcgacgagctcctgtcggattcattcacctacaaggagctcgagaacggcgtcctgtgggaggtcgagggaaagtgggtcacccaaggtcctgttgatgtagacattggtgccaatccatccgccgagggtggtgaggatgaaagcgttgatgacacagccgtgaaggtggttgatattgttgacacattccgtctacaggagcaacctccttttgacaagaaatcatttgtctcttacataaaaaaatacatcaagaatctcactgctgtgttggagccagagaaagcggatgagttcaaaaagggtgtcgagggtgcaaccaagtttctccttagcaagctgaaggaccttcaattttttgttggtgagagcatgaaggacgaagtgtccgtggtattcgcctattacaaggatggtgccactaatccgacattcctctatttctctcatggtcttaaggagatcaagtgctagattagttacccatgttgggtactatatatgttctattgttatagccacaactatagctgccctgcctgaactgaactcaggttttttttaagaaaaaactgtccaagattggattgcttgttaaagctaaatattgttattgacgtgcc

SEQ ID NO: 27679 - DNA, 1801 bp, Zea mays
  Clone ID: LIB4738-051-E9_FLI
ccgggctcttcgcttctaactccgctgggccaccagctttgaccgccgcctcccttcccctccgctactgctcctccccaccccactcccccgcaggagcggcggcggcggcggcgaggtcgtaccccacatcggcgagcggcggcggcaccgccggaggcaaaggcaagatgttcgggcgcgcgccgaagaagagcgacaacaccaagtactacgagatcctcggggtgcccaagtcggcgtcccaggacgatctcaagaaggcctaccgcaaggctgctatcaagaaccaccccgacaagggcggtgaccccgagaagttcaaggagctcgcacaagcctatgaggttttgagtgatccagagaaacgtgagatttatgatcagtatggtgaagatgcccttaaggaaggaatgggcggtggaggatcccatgttgatccatttgacatcttctcatcattttttggaccctcttttggaggaggtggtggaagcagcaggggaagaaggcaaaggaggggagaagatgtagttcacccacttaaagtttctctggaagatctttacaatggcacctcaaagaagctctctctttcgcgcaatgtcatctgctccaagtgcaagggcaagggctcgaagtctggtgcctcaatgaggtgccctggttgccagggctcaggcatgaaagtcactattcgtcagctgggcccttccatgatacagcagatgcagcagccttgcaatgagtgcaaggggactggagagagcatcaatgagaaggaccgctgtccagggtgcaagggtgagaaggtcattcaagagaagaaggttcttgaggttcatgttgagaaggggatgcaacacaaccagaagatcaccttccctggtgaagctgatgaagcgcctgatactgtcactggagacattgtattcgtcctccagcagaaggatcactccaaattcaaaagaaagggtgaagatctcttctatgagcacaccttgtctctgaccgaagcactatgtgggttccaatttgttcttacacatctggacaacaggcagcttctcatcaaatcagaccctggtgaagttgttaaacctgaccaattcaaggcgattaatgatgaggggatgccaatttaccagaggcctttcatgaaggggaagctgtacatccatttcacggtggagttccctgactcgctggcaccagagcagtgcaaagctctcgagacagtacttccaccaaggccttcatccaagctgacagacatggagatagatgaatgcgaggagacgactatgcatgatgtgaacaacatcgaggaagagatgcgcaggaagcaagctcacgctgcccaggaggcgtacgaggaggacgacgagatgccgggcggagcccagagagtgcagtgcgcgcaacagtaagcagactatcatcaaggcaattgggaggggtggtgcccttaaagcatgggagtgatctctggttttgctgtcgccgagctgggaaataggaagctgaatcgacctcgcaagcggggaatgtatccttttttgctgcaacataaaaaatgctacccaggcatagctgggtaccttttaacttctgtttgtgggatttgctagagtgatggtttcgatatatagggggacttgaatgtctggaatgctacggtataacgcacatttgggtgcaatgtctgttgcattgctgtctgaatgacatcgttggtacatttattttcatgtaacgcctgtagtttgctaatcaacaagcttggaatggcctgattgac

SEQ ID NO: 27680 - DNA, 1920 bp, Zea mays
  Clone ID: LIB4738-052-C10_FLI
ccgggatttgggccgctgtttttccccccgagtgagcaacagtggggtctcaacatgggccgcctatgtagctcaacactgaaatgcggcagacgcgtgggtggtcggagctggggcctcagcttgatcccaggctgccgttcgcggaatctctcttcccactagcgacgactgggcgacctccgccgccacactaaaccctactccaggtgcccaggtctgcgtcgggcccttgccggcgacgagcacccgctagttaccactgtgcggtttccaagatggctcgccgtggattgatggaacaggacttaagcaaattggatgtgacaaagcttgacccactgtcacctgaagttatctcacgccaagcaacaatcaatattggtaccattggccatgtggctcatggaaagtctactgttgtgaaggctatatccggagttcagactgttcggttcaagaatgagctggaacgtaacattactataaagctgggctatgctaatgcaaaaatctacaaatgtgaggatgacagatgtccacgaccaatgtgctacaaggcctatggaagcggaaaagaagatagccctctatgtgatgtgcctggatttgaaaacactagaatgaagctcctgagacatgtttcttttgttgattgcccgggacacgacattctcatggctacaatgcttaatggagctgctatcatggatggagctcttcttttgatcgcagcaaatgaaagttgtccacagcctcagacatctgagcatcttgctgctgttgaaatcatgcgccttcaacatatcatcattctgcagaacaagattgatcttatccaggaaagtgcagcaatgaatcaacatgaagcaatccaaaaattcatccagggaacaatagctgaaggtgcacctgtggtgcctatatctgcccagctgaaatacaacattgatgttatttgcgaatacattgtgaagaaaatccccatccccgaaaggaactttacctcgcctcccaacatgattgttattcgttcctttgatgttaacaagcctggttcagaggttgacgaaattagaggtggtgtagctggtggcagtatcctcaggggagttcttagggtgaaccagaagattgaagttcgccctggcattgttatgaaagatgagaatggaaacattaagtgcacgccaatctactcaaggattgtctcactctatgctgagcagaatgagctccaatttgctgtcccaggagggcttattggtgtgggaacaaccatggacccaactctaacgcgtgctgataggctggttggccaggttcttggtgaagttggttcactacctgatgtttatgtagagcttgagatcaatttcttcctactccggaggctgttgggtgtgaggacgaaaggtacagagaaggcagggaaggtgtcgaagctcaccaagggcgagatcctcatgcttaacataggatccatgtccacaggcgcccgtgtactcgccgttaagaacgatcttgccaagctacagctcaccgcgcctgtctgcacgagccgaggagagaaggttgctctgagccgtcgtgttgagaagcattggcgtctcatcggatggggccagatccaggccggtacaacacttgaagtaccaccctgcccgctctaaagcgtcatacacagacgtgagcttaatttgtgtgtgccaaagaaaaaaaatgagtttgttgttagtattgtctttgtgttactgcatatccaaagccttaggccattctagtttaattttgtttcgttcaattttggaggccacttccattatgattcctgtgaacattagcaggtcagaaaccagtactgtgaacattatgagtacgacgtgtggatcagtattgccaatgtcttgctttcacacc

SEQ ID NO: 27681 - DNA, 1017 bp, Zea mays
  Clone ID: LIB4738-053-D7_FLI
ccggctcgacaccgcaccgtgaccctcggctacggaggaagaagacggagtggtggactgggccatagaaccatgtcaagttccataaattcaacagtggccacagaattgttggtggctgagaagagcaggggtattgagccactaccttttattaatgacaaacatggaggtgtcatcattgagatgacgactccgatggatcctggagcgttttcagcttccttgaaagcagctctggtgaaatggagggagcagggaataagaggtgtctggatcaaactgcccatcaccctttccaaccttattccaccagttgtagaggaaggtttctggtaccatcatgcagaggaaacttacttgatgcttgcgtactggcttccaaatacaacacatacgctaccagtaaacgcaacccaccgtgttagtgttggagcttttataatgaatgacaaaagagaggtcttggctgtacaagaaaagagtggtgtacttcgaggactaggtgtgtggaaatttccaactggcgtagtagaaccgggggaagatattaacgttggagccgtccgagaagtaaaagaagagacagggattgatgcagaattcgttgaagtgctggccttcaggcagagccacaaatccttttttgataaatcagatctatttttcgtgtgcctgctacgacccctttcatacgacattacgaagcaagactcggaaatagaggcatgccagtggatgccagtagaggaatttgcagcacaaccatttgtccagaaacatgagcttgtgaagtacatcctcgaagtcggcctggctaaagttgacaaggaatacgcaggcttttcgccaatctccataaaatcggcatttacagacaaattgtccttattttacatgaaccggagggatctggatagggcctcagggtagagtatatatgtaatgacatgggcaattcaggatagttaaattttcactttggtgtgtgaaagcgggctaaatcttgttagaccc

SEQ ID NO: 27682 - DNA, 1284 bp, Zea mays
  Clone ID: LIB4738-053-E7_FLI
ccgggaaggcagatcaccaaccaacatggtaccagagcacaggtgttaatcgatccatgagcgacttctcatccaccccctcccctctctccaccattacgacagcttctctgctcaacatgtcttccactgcagtccccatccatcatgccgtgaccatccggctcacaaaggccaactaccttctatggcgtgctcagctgttgccgcatctccgcggcaacggtctgatggggtacctcgacggcaccaacgctgccccagatcagcaacttcctgcgtcatcggctgccggcgccacgctcatcgtcaaccccaactacacggcatggtataacaaggaccagcagatcctcagcggtctcctctcctccatgtctgaggagatccttcgcgacgtcatcgacgccaagacatccaaggacgtgtgggattctctccagaagaagttctcctcgtcaactcgagcgcgcactgttcaactgcgcgtcgagctcgccaccgcacagaagaaagatctatcggcggccgactattttggtaagatcaaaaatcttgctaccgagatggctgcggccgatgcagccctacgtgatgatgagatccttgcatatctgctcgctggtctaccttccgagtatgactcgtacgtcacctcgatgacgaccaaggaccccatcacgctacggtctcacgatcaagcacagaagctgaatacaaggctattgctgatgctaccgctgaagttatctggattcaggttttgcttcgtgaactagggatttctttgccacggccccccagtctgtggtgtgacaatattggtgctacgtacctcactgctaatccaatttttcatcggcgcatgaagcatgtggaggttgattatcatttcgtccgtgaacgtgttgccatgaaccagcttgatgtacgtcacatatcttctaaagaccagctagcagacatcatgacgaaggctcttccagctccggcattcactcatctgcggcacaatctgaacttacttgatagatgtccagattgagggggggtattagcaatatcatatactttcctacctagttagggaatatccctagattacagggagctgcgtctccctccttgatttgctgtgtctgtttgattctttcctatgtattgttcctttctatctttgtatatctctgattgatatatatacatgacgcctgccaccgtttgtggtcaaggcagatcaccaaccaacacaccgtaccgtcggttgtcggttttatcgatcag

SEQ ID NO: 27683 - DNA, 1061 bp, Zea mays
  Clone ID: LIB4738-054-E5_FLI
ccgggaacgacctcttcggctcgccaacattaggtccagtccacccctccagccaacccaagtctccatccacaagagctcgagaacctggccacgagcccatgacggcaagaagcggtcatggccggtgatgaggaggaccacctagcagacgcgccgcgggtggtgggcgtcctctccgcgctcctggaacgtgtcgtggagcgcaacgacgcggtggccgatgagctcgccgccgggaccgagtccgcggcgccgccgtcggcgttccgggcgacggcgaggcccgacatctcggtgcgctcgtacatggcgcgcatcgcgcggttcgcagggtgcagcccggcttgctacgtcgtggcgtacgtctacctcgaccgcctcctgcgccgcgcccgcagcgcgcccgccgtggactcgtacaccgtgcaccgcctcctcatcaccgccgtgctcgcggccgtcaagttcatggatgacgtatgctacaacaacgcctacttcgccagggtcggcggcatcagcctgtcggagatgaactacctggaggtggacttcctcttcgccgtcgggttcgacctcaacgtgtcgccggggacgttcggccactactgcacggtcctccgggccgagatgctgtacctggagctggagggtcctcctcctccagccgccagtacaagtctgcacaggtgctgcttgtcagaagacgacgacggtagcagcagcaccagcagcagctagctgcatagagacaggtacagcggttgcttccaagcaagcaaccatgtatgaatgtgtccgtgtacactgtacagtacagacatgcttgcttgaaagcaaacacggagtacgtgacgtaggcatctgcgtgtgatcggtttgctatctggcggctggcgcttagttgtttttagctttgttattaggtaatctgttgctcttgtagtcttgtatagctgcattgctgttgttcatgtggaaatcggaaaaccgtaaggaacggtataaattgcagtcttggggcagtgtaattgttttcttgtccagcagtttatccg

SEQ ID NO: 27684 - DNA, 856 bp, Zea mays
  Clone ID: LIB4738-054-H9_FLI
ccgggacctccatcacgcactcctgccagagaccagactattcgtatcgtgcgtaggtgttgcttgctgttgcagcgtacgaacggaccatcaactagctaggtgcttgcattgctgtcgcactcgctcagctatctccaccgctatcggttgttgtttagttgcccacgcgccctgctctctggcctctgataccagttgatagcagcagcagcagctagctataggttagcagcagcggagcggagttaacagctgcaggaggatggtgaagagcacgacgacgatgggggcggcgagctgcggcggcggcgtgctgccgctggcgtcgctgaaccacatcagcatcgtgtgccggtcggtggaggcgtcgctgcgcttctacacggacgtgctcggcttcgtccccatccgccgccccggctctttcgacttcggcggcgcctggctgttcaactacgggatcggcatccacctgctgcagtcggaggaccccggcagcctcccgccggagaagggagagatcaaccccaaggacaaccatatctccttccagtgcgagagcatggtagcggtggagcggcggctgaaggagatcggcatcccgtacgtgcagcgctgcgtggaggagggcggcatcaacgtggaccagatcttcttccacgaccccgacggcttcatgatcgagatctgcaactgcgacaacctccccgtcgtcccgctcgccggcgaccagcagcgcgcgccggccgcctgcaggcgggctccggcggcggtcagtaccgtcaagcagcagcagcagggcagcgtggtgcctgcttcttccgctccggtcacgacggcggcggcggccctc

SEQ ID NO: 27685 - DNA, 806 bp, Zea mays
  Clone ID: LIB4738-055-F2_FLI
tcgaggccggccgggatttttgccggccggctagcatactagcggggggcagcggcagcacagagcacacgtacaccactgtccacttcaacttgccttctcctgccactactatatcttcgtagtcaaagaggtgtcgtccatggggacggcttcaacaagcccagacaccatggaggcggcaaggctccccggtctctccatcaccgtcgagaagaacccgccggaggcgcgcttgcttcaactcggcgtcaagtcctggcccaaatggggatgtccgccggggaggttcccgctcaagttcgacgcggcgctgacgtgctacctagtgaagggcagggtgagggccgccgtgaagggctcccgcgagtgcgtggagttcggcgccggcgacctcgtcgtcttccccaagggcctcagctgcacctgggacgtcgtcgtcggcgtcgacaagcactacaacttcgacccctcctaaaaccatatattagctagcccgtactcctcgggtggaccacacgagcgcaccttctttcttgtgttctgatttgtctcttcttctttttgtctgaaagcctcgaccgaattcctgtgcgacgaccatggtttattagctagcgaggatttgtatggtaggcattagttttccctttcaggactcgatcgtaagctgtgtttgtgagttaactgaagtgatggtagctagtaaattaatatactatacgacaaatgtaatgtaatatattaacagtacatggtgatgttatttcatgaaaaaaagaagaggtagatggttcgtgttcttg

SEQ ID NO: 27686 - DNA, 1263 bp, Zea mays
  Clone ID: LIB4738-055-F8_FLI
ccgggagccatagccactctcctctcctggagctatagctagagagcaagagagaggggggtagatctatatctgtaccgggcgggcggcgcgatgatgccctacggcacggcggcggaggcagaggcggcgctggggcgctccatgacctgggcagaggccctgtggttccggtactcagcggggatgccggacctgtgtctgacgtggcacgtctccctcgtctacctcgtcttgtacgcgttggttccgctgccggtcatggttatccagaagctcgcgccggggtacgccctgcggcacaagctgcagcccggggtgccggagccctcgccggtttccacctacgtcgaatacataagggacagcaggggcgtcaccctggccgccttgggcccgttcccgctcatctactccatcgcattcaagctgttcggggtccggacgggactccctttgccgtcggtctgggagactgcgacgcacctggcggtgtattcgctggtggaggactacacgtcgtactggctccaccgcttcctgcacaccaggtgggggtacgagaagatccaccgcgtccaccacgagaagacggcgccgtccgggttcgccgccgcctacgccacgggcactgagctcagcttgtacctcaccacgctcttccttgggccggcgatcgtgcccagccacgtcaccacgcactggctcttgttctccatccgcataatggaggccttcgacacacacagcgggtaccacttcccgttcagcctcgcgaggttcatcccgttctacggtggcgcggaattccacgactaccatcactacgccggagagaagaccaggagcaatttcagttccgtgttcacgtactgtgattatatatatgggacaaacaaaggctacatgtaccacaagagaagcctagccgagctgaagacgaaggaggccgaacacagcgggaaagaagactgagattacgtactctcaacattttatgcacgaataagttggatactgcataaagcgtcgtccatcatatacagtagttgctcgctccgttctgttccgttgcctagagattgagatgtccagcaaatatataatagtccatatgtgtactacaccacagggtttgtcgtcccccatgtgtaccctcagtccacatcgatttgattagtggagacaggagtggatttgaacaggtcgtcctcatgtgaacgtacacctgtaatctatatatatgtccactagctacctaag

SEQ ID NO: 27687 - DNA, 691 bp, Zea mays
  Clone ID: LIB4738-056-F3_FLI
taccgcgaggccggccgggggctgccagccatggctgagaatctggcgcccgagaagcgccactccttcgtgcacaacgggcagaaggtgttcgagtgggaccagacgctggaggaggtcaacatgtacatcgagctcccgaagggtgtgccaaccaagctatttcactgcagcatccaggctagccacgtcgaggtcggcatccgcggcaacccgccatacctcaaccatgacctgacacacccagtgaagactgactcgtcgttctggacaatagaagacggtgagatgcatataacactgcaaaaaaagagagaaggggaaaacatggtcatctccaatacaagggcaagggattttggatccatatgctgcagatcaagagcaaaagcggcttatgctccaaaggtttcaggaagagaaccctgggttcgacttttcacaggctcagttcagtggaacctgccctgacccaagaaccttcatgggagggatacgctccgagtgaagcaccctacctgcctatgtacgtttctactatatcctcggcatcttgatagatgcagcaggcgtgcttattatgtctgtaaatcggttggtgtctgttatggaaataattgcgatgtgtgaccatttgtgtgcaagcacattttgcgtgcttaattctagtttatagttgtgatcttcattc

SEQ ID NO: 27688 - DNA, 1150 bp, Zea mays
  Clone ID: LIB4738-056-H3_FLI
ctcgaggccggccggggctctagtttgcacatgtacgttcccatccaaaaaccctcggcaacggtgatgcgacgcccgtcccgttccaagtcctgacaaccgagcgtacgctgagctgcaagtaaacggcgctggctaccggaagagccgagccggaccaagtctcctcgtccctcacctcgtcgccgatggagggcggcgactcgtccggcgccggcgccggcggcgccgtggccgcggcggccaagtggcggagcgacgcgtcgcgggcgttccagtactacctggaccgctcgacgcctcacgccacggggcggtggctcggcacgctcgccgccgcggccatctacgcgctgcgggtttacatggtgcagggcttctacatcgtcacctacgggctcgggatctaccttctcaacctcctcatcggtttcctctcccccacggtcgaccccgagctcgacccttccgccgcctccgaggggccggcgctgcccacccgggggtccgacgagttcaagccattcatcaggcgcctccccgagttcaagttctggtatgccatcacaaaagcttttgttatagcttttgtgatgactttcttctcagtgtttgacgttcctgtcttctggcctatactcctctgctactggattgttctctttgtccttacaatgaagcgccagattgtacatatgatcaaatacaaatatgtgcctttcagtatcgggaagcagaaatatggtgggaagaagagtgccgtgagcccgagttcctcaaaagactgattccgaacctgccccagtagaaacttgccaggggaacaagatacgttggatgatgatatttgatgtgctcaataccaagtgtaatacttcattcatatctaggaggtagacggattttcgctcctgtttctgactctgggctcactgtttaattccatgttgtgcttaggtcgcttcctcctatgcttgtatagcgagtttcgcgtctcagataaattatttcgttttagttactacatatctgggccctaaaacaataagctctatgctctcagcaagtttggttgggtgttgagctgggtgaggtaggcggttggttatttttgtatcgaactggaacaggatgctaaactttaaacgct

SEQ ID NO: 27689 - DNA, 1550 bp, Zea mays
  Clone ID: LIB4738-057-D9_FLI
ccggccgggagcgcccgcccagaatgcaccgcagaattccccactccaagcgggctcctccgctcggcttccgttgccaggctgccacgccgtcgccgtctcgccgcctaaaacctccctcgctcccccctcgcaccactccgctcacctctcttcacgccgccgtagccggcgggtagcagcgggtacgtgcctttgcggtgtaccttattggctgagccttccctttgccgaggaagagcacagaagcagggaggtcggcatggcggaggtgcatctaggtctgccaggtccctgggcggcggattacagggagatggccgaccactacaccactaagatcggtggagtccctgattggccaactggtgatatgggcttcgagcccgagactcttcagtgcagcttatgtgggaccaagctttgtcttgttgctcaggtacatgcgcctgtggcaaagctaaacatcgaggagaggataatctatgtgcttgtttgcccgacaccagaatgtggacctaaacctcaaagttggaaggttctaagagttcaaaaatgccataatgttatgcaaacagaaggtggtggtgatgaattaggtcaatcgaatggaccttcttctacaagtcttccagaagaacagagtgataaaaataaaattcctgagacaaatgatgacgattttgatctagatgccttagccgaagcacttgaacaagctgcaactatggcatctaacccaaagaagaagaacaaatcgaagcatgctaatgctcctgtaaaacgtcctgtattgaaggagcaagcatgtgatctgagcatacctgttcttccttgtttttacatacattataataaggaactatatgggggcaaaggcgatgtgggttcaagtagcagtgagttggttttggacaaagaaatcatggatgccgcaaatgacgaagaagaaaaatgggaaggagaaaagtatgagtacgatagagctattggtgctgacagaacatttttaaaattcaagaaacggctggatgcatatccccagcaatgctttaggtattcttatggtggcaagccactgttggctacaacaaaattacaagatcctggcacctgtaggctgtgtggttcaccacgccggtatgaactgcaattgatgtctcctttatcatactttctccatgaagctggagacggttcctcaaattatgcacccagcagctggacttggctgactgttataatatacacctgccccaagagctgctgcccgtcctcatgcggtggaaagccccagagctgttgttggggagcagcggaggaggagatcctgattcaggaggatgaagtcctttaggatctaaccagtgccggttgagaaactattcccgatttgaacatgtgatatgcagtttttttttgttctccaatggttagagttgtaaagctatctgaaattttgaagtgtgttttgttattgtgccctggtatactgcagaactgtcatacttcacacagtatcatatcagactagtaagatttttttgtcg

SEQ ID NO: 27690 - DNA, 795 bp, Zea mays
  Clone ID: LIB4738-057-H12_FLI
ctcgaggccggccgggatataggggccatcagatccaagaagagggaagagcaccaaggaccttcggcgcccgttcaggatccacatcttcccgagcgagttcttggttgacctcttcccccttcggaccacctccaaggctcttggtgtagcttgccactctcaccaatcaagttttcatgtctgatctcgacattcagatcccaactgccttcgatcccttcgctgaggccaatgctggggactctggtgcggcagcagggtcaaaggactacgttcacgtgcgcatccagcagcgtaatggtcgcaagagcctgactaccgtccagggattgaagaaggagttcagctacagcaagatcctcaaagatctcaagaaagagttctgctgcaatggtacagtggtccaggacccagaacttggacaggtcattcagctccagggtgatcagaggaagaacgtctcgaatttcctcgtccaggccggcattgtggagaaggagcacatcaagattcatggtttctgagcaaccgccgggtccatagcaaaccaaccctgcatgcagggccagcttattatatataatatctgaggtggagcatatctatctggctgtgtactacaagcaggcctagtacgccgcctgcgcgttcctcctattacacataacacatatagccccctccctgcgtgtatgcttgttgccgtcgtgtcgaatcttgtactacgaggctccatcgaacatcgatggcttgcttctttatcagaacatgtttgaataaacgctatttggc

SEQ ID NO: 27691 - DNA, 2147 bp, Zea mays
  Clone ID: LIB4738-058-D11_FLI
ccgggaactagctagcgtagccatgatgaactatgtcatcttcggcgtcctgctcttggtggtcggcggcggtctcaggccatctccggcagccgccgacgtattctgcgacaaccttaaacaggtggccgccactctgccccaaaacacctcctcctcccccgtgcagttcgccaccgccatcgtcggccaggcccccgacgtcgtctacgctctagccttctgccaaggcgactacagcgccactgcctgccgcgaatgcgtcgcccaggcgttcaatgtaaccccggcgtgcaacaaggacggcatcttctcctacaaagcgtgcccggtcttgtacgccggcgacaacttcatcgacccctccaacgccacggagcaagctgacgacactcctttcgtgaggtggaacatcaacaacgtcaccggagacgcggacgatgtccgcctcatcaccggcctcatacgcgagctgctggtggataccgtggacagggcggccagcacggcgccgaggcggttcgccacgggcgtcatggacagtggcaggcccttcccgacgatgtactccatggcgcagtgcacgccggacctgtccgccagcgactgcctggcgtgtctccggcgccttgttggcatggtcaactccaccatggccctgcggatgggagcgcagatccacgtgatacggtgttatttcaggtacgaggcctactcgttgtacgacagccagcccatgcttcgtgtcgggccgccatcggtgccggcgccagctccagctccagctataggggccaggcgcaagagcaaactttgggtgattccagtcgttgtagttcctctagcagtagcagcagcagcagcactctgcttcattttctactcgccttggttcagaaggtacaggaaaggcgaaacgacgatggcaaaagcaggatctcaagaactgcagggagaacttgttttggatggaaagaattcagagttccgggtgtttgattttgaacaagtactggaggccacaaatgacttctcagatgaaaacaagcttggagaaggaggctttggcgctgtctacaagggccagtttgctgacggattggaggtagcagtcaagagactcgcttcacattcagggcaaggtttcacagagttcaaaaacgaagtccagctcatagccaaactccagcatagcaatttggttaggctcttgggatgttgctcgcaagaagagaaaaaaatactggtctatgaatacctgccgaacaaaagcttggattccttcatctttgatgaaaataaaagggcattactggattggtccagacttctatcaataattgagggaatagcacatgggcttaactacctacataagcactccaggctgcgcgtcatacatcgggatcttaaaccaagcaacattctcctggacagagaaatgaacccaaaaatctcggacttcgggctagcgaaaatattcagctcaaataacattggaggaaacactacaagaagagtggttggaacatatggctacatggcacctgagtacgcttcggagggcatcttctctgtcaagtccgacgtgttcagcttcggcgtcctcgttctcgagatcattaccggaaagcggaattccggcagccatcagtgcggcgatttcatcaatctcattggatatgcatggcaattatgggacgatggaaggtggatcgatctagttgatgcatatttggttcccatgaatcactcggcagaaatgaccaagtgcattaagattgcattgttatgtgttcaagagaacgcgagtgatcgaccgaccatggcagaggttgttgcgatgttaagcctaagcaatgacacggctatgatcgtggctgagcctaagcagccagcatatttcaatgtgagggtgggaaatgaagaggcgtatacgactactgagtcatgcagtattaacgatgtgaccatatcggtcacaacaccaagatagtcttctttttctctccttctagtggcagcatagcacacatgagttctagtgttcttatatcgttctagtcactggttcgtcattgtagtacctatatattgttggcacttgtagtaaaagtttgtaggtggtgtgtatgtgtgtttttaat

SEQ ID NO: 27692 - DNA, 804 bp, Zea mays
  Clone ID: LIB4738-059-E2_FLI
ccgggattgaactcacgaagcaagcaagactactgctatagaaagcagtagcaaggtctagtcggctgtgtctaggcgcctagctatatgcctatatagtaaacggtatccagcatggacgagtacatctaccagtcgctcttcctctccgtccttgctgtggcactgctgcagctggtgaagatggccctcaagccgaggccacggctgccgccagggccttggaagctgcccgtcatcggcagcatgcaccacctcgtgaacgtgctgccgcaccgggcgctgcgggacctggcggacgtccacggcccgctcatgatgctgcagctcggccagacgccgctcgtcgtcgcctcttccaaggagacggcgcgcgccgtgctcaggacgcacgacaccaacttcgccacacgccccaagctcctcgccggcgagatcgtcggctatgagtgggtcgacatcctcttcgccccctccggcgactactggcgcaagctccgccagctctgcgccgccgagatcctgagccccaagcgcgtgctctcgtttcgtcacatccgggaggaggaggtgagcacaggaacagctagcgcgcacggtgcgtgcagaaacaattaatatgacgcacagacatgcttatgcatcgcagcaaaacatggcaacaaactgacaaaaacaattccggccgtggacaaactgttgtcacacgagacgctatgagatgagatcatgagagtacactctgaagtctgaacaaaaacaacgcatgcaaaaatctaaaaataaagcagggagagactggtc

SEQ ID NO: 27693 - DNA, 782 bp, Zea mays
  Clone ID: LIB4738-059-H12_FLI
ccggggtgcccgcggtgctagtaacggttgctctagatccgttcatcctggtggttttgtgaggtcgaaagcggcgagcgaattagaagatgctggacaagctgtgggacgacgtggtggccgggcctcgcccggagacgggcctggagaagctccgcaaggccaccaccgcccgcccgctcgtcatcaacaaagacgcggacggcggcagctacaagcgggcgcagtcgacgccgtcgaccccgacgacgccggtgacgccgtcgtcgtcgacgacgccgcgcggcgccggcaacgtgtggcgcagcgtcttccacccggggagcaacctggccaccaagggcatgggcgccaacctcttcgaccggccgcagcccaactcccccaccgtctacgactggctctacagcgacgagaccaggagcaaccaccgctagatcgggcgagatggacagtgaagaggcccggtgtctctgtcaggccatgtttgctggtccttgtggttatctaaaacgcatgcatgctctattatagctagtcatcactatatatatacttgtgtttgtgtattgttgttcttattctgctggtgtttgaggataaagactccgccgtttaagttgacctatgttatggagtgagtgatatatatgccgtcactcctagtatatagtagtgactagttggtatgtgtagtactgtactatcttttctccatatgcatgttttgccagcgcgtaatgaatggaatgtgtactgctactacgtgctctgttacttcc

SEQ ID NO: 27694 - DNA, 773 bp, Zea mays
  Clone ID: LIB4738-059-H7_FLI
gtgcccgcggtgctagtaacggttgctctagatccgttcatcctggtggttttgtgaggtcgaaagcggcgagcgaattagaagatgctggacaagctgtgggacgacgtggtggccgggcctcgcccggagacgggcctggagaagctccgcaaggccaccaccgcccgcccgctcgtcatcaacaaagacgcggacggcggcagctacaagcgggcgcagtcgacgccgtcgaccccgacgacgccggtgacgccgtcgtcgtcgacgacgccgcgcggcgccggcaacgtgtggcgcagcgtcttccacccggggagcaacctggccaccaagggcatgggcgccaacctcttcgaccggccgcagcccaactcccccaccgtctacgactggctctacagcgacgagaccaggagcaaccaccgctagatcgggcgagatggacagtgaagaggcccggtgtctctgtcaggccatgtttgctggtccttgtggttatctaaaacgcatgcatgctctattatagctagtcatcactatatatatacttgtgtttgtgtattgttgttcttgttctgctggtgtttgaggataaagactccgccgtttaagttgacctatgttatggagtgagtgatatatatgccgtcactcctagtatatagtagtgactagttggtatgtgtagtactgtactatcttttctccatatgcatgttttgccagcgcgtaatgaatggaatgtgtactgctactacgtgctctgttag

SEQ ID NO: 27695 - DNA, 1225 bp, Zea mays
  Clone ID: LIB4738-061-A11_FLI
ccgggaaatctcctcatcagcttcagttctgagcgatcaacatcaccatcgccttcaactcaagcgactacagcaaacttgctgagactgcagctgatcatggggtcgacgacatggttggcggccgtgctggcggcactcgtggtcgccgcctcctcaacggtggcatcacacgcctcgccgccggggaaacttgaggtcggtttctacgagcactcgtgcccacaggcggaggacatcgtgcgcaacgccgtccatcgtggcatagcccgcgagcccggcgtcggcgcggggctcatccgcatgcacttccacgactgcttcgtccggggctgcgacggctccatcctcatcaactccacgccgggcaacatggccgagaaggactccgtggccaacaaccccagcatgcgcggcttcgacgtcatcgacgacgccaaggccgtcctcgaggcgcactgcccgcgcaccgtctcctgcgccgacatcgtcgcgttcgcggcccgtgacggccgcgtgtccaaagaggaggaggtgctcgacaacaatgtccccgcccctactgacgaggtcgacgagctcatcgagagcttcaagcgcaaggggctcaacgccgacgacatggtcacgctctccggcgcgcacaccatcggccgctcccactgctcctccttcacgcagcgcctctacaacttcagcgggcagctggggcagacagacccgtccctcgaccctgcctacgccgggcacctaaaggcgcggtgcccttggccgtccagcgacgaccagatggaccccacggtggtgccgcttgacccagtcacgccggcgaccttcgacaaccagtactacaagaacgtgctggcgcacaaggtcctgttcatctccgacaacacactgctcgacaacccatggacggccggaatggtccacttcaacgccgcagtcgagaaggcatggcaggtcaagttcgccaaggccatggttaagatgggcaaggtccaggtgctcaccggcgacgagggagagatcagggagaaatgcttcgctgtcaacccacactactagtcaagtttaattagctaattaccccgcgcgtgttatgtttgtttatacgttccatacttccatacatcaacattatgtagagtgtttttcgttctcttcaagactgtgaaatcaaacaagtttatcaagtaaaatggtgttatttgcacccgatcac

SEQ ID NO: 27696 - DNA, 966 bp, Zea mays
  Clone ID: LIB4738-061-B3_FLI
ccgggctctctgtctctctagggtttttgattttagccgccgccgctgctcatctcacatccctcgagaagacgcctgctactcgccgatcgatacgatggccgtcttctccgacctccacaccgccgacggcctcaagtccctcgaggctcacctcgccggcaaaacctatgtgtctggtgacgccattagtaaggatgacattaaggtcttcgccgcggtgccgtcgaagcctggcgctgagtttcctaatgccgcccgctggtacgagaccgtctctgcggctgtagcctcaagattccctggtaaggctgttggtgtaaatctgcctgcgggatcagctcctgcggcagctgctcctgcggatgaggctgaggatgatgatgaccttgatctttttggtgatgaaactgaggaggacaagaaggcagctgatgagcgtgccgccgctgccaaggcctcttctaaaaagaaagaaagtggtaaatcctccgtccttatggatgtcaaaccatgggacgatgagactgatatgaagaagctggaggaggctgtccgcagtgtccagatggagggtctgacttggggagcatcaaagcttgtgcctgttggatacggcatcaagaagatgactatcatgttgacaattgtcgacgatcttgtgtccatcgacactctaattgaggaccaccttacgcaagagcccatcaatgagtacgtccagagttgcgacattgtggctttcaacaagatctagagttcagtttctgagattgggcaacggcagcggctcagctcgtcaagtttgtgctgggatgccagtttatcccttctagtctattacagaaatgttgttcggagctgagtctattataaacatcttggtctgagtttattgttgagtggtgccagtttttttcaatatacatttatcttaaaaacagcggtactgatgtttttttgtct

SEQ ID NO: 27697 - DNA, 1156 bp, Zea mays
  Clone ID: LIB4738-062-D4_FLI
gccgggaggaaccaaaatcccccaaccgccccagcgcacggcccggccgtctcaggcgtccgcggagatgacgcagcaggacgtggagatggcggcgcgccacgggaccggcgccgacggagcgggattctaccctcagccgcggaacggcggcggcggcgagacgctcgacgacgacggcaagaagaagcgcacgggaacggtatggacggcaagcgcgcacatcatcacagccgtcatcggctccggcgtgctctccctagcctggtcgactgcacagctcggctgggtcgtggggccgctcaccctgatgatctttgccttgatcacatactacacctctagccttcttgctgactgctaccgcagcggcgatcagctcaccggcaagaggaactacacctacatggacgctgtcgccgcgtacctgggtcgatggcaagtcctgtcctgtggtgttttccagtatgttaacttggttggaactgccgttgggtatacaattacagcgtccatcagtgcagcggccgtgcacaaggcaaactgcttccacaacaagggccacgcggccgactgcagcacctacgacaccatgtacatggtcgtatttgggatagttcagatcttcttctctcagctccctaacttcagcgacctttcgtggctgtccatcgtcgccgccatcatgtctttctcttactccagcatcgccgtcggcctctcgttggcgcggaccatttcaggccgtagtggtacgaccactctgaccggcactgagatcggagtcgacgttgattcagcccagaaggtctggctcgcgcttcaagctcttggcaacatcgcgttcgcttactcctactccatgattctcatcgaaatccaagacacggtgaagtctcctccagccgagaacaagacgatgaagaaggcgacgctgatgggcgtgacgaccaccacggcgttctacatgcttgctggctgcctcgggtactcggcgttcgggaacgcggcgccagggaacatcctgaccgggttcggcttctacgagccctactggctgatcgacttcgccaacgtctgcatcgtggtgcacctggtgggcgcgtaccaggtcttctcccagcccatcttcgcggccttggagacggcggccctc

SEQ ID NO: 27698 - DNA, 1372 bp, Zea mays
  Clone ID: LIB4738-064-C11_FLI
ccgggctagctcctaggaccgatattcctccagctccctgaacaggaaaaaaacatctttgtgtgtatttataccatggtctaatcggctatggacgccaccggagatgccggcggaggtcgccgccccaacttccctttgcagcttctggagaagaaggaggaacagccttgctccacgtccccagcagctgctgtgggtgctggggctaatgggtcgggagagatgcagatgaagaaggtggcgccgccgaaacgcacatcgagcaaggaccggcacacgaaggtggacgggcgcgggcggcgcatccggatgccggcaatctgcgcagctcgggtgttccagctgacgagggagctggggcacaggacggacggcgagacaatcgagtggctgctgcagcaggcggagcccgcggtgatcgcggccacgggcaccggcaccatcccggccaacttcacctcgctcaacatttctctccgctcctcgggctcctccttctccatcccagcgcacctccgtgctgccggttcgcccggcccacgcttcagcggcgcgcggggagacccgtgggagcgcgtcgtaggcctcgggttcggcggcgccgagggtcctccatctgctacttcgtctccgctgctgctaagcttccactccggcagcgtcggccttgacgtgtcatcaccgtcgtcgtcgtctgctgccgccaactccgacctgtccaagaaacggcggtgggagcaagaaatgcagcagcagcagcagcagcaataccagcagcagatggccgggtacacgcagagccaaatgccaggaaccgtgtggatggtgccgagcagcaacgctcaggccgcagcagcggctggcggaggcggcagcagcagcaacgagtcgatctggacgttcccgccgcaaccaggaagcggcgacggcggcgcggcgcccgtgtaccgcggcgtgccgagtgggctacatttcatgaatttccccgcgccgatggcgctgatccccggtgggcagcagctcgggctcggccacgaaaatggcggcagcagcagcggaggcgagggccacatgggggtcctcgccgcgctcaacgcgtaccgggcgcatgccgtcacggtggctgcgccggcggcgcagaacggagcggaaggcggctctagtcagcagcagcagcgtggcggcggcgagcgacaagacagcatgagccccagcgacgacgactcgtaggtcttctcggaggcttgtgcatgcactggtccgctaaggcgtccctcctgtttttaatctgcgcttctcttgacttatcgtttgcgttttcttcggtttgcgttattatagccttctctggctccttcacattctatag

SEQ ID NO: 27699 - DNA, 1722 bp, Zea mays
  Clone ID: LIB4738-065-E6_FLI
gagttggtgcgccataaccccctgggtcccctgcgaaccaacctcccaaaaagggtagcggattgggctttcccctccgcctccctcccctcacaaaaaggcggcagcacagcgccacccctcctgtcccgccgagttcggagcgcagcgcaaggcggggggaggagcaagaagccgccggcctccctcctccggctcaccaccaggctgactccgcaccgcgctgccacgggtaggagcggcgtcaaattcgggattcccaagcggcttcagcccggaggctgagccaaagctattttctaagaaaaatggcggcaatgatggtggcgatgactgcgaggagcaagaacagcatattacccatggagaagaagcagggctggtctattcagctaccagagctccggttcccttgggattcacatgaagacaagggtttctctctgagtctgcaaggatctggaccttctcatggcggcctgtttgctagcgtgggtcttaaagtgtcgacaggtgccccagcagtggcgcccggaccgggtgacaaggatattaagattccattcactgatcattgtatgaagtacgtgtctgaggcagttgggtaccaggttattagcactgaagcggagtcagtggaggaggtggtggatgctaaggcaaagaaggcagccaagaaacgtgggctgcagctgaaaattaagattgggaacccacatttgaggaggctggttagtggagctattgcaggtgctgtttccaggacttgtgtggcaccactggagacgatcaggactcacttgatggttgggagcaacggtgactccatgacagaggtgttccagtcaatcatgaacactgaggggtggactgggcttttccgtgggaatcttgtcaatgttatccgagttgcgccaagcaaagcaattgagctttttgcttttgatactgccaagaaattcttgactccaaaggctgatgagtctccaaagaccttcctacctccatcacttattgctggagcacttgcaggagtcagctcaaccctgtgcacatatcctttggagttgattaagaccagattgacgatagagaaagatgtctataacaacttcctccatgctttcgtcaagattttacgagaagaaggtccatcagagctctaccgtggtctgacaccaagtctgataggagtggtgccatatgccgcgactaattactacgcctatgacaccctaaagaagctctataggaagacgttcaagcaggaggagatcagcaacatcgcaactctcctaattggttcagccgctggtgccatctccagcactgccaccttccctcttgaggtggcccgcaagcaaatgcaggtaggagcagtaggagggaggcaggtctacaagaatgtgttccatgcgctctactgcataatggagaaggaaggggttggcggcctgtacaaggggctcggaccgagctgcatcaagttgatgcctgcagcaggcatctcgttcatgtgctacgaggcctgtaagaagatcctggtcgaagacaatgaggatagtgagtgaagctgaagcatgtatgcccctgaggaggggtatgactgatgtgccaggctagaagaggtttgggttgggttggggggtataccctagtattatcaactgatgaaaatgtagatccaagatatttgaacgccctttagatcataatttggtc

SEQ ID NO: 27700 - DNA, 853 bp, Zea mays
  Clone ID: LIB4738-067-B5_FLI
ccgggaactgcaacctacgccaaggagaaattgcaaagctctctatacctgacctgtcactagcgaagcatacttcgtcgagcacactcttgcaattaatccaccgagttcggtttattgttttactctcagacgtacgcataaatatagcatagcatcatcgacaataatgtcgcttgtgagtcgccgcagcagcaacgtgttggacacttggaccccttctccctcgacctctggtgggaccccttcgacatgttccgctccatcgtcccgtcggcggcctcctccggcggcggttccgagaccgccgccttcgccaacgcccgcgtcgactggaaggagacgcccgaggcgcacgtgttcaaggccgacctccccggcgtcaagaaggaggaggtcaaggtcgaggtggaggacggcaacgtgctcgtcatcagcggcaagcgcagcagggaggaggaggaggaggacaagaacggcaagtggcaccgcgtcgagcgcagcagcggccagttcatgaggcgcttccgcctgcctgagaacgccaagctggacgaggtgaaggctggcctcgagaacggcgtgctcacggtcaccgtgcccaagacggaggtgaagaagcccgaggtgaaggctatcgagatctctggttggccgtccgttggacgtcgattggagctccgttgtactgctactggtccgtggatgtcctgcatgttgcactgcagcggaggatgttcgctgcgtcttctacgcatcatttgctctgtttgtgttgtgttcgtctttcccgtatatggtttgtgtattgtcccttatcgataataataaataaaatcaggctttacgtctg

SEQ ID NO: 27701 - DNA, 1794 bp, Zea mays
  Clone ID: LIB4738-068-D10_FLI
aattcaccacttccgcaccgactctcccgaaatgtcttgctgggcagcagggcgccgctcatcggcgtcggccatggcggagaacgccggcgcgcggggcgccaaggaggcagtggtgacgtccggcaagcgcgtcgccctcgggaacatcagtaacgtcttccgcggcagctgggggtccggcgcggcgaattctgcgtccgatgcgaaattgagttctaccaaaccagatgatgttaagaaaggatcctatgcttgcctgcgcaatgtgaacacggaacggggttctagcagaaggctggcctctgaacagtttgatcaggcagtatcacttcttcagaagaacacatctcttccttctgtgccagacgttgtatcaacaggttgcagctcacccggcctgtctcaggattgctcggtctccatggaggatgctatgtcaacatgcaactcaacagaaagctctgatgttgagtacctcaataataatgacgacccctcaatgacatcttcttcgcattggtgggccagtgatagacctcatttctctgatagtatggatgttgcagaattcaactggaggaaacatagtcctaatcattacacctataaggatccacgactttctacaactcttgcctgtgaaatttacgagagcttgcgagaggctgagactaggaaaatgcctccaacaaactttttggaaaccactcagacagatatgagcaaaaccatgagggcaatattaatagactggcttgtagaagtcacagaagaatatcgtcttgttcctgaaaccttatacctcactgtcaattacattgaccgttatctttctgtcaaagagatcagtcggcacagactgcaattagttggtgttgcttgcttgcttatagctgcaaagtatgaagaaatatgcccacctctggtagaagaactctgttatattactgactattcatacaccaaggaagaggttttgcaaatggaagcttctgttctgaataacttgaaatttgagatgacagtacctacagcaaaatgtttcttaaggagatttgtacgtgttgctcaagttcctgacaagggctcatctctgcatcttgagttcttagtcaactacatttgtgagctgtcacttctggagtacagcttactttgctatttaccttcaatggtagctgcctcttctgttttcttggcgaagtttatccttatgccaataaaaaacccatggaattcctcactttcttactacacgcggtatacaccatctgagttgcgtggttgtgtaagggtactgcaccggctcttccgtttgggccctggaagcaatcttcctgcaattagagaaaaatacagtcagcataagtacaaatttgtagcaaagaagtactgcccacagtcaatccctactaagttcttccaggatctgacaagttagaagccaagattacttctagttactcaatgaaaccttcctgaggtacttagtgtgatactatgatattgatttgacagatagttttgaatgcaaggcatgcgcgaggccttgcgtttagcagataaacaggttcaagtaaactgtatgtcacttgtggcaatgttgtttcagtgttgtgccttgattgcttccagcatcgtcttatacgttgctgttgtggtcttctcacgctgtctagaacttttattgtatagttctggaccttgctcataacaagggtagatagtttggctaaagataaagtgtaactcattctctcattgttatctacgtgttgcttctgtattccg

SEQ ID NO: 27702 - DNA, 1715 bp, Zea mays
  Clone ID: LIB4738-069-H2_FLI
ccggggcttcagctcggcgtcttcacaaacgccggcgcaaactctcgcccgagcccgacagatctctaattccccataccgtccaccggtcgaccttcacgccagtctcggtctcttccgaaggcgtcgcgcgcgattgtttgagaggagaggaggaagatgagggagtgcatctccgtccacatcgggcaggccggcatccaagtcggcaacgcgtgctgggaactttactgcctcgagcacggcatccagcctgatggccaagtgcctggagataagaccgcgggacatcacgatgatgccttcagcaccttcttcagccagactggtgctgggaagcacgttccccgtgcaatcttcgttgatctagaacccactgtgatcgatgaggtgcgcactggcacgtaccgccagctcttccaccctgagcagctcatcagtggcaaggaggatgccgctaacaatttcgcccgtggccactacacaattggcaaggagattgttgatctgtgccttgaccgtatccgcaagcttgctgacaactgcaccggcctccagggcttcctggtcttcaatgccgttggtggtggcaccggctctggccttggttctctcctccttgagcgcctgtctgtggagtacggcaagaaatccaagctgggcttcactgtgtacccatctccccaggtgtcaacctctgttgtggagccttacaacagcgtcctctccactcactcactcctggagcacactgatgtctctatcctgctcgacaacgaggccatctatgacatctgcaggcgctccctcgacattgagaggcccaactactccaacttgaatcgccttgtgtctcaggtgatctcatcgctgactgcttctctgaggttcgatggtgccctcaatgtggatgtgaacgagttccagaccaacctggttccttacccgaggatccacttcatgctgtcctcctacgcaccggtgatctcttctgcgaaggccttccacgagcagctgtctgtggcggagatcaccagcagcgcgtttgagccggcttccatgatggtcaagtgcgacccacggcacggcaagtacatggcttgctgcctgatgtaccgcggcgacgtggtgcccaaggacgtgaacgccgcggtggccaccatcaagacgaagcgcaccatccagttcgtggactggtgcccgacggggttcaagtgcggcatcaactaccaggcgccgacagtggtgccgggtgccgacctcgccaaggtgcaacgtgccgtgtgcatgatctccaactccaccagcgtcgtcgaggtgttctcccgcatcaacagcaagttcgacctcatgtacgccaagcgcgcgttcgtgcactggtacgtcggcgagggcatggaggagggggagttctccgaggcacgcgaggacctggccgccctggagaaggactacgaggaggtcgccgcagagggcggcagtgatgacggtgacgaggaggaggaatactgatctgcttgcatgaatctgtttggctgtcgagccaggttgtggtgttgaaaaacctttgtttgtgtcctggcccccctgggtaatgtttgggtgtttccttccatcatcacttgctgaactgctctagtatttgcatttgtaattgaagtctgtcgctttaagagcatctccaaaaggttccttaaaatcatccttaaaaaaag

SEQ ID NO: 27703 - DNA, 1222 bp, Zea mays
  Clone ID: LIB4738-071-C3_FLI
ccgggaaatccatgaccaaccaatccaagaagaggactacatagacatggatctgagctcaccagcagcatcgggagcggccaccaccaccgcaagcttgttctgctacaacagtgccatggcagcctcgccacaacactcgcgggagtttgaattccacatgtcggctccacctgacctgtgggagcccgtggcgtccccagcagatgagctcttctacaagggcaagctgctaccgctccatcttcccccacgcatacagatggttgagaagctacttgagagcgcgtctgagaagggcttactttcagcaagcactgccccagcaacaccataccagtcagcagcaaactcatgttatcccagcggcgagctcgctgcagagtactacttccatgattgcatatccactggcagtgatgctgccgaggaggcggcagcctgtgagaagaagccatggtccaagaagctcaagttcatcaggcacctcaacctcggcctcaagcttaaggcgtcgaaagcttatctgaagacaatatttgctagtaaaggagggaatccagatggcaagaatggtgtacctagagcaaatgaactgtccagcacacagttcagtacctggaggaagaacccatttggccacatcggaagcaagaggtacatagcctcacccatcagcaatagcaccacggtaggaggcaagtttaaagagggcgagtctggccatagaagatccttctccagcatcatcgtccgatactcgtcatcaaacaagacatcctctgtttcgtcgtcgtcgtcgtcgtcgtcatgttcttcgtcaaactcatcatccttctcaatcccaagctcaaatggctctggcggtgttggaccagtgctgaggaggagtagcagtgcaagttcagagatggacaatccaattcaaggcgcaatagcatactgcaagaagtcacagcagctcgcctcagtgaggaagagtgcaagtgacgcagggttccgtttcatgtcatcatcagcatcaaaaatagcagcggaatccgaagacgctgatggtatatttgagattacccgaaatacaaatgtaaattcagtgtccccccaataattttgtactcttttgatcttgagctttctgtagatatgatatatgtctgatgttatggccttaaggaatatcaatgtaagcaatttctgttcaaggacaaacagttttatatgt

SEQ ID NO: 27704 - DNA, 1142 bp, Zea mays
  Clone ID: LIB4738-073-A8_FLI
ccgggagcctcagcctcacacggtcgaagcagaacccgtgaacacctcaaacctcacggctcacgccaccgtcctccagccccgttctccggcgatcctgtcattccagacgcgtctccgcccctctcggtccaccaccccgacgccgccacatgtcgacgcagtccatttcgccggcctctgcgtccgcgcagttcacctacccggcggcagcggccccgtcttacttccccgtgcccttccacctccagaacgcgcaatacaccgcatggaccgcagccgcgccggcggtgcctgtgtacaacgccatctatcccatgccccaagtccagcaggcccaacagttgttccaaaaggactcgaagataattactcctgaagctctagctactgttaaggctgctattgcaaatagtgagaaagacaagaaggttgatgcaacaaaaaaggcagtgcctcgaaaggcagctgggcaaagttgggaggaccctaccttggctgattggcctgaaaatgatttccgtttgttctgcggtgatcttggaaatgaagtgaatgatgatgttcttgcaaaggcattctcaaaatatccatccttcaatatggccagggttatacgggacaaatggactggtaaaactaaaggatatggttttgttagttttgctgatgcgtctgatcttacttctgccttgaaagatatgaatggtaaatatgtaggaaatcggccaatcaaattacggaagagcacatggaagaacaggatagacttagaagctttggagaagggaaagacccaaccacagaagaaaatcaaactgcagaaaagaagtgttcttcacaaatgaaactgaaaaaatctgctcgttcatcgtctgtcagtatcgtttgggaaagctgtctgaagcattaacagttttacttaacgtcagatgtgtaggactgatggtcaccaagttcccggtgacactgtatacaatcgcagacgcgatgctatgttggtgattgaacaggtgtagccgaatagttggatccaataacttcacctgtagtgtaatggtccaattttatcatgggaactgtagttctaaatactccagtgaccagtgctattgtggtgaattattctgtgatctttatcc

SEQ ID NO: 27705 - DNA, 823 bp, Zea mays
  Clone ID: LIB4738-073-C2_FLI
ccgggacacacaccacacacgtacgcccacaccagagaatacacagcacagcaccgacaacacctctcaagtaacccagcaggcaccatggccgccgccgtgcccctcgtcctcctgctactgccaacgaccctgatggccgcgtcggcggcgtccggcggcgagaagagcacgcacatcaagctgtactggcacgacgtggtgagcgggccgagcccgacggcggtgccggtggcgcaggcggcggtgaccaacacctccaagaccgccttcggcatggtggtggtgatcgacgacccgctgaccgagggccccgacctcaagtcctccaagccgctcggccgcgcgcagggcacctacgtcggcgccggcaaggacgagctctccctgatgatgaacatgaacttcgtgttccaggccggcgagtacaacggcagcaccgtcgccatcatgggccggaacgccgtgttcgacgccgtccgcgagatggccgtcgtgggcggcaccggcgcgttcaggatggcgcgcgggtacgcgcaggcccgcacgcacaccttcgacctcaacaccggcgacgccaccgtcgagtacaacctctacatcaagcactagctagctagcccatcggctttgtgtttctgattgttggtgctcatatatgaacacgatcgaactccataattgtcttgtgagcttaatttgtgccactagcttttgcagttttggtgaaaaagaagggggtaattaaaggacgatagcttcggtcgttgtaatgtaagctgacttcgatttaacttgcacaataattgaggacttaaagaac

SEQ ID NO: 27706 - DNA, 1060 bp, Zea mays
  Clone ID: LIB4738-073-H10_FLI
ctcgaggccggccggggttcacatcctgcccccttttcttctcccgtccaccttgcgtgctcgcgcgcgagctctcgtggcgcagccacaactaggcgaccgccgccgcccctacgccacgtgctcgagtctagcctcgtcgattgcttccccagtttaattgatctacaagcttcagaacatgttcaagaatacatttcagtctgggttcctgtccattctttatagcctcgggaccaagccattgcagatatgggataaggaagttgtgaatgggcacattaaacgaccccaagatgaagatatccaatctaatgtacttgaaattgttggaacaaatgtacagtcaacttacatcacatgcccagctgatccttctgctactcttgggattaagcttccatttctggctattattgtgaaaaatcttaagaaatacttcacgtttgagatccaagttctggatgacaagaatgtccgacgtcgatttcgagcatcaaattttcaatctgtcacaagggtgaagccatatatctgcacgatgccgttgaaactcgacgatggctggaacaacatccagttgaaccttgctgatctgacaaaaagggcgtacggcacaaattacgtcgagacgctgcgggtgcaagttcatgcgaactgccggctccgcagaatctacttctctgaccgcctctactcagaggaggagctgccgcctgagttcaagctctaccttccaatccagaaaccataggatcccgagggcgtggagagactctggtgaccgggagacttacatcgtatcattgtgaggataacctagctgcacatctgcgcattcctgagatacagaaaaaatgtatcagaatgtttctgttagttttctgattgttgtgcgatgaatgattaaggctgttctgtttcatagcaagggcgagtagccttagttggggctgttacccagtgacccctttgtgtgaacaagtaagtcaatgttattagtccggaccctttggctactggtccttctggtccaaagcaaaacgtaccgttactgctc

SEQ ID NO: 27707 - DNA, 1063 bp, Zea mays
  Clone ID: LIB4738-074-H7_FLI
tcgaggccggccggggttgttttgttcttgcggagacgagacgagacgaggcgacgcgagtcgcgaggagtcgaggaggatcggggctcaggcaagatgaacaggaagccaggagactgggactgcagggcgtgccagcacctcaacttcagccgccgagacatatgccagcgctgcagcgagccacgtggagttgctgatcgtggcggcggaggaggaggaggcgactacgccagcttcggtgcccgcggtggctcctccttcggcggcggctttggcgctgctggctctgacgtccggcctggtgactggtactgctcctgcggcgcgcacaacttcgccagccgctccagctgcttcaagtgctccgcctacaaggaggaggccgctgtgaacagtggcgctggcggctttgacggcgacatgtcacgctcacggggctacggcttcggcagcggtgctgctggtgctggcgctggcgctggtgctgcccgtactaccaaccgccccggttggaagtccggagactggatctgcaccagatccggatgcaacgagcacaacttcgccagcaggatggagtgcttcaggtgcaacgcaccgcgggactctggtagcgctgccatgacctacgaaaactacttgcactgaggtgtaggatcgagcaagttaaaaagtctgcagcgccgaagaaagcgacgacaagaggagtcctcatcacgtcgtaacgtaagagagagagtagtggatttgcaacaaaaaaaaaaaagacggccgcgatgctctgttactagctagctagttttgttcaaccacccatgccgtctcttctcttttattagatttggtttggttctcatagccctttaattaccatttgggacctatgtttgctgttctgtttcccgttcgtctcctccgcatgtttgcgcgtggatcgagtcttgtgatgtaaccccccaaaaaacgcttgcttaactagtactgttgcttcttaatatctccgggggcgttggtgtaaaggctagctccaacaaggagctttaaaaggttctgtacccgc

SEQ ID NO: 27708 - DNA, 1372 bp, Zea mays
  Clone ID: LIB4738-076-G9_FLI
ccggggtcgtcgccctcgcccaccaccttcggagctcggagactcggagtcttcccccacccccataacgtcctcttccgtgctctgcgttgccgcctgcgggcgccgcaagccgtgcgtgcccgcgggttccccgatttgtagtttatttacggaagtttacaattgatcaacaagacttagtccaaccctacttttcaaatcactatggttaccctttcctacagctgggcaagcgtagaatgtcagtcataatgttgggctcaaagaaggaaaggaatctcagcatgcactttcaatcagaccagaaatcttctgctaaattttgtttgttttcaaaagtccaatctgccagcccaccaccagggaatacactggtttatctaaatgtgtatgatttgacaccagtaaacggctatgtttactgggctggtctaggggtatttcattctggcattgaagttcatggtgttgagtatgcatttggagcacatgactattcgattagtggagtttttgaggtggaacctcggcagtgtcctggtttcaaatttcggaaatcaatatgcatgggaactaccagcctggatcctctccaaatcagagagttcatggagattcagtcagtaaattacaatggtgatacctaccatttgataagtaaaaactgcaaccatttctgtgaggatatctgcaaaaggttgacaggaaattttattccaaaatgggtgaatcgacttgctagaatgggtgctgtttgcaactgcattctaccagagtccctcaagatcaacgcggccggtcatgacccagcttctcgagctgaagatagcgagagaaaaatgctgacaagttccttcagttgcttctgttcaatctctctatgccaaaggcatttctcaacatcttcgccgtctctgcgttcctccgcgaacggcacttcttgggataccaagcagtccaattctacccgactgaagaagagctgacagttgaggtcctgtgtatcatatttaactcatgaggcacaaggatccttttttgtcagcaatctcttctacgaccttcatcagagaaggatgaagaggtattgattgataaggtgtttttgcatactcgagcgtcggatccagctgtgcttgaacatctgtacagagattgtgtagaaattatttcttacatttgaatttgaaatacagtgagctggaggaaactccaccctagacttttggaaaaaaaaacaaactccaaaaaaatcattgatgggtgctgcctctggagtccgaagtgatatttcgcctgtggtagtttgcaaatttggccatttttatacccttgcctatataaagttttatagttttgttttggttgc

SEQ ID NO: 27709 - DNA, 1371 bp, Zea mays
  Clone ID: LIB4738-079-C2_FLI
ccgggaagctcgaccaccaacccagctcgctcgtcccagctgatcaggtcgagcacctagtagcgacctgctcgatcatcagtgtagagtgtcggtaggtgtctgtctctcttggtggctggttgcaacggtcatggcgacgtcgtctcgtcgggtgcccttgctgctgctgtgcctgggcgtgctggtgtcctgccccttcgcggcgggcagcttggaccaggagcaggacatcacgtggggcgacgggcggggcaaggtccttgacaacgggcggctgctgacgctgtcgctggaccgcacgtccggctccgggttccagtcccggcacgagtacctgttcggcaagatcgacatgcagctgcggctggtgccgggcaactccgccggcaccgtcaccgcctactacctgtcgtcgcagggcggcgcgcacgacgagatcgacttcgagttcctgggcaacgtgtccggcgagccctacacgctgcacaccaacgtgttcacgcgggggcaggggcagcgggagcagcagttccgcctctggttcgaccccaccgccgacttccacacctactccatcctctggaaccccaagcacgtcatcttcatggtggacgacatgcccatcagggacttccgcaacctggagagcaagggggtggcgttccccaagagccagccgatgcggctctactccagcctgtggaacgcggacgactgggcgacgcagggcgggcgcgtcaagacggactggtcccacgcccccttctccgcctcctaccgcgggttcaaggccgacgcctgcgtcgccgtcgcgggcggccggacccgctgcggcgccaccgtcggcaccgagggcaccggcgcccccgcctccgccgccggcgccggggactggtacaaccaggagctggacctcaccctgcagcagcggatgcgctgggtgcagcgcaagtacatgatctacaactactgcaccgaccccaagcgctaccagcagggcctccccgccgagtgctccatgcagtagcgcccggttattcctcgcccgtccaacaatggcgcgcgcgcgcgtgtgtgtgcatgtggtccgctctactgctaccgctacgacgatcggtgtcgatcaccggatcaaggcaagacgaaaggcatcgaaacatggtagataaataaaggacttgacgatttgtaacgcagtagctggtgcgtgcgtggtgtggtggtaagaaattcttctgctgcctgtgttcttgtagcctcctcgtcctcgcccaccctgttggtacgtgtacggtgtacgtagtctgccgccgcgcgctgttcgtgttcgtcgtgtctcgtgtctgtattatactcgtcctccccatc

SEQ ID NO: 27710 - DNA, 1404 bp, Zea mays
  Clone ID: LIB4738-080-C9_FLI
tcatcccacgcggcgcccatgccagccacacctgttcgaccacctgacccgcgcgcgccctgatggctcccgcgctcacctccaacccgccctccttccgtcccctaacgtccccactccgccgtcgtgccgccaccgtcccatgccgcgtcggtaagcccggcaaggactcctccgctgcggatgacgctaccggccccaacaagaggcccaacctcttcgcggacttcgggaatgccaagtcgctcatacaggcgttcccgtcgcagtcgctgttcgcgggcggtggcaggggcaggaaggacccgcagacggtgttcgtcgcaggcgccacagggcaggccggggtccgcatcgcgcagaccctgctgcggcaggggtttgccgtgcgcgctggcgtcccggacctagcgtcggcgcaggagctagcgcggctggcggcggcataccggctcatctcccccgcggaagcgcggcggctaaacgcggtagaggcgggcttcggtgaccccgacgcgatagccaagtccatcggccccgccgcgaaggtggtggtcaccgtcggctcggccgagaaagggccagaaggcggaggcgtcaccaccgacgacgcgctccgagtggtgcgggccgcagatctcgccagcgtggcgcacgtcgttgtcgtgtatgacgagggggcggccagcggcggccttggcggcgggggctccacttacaatgtgctcgacggcttcacgtccttcttctccaacctcttctcgcgagagcaggcgctgacgctgagccagttcttggccaaggtggcggagaccgatgtcaggtatacactggtgaaggcttcactcaccgacgactatacccctgagagctactacgcccagctggtactcacgaaggagggagtatcgcctagcgacacaggcaaagtgtcaaggtcacagattgcagcccttgtagctgatgtcttctccaatgtggcagtcgctgagaacaaagtcgtcgaagtttcaacttcctcgtcagcgacagcaaagaacatagcggaggctttcacagctatccctgaagacagaagaagaacagagtacctagaagctgctgcgaaagcacaagccgaagaggaaacgttggcctcagaacgagctaataaaaaagccgaagcggctgccagtaaatctgaagccgacacgaagacgacaccttcagaggaggaagctgctactcctagcgcggtgaacggggctcaggcctctctagagaacctcttgagtagagccaatgtgatcagtgcggatttctcgtgggagaagttcagcacacagtttgccgacgtgacgacccctctaacctcatcactagagaaggaacccaacaaggcacagatagccactgtgcgaggct

SEQ ID NO: 27711 - DNA, 1381 bp, Zea mays
  Clone ID: LIB4738-080-G5_FLI
aactaggagagtggtggaggaggagacccaccgtcggctcgcccgtgtcccgattcccactcacgacatcaacctgtccccatccatctcgcccgcgacgtttgatggagtctctcctcgcctcgcgatccattaggtcttccttctccgccgtcgccagcaccaggggcgccgcttcccccaggccctcgcgcgtcgccaccctcgccagcgccggcgccggcgcccgctcccgcgcgctccgtgctggccacacggacgatatgctgaacgcaaaggagctggtccaatgggagaatggcttgtcattcaatgacatagcggctaggcaggggattcgcatccgcagacactgccgccccactgcctccttgaaggagatagaggaggagctgggagccccccttaacatcctagagaagatcatttgggacaaggagattgaagtagctgaggggcatgctaagaagcctcttgaggaggtgattcaggctgcaacgaaagcccctccttcaagagacttctatggcgctttagaagctgcctacaagcgtaatggggtgcctgcattgattgctgaggtcaagaaagcatccccgagtaggggtgtgctcagggagaactttaatcctgttgaaattgctcaagcttatgaaaagaatggagctgcatgtttgagcattttgacagatgagaagtactttcagggaagctttgataatcttgaaaaggtgcgcagctcaggagtgaagtgccctcttctctgcaaggagtttgtcattgacaagtggcaaatctataatgctcgctctaagggtgctgatgcaattctactaattgctgctgtgctaccagatcttgacataaggaaatttcttcagatttgcgaagagttgggaatgacagctcttattgaggttcatgatgaaagagagatggaacgtgtgctgaagataaatggagttaagcttattggtatcaataaccgaagccttgagacatttgttgttgatacttcgaacaccaagatgttgctcgagaaacatggggatatcatcagggagaagggaattttggttgttggtgaatcaggtctgtttactccggatgatgttgcttatgttcagaatgctggcgtttctgctgttttggttggggaatccctggtgaagcaagagtgccctggacgagccattgttgggttatttggcaaagaactgctgcactgaatgagaggacaaagattgtagtagtacatggtttggtggtgaggtgttagtgctaggctgctagctgttagccatagcatcatttgcagtaatagcattggttttattaataataccaccgaatgtgacatgcagaataaaaataatgttcg

SEQ ID NO: 27712 - DNA, 1962 bp, Zea mays
  Clone ID: LIB4738-082-E1_FLI
actctcactcacactctgtttctctctctctctcgtggagacgactgggcgaccgccggcgccgacctacgccaggtgcccaagccttcaacgggaccatcgccgacgacgaccactcacgagtcagaaatgtcttcagtcgggagcggcagtggcaccagggctgcgaatggtgcagctgccatcagtgctgccgcgacggcagcaggctcggccgacgccagattccacccccaactactacagcaggacaggcaaagtagatgggctggctgcttttcaggcttatcatgtttcggatcgcagaagggcgggaaaagaattgttcctgcagcacgtacttctgatgggaatggatcaaatgctcgcggaaatggtctccagtctggtgccaattcaaaccaaaatatgcctatgaatttatctcttctggctccaccatcatcaccggcatccttctcaaactctgcacttccttcgactgctcaatcgccaaattgctttctgtctgtatccgcaaactctcctggtggcccaacgtctaatatgttcgccgttgggccatatgctaatgaacctcaacttgtctcaccacctgtcttctcaacttacacaactgagccatccacagcaccgttgaccccaccacctgaactagcccatgcaactacaccttcttctccagatgttccatatgctagatttctttcttcttctatggatatcaaaactgctagcaaggagcataacatgcctttcttatcaacaacctattctggtggttcaggactccaagcatcctacccactttaccctgaaagcccttgtagcagcctcatctcaccggcttcagtaactccgaggactggtctatcctcacctatacctgagcaagaggttcctcctgcccattggaagacctctaggtccgcgtgcgacacgccatatttcagggcttcgcccattcctgagcaagaaaccactgcacaatggaagacctctagatctgcttgtgacacaccgtatgccaggacctcaccaaccaatatttttggtctggattcaaataccccgagaaactatatgctagatagcaatttctttcggccagcggcatctgctcagttctacctggaccaggctcagcaggcatttccacataatggcgggagggttagcgtatccagggagaagcaagatgccgatgaaatcgaagcttaccgagcttcatttgggtttagtgccgatgaaattgtccaatctcaatcttatgttgggataccagatgcagttgatgagtcattcagtatatcaccattcggaaacaatgctcctgctactgagatctgcccattcagtgatctgcctagtgaggttcagaaggcggataaatcatgcacctacgttaaagatggcacgagcccaaagaaatcagcaaaccatctctcgattgattctccaataaagttctgcgcttggacgtgttcaaagtaacaaaagggggtcatctgtctgaggacgagggtattgcgagagatggccatcctttcagaaggacaacggatgaaatatctctaaaaccgatagaggtaaggaagaaatctcctcctggccattcttgctcagacgcagagatcgagtacagaaggacaaggagtctgagggatgccaacggtgttttatcacggcgtagcgcattggcaagacaactgcactaataagtcactagtatgcatggcaatttcatagttcatgtagagcagtgtgcattgaattcgagctgtcattagagtgatctgtaggcgaagagtagcctttatcgtatatgaggattatattaccagattgtgtgttctgggtatgtgatgatgagctttgtactctgtttgaactccaagatcctctttgtagacacctgcagtcgttcccaggagcagtgaaatgaaatatcgttggcaaatt

SEQ ID NO: 27713 - DNA, 1106 bp, Zea mays
  Clone ID: LIB4738-103-C8_FLI
gacagcgccatcccgcaggggccaccgttcagcgacaccacggcgacggccgtggtcgagtacctcggctcggacacggaccccaccacgccgccgacgctgccgccgcggccggaggtcaacgacacggccacggcgttccggttcctctccaacctgacggcgctggtgcggccggggcagccgacggtgccgctgtccgtggacacgcgcatgttcgtcaccgtcgggctcggcgtctccgactgccagccgacgcagctgctctgcaaccgcagcgccaccgtcttctcctccagcatgaacaacgcctccttcgtgctccccgcccccggcaagccgtccatgctccaggcccactacgacggcggcgacacggcgggggtgtacacccgcgacttccccgaccgcccgccgctcgtcttcgactacaccgccgacgccagcgacaccgccgcgctgcagtacacggccaagtccaccagggtgaggacgctccggttcaacgagacggtggagatggtgctgcagaacacgcggctgatcgccagggagagccaccccatgcacctccacggcttcaacttctacgtgctcgcgcaggggtttggcaactacgacgaggccacggccacgccccgcttcaaccttgtcaacccgcaggagcgcaacaccgtcgccgtccccaccggcggctgggctgtcatccgcttcctggcgaacaaccctgggatgtggttcatgcactgccacttcgacaaccatcttgatctgggcctggccatggtgtttgaagtaccggacgggcccacgccggaaacgtcggtgccgccgcctccagcagacctaccacagtgctagccatcgtcgatccacagccaaccgtgattgtttggattcaccatgcaattgcgtgcggaagaaccttaattagcttggcgtgctatatacgatgcgatttaaatttaactattgtttgtctgttttatatatataggtcgtggtcgactgttagactcgcatacttgtatttgcatagatatatgtttgttccaatgcgtcagaagcttggacagtatgtttcagtaatcacattttacaattag

SEQ ID NO: 27714 - DNA, 1781 bp, Zea mays
  Clone ID: LIB4739-001-A10_FLI
caggggtattagtgccatatggccattgccatcccatctgcccatcgtcgtccagccgtccagggatccaggctgaggcttaataataaagcactctttccgctcctttgatcccaccactctgcagaaccatggccggcgaggaacaccagcagaacaccagccaccgcggccaccatttcctggtggtggcctacggcatgcagggccacgtcaacccagcgcgcgccctggctcaccgcctcgccaagctcagcgacgtcgtaggcggctgccccatcctcgccacgctctccgtgcacgtcgccgcccaccgccgcatgttcccggcaccgctggacccggacaccgccggcgaggaggatgaggaggaggccagcgacggcgtcatctcctacgtgccccattcggacggcttcgacgacggctccttgcccagaacccccgaggactgggcccgcagacgccgcgtgagccgcgagagcctctccgccatgctcgcccgtttcgccggcggcgggcggcccgtcacctgcgtggtgtgcacgctgctggtgcccgcggcggtggacgccgcgacgcgccacggcgtccccttcgccgtgtactggatccagccggccaccgtcctcgccgccgcgtaccactacttccacggctacggcgaggccgtcgccgccgccgacccggcgcacgaggtgagcctgcctgggctacgccgccctctccgggtccgggacttcccgtcctacctggtggacacgacgggcagcccgctggccaggtccgtcgtcgggatgttccgggagctgttcgagagcgtggaccggtggcggcctaaagtcctcgtgaacacgttcgacgagctggaggcgggcgtgctctcggagacgaagcgacacctcgacgtgttcgccgtcggtcccatggtcgccggcgccggtggtggctcgggctcctctgttgcgtcaaacgacgaaggacggatccatctgtacaggcacgacgacgccgacaggaagaggtacatggagtggctcggagcgcagccggagagctcggtggtgtacgtgtcgttcgggagcatagcgacgcacaccgagcagcagatggaggaggttgtccaagggctgctgcaggctggacggccgtacttgctggccgcgcgcagctggcacgggctcgaggacgacggtgcgcgccacgtcctggacaaggccgcccagagcagcggcggccgtgggacggtcgtggactggtgcgaccagccggaggtcctggcgcacccggccgtcgggtgcttcgtctcgcactgcggctggaactcgacgttggaggccgtggcggccggcgtgccgctcgtcggcgtgcccagcctgtttgaccagccaacgaacacgtacttggtggtggaggagtggggggtcggcgtcagaggggagcgtgacggtgagggcgtgttagctgcgacggagctggcgagatgcgttgagctggtcatgggtcaaggtacaaaagcaacggcgataagggagagagtaaaggctttgagagagatggcgcagcaggcggcacgagcaggtgggccggcggagagaaaccttgaggactttgttaactctgtcggtgatagcttccgtcctgtcggaatttcagttgcggaaaaaactgatgaatctcgtacatgttcatcagaatgacttccgtacagatattatttttatctacattctacaaggagtacctgatataccatgtaatggatggaatgaggttccagc

SEQ ID NO: 27715 - DNA, 1809 bp, Zea mays
  Clone ID: LIB4739-001-A9_FLI
accactcaccccagtatcccactctctcgcacttaaccgcctgctctctctgtctgacgcgccggcgccgccctcgcgatcgatgatggcagctgcggcgtggttgtgtggactcctctcgctcctggccctcgccggcgctgcgtcggctgcggatggggcggagggtgagtgggagccgctgatacggatgccgacggcgaaggggagtgacgctgcttctgctccggctgctgaggatgatgaagtggggacgaggtgggccgtgctcgtcgccggatccttcggttatgggaactaccggcaccaggccgatgtgtgccatgcgtaccagatactgcagaagggaggagtgaagaaggagaacattgtggtgttcatgtatgatgatattgcccacaacattctgaaccctaggcctggagttatcattaaccatcctaaaggagcaaatgtttatgatggtgttccaaaggattacacaggtgatcaggtcactactgaaaacttctttgctgtcctcttgggcaatagaagtgctaccactggagggagtaagaaggtgatagacagcaaacctaatgaccacatcttcatctattactcagatcatgggggtcctggagttcttggtatgccgaacctgccatatctgtatgctggtgacttcatcaaggtcttgaaaaagaagcatgcttccaatagctactcaaaaatggttatatatgttgaagcatgtgaaagtggcagtatctttgaggggttaatgcctgaagatctaaatatttatgtcacaacagcctcaaatccagttgaaaatagttggggaacttactgccctgggatggaaccatcaccccctcctgagtacattacctgtttaggtgatttgtacagtgtttcttggatggaagacagtgaaacccacaatctaaagaaggaaaccatcaaggatcagtatgaagtggtgaaaacaagaacctcaaactcaaataagtacaaagagggttctcatgttatggagtatggtgataagaccttcaaggatgagaagctttccttttatcaaggttttgatcctgctaatgccaacattgcaaacatgctggtttggccaggcccaaagggtgcagtcaatcaaagagatgctgatcttctcttcatgtggaaggggtacgagcagttaaatggggggaccgaagagaagctgagggctctcatagagattaaagaaactgttcagcacaggaagcatcttgacagcagtatcgatttcgttgggaggctcgtcttcggatttgagaaagggccttcgatgcttgaggctgttagaacctctggtcaaccattagtcgatgactgggactgtttgaagaggatggtgcggattttcgagtcccagtgtggttcacttactcagtacggcatgaagtacatgagagcgtttgcaaacatctgcaacagtggtatatctgagatgaaaatgagggagtcgagcatcagcgcttgcagcagctacaactcggcgaggtggagcccgatggctcggggacacagtgcttgatggtaaagatcaaatagcaaagccccccgaggtctgctgccccatgtccctgtgagcgagctcgtatcatctggggactgtggacccatcgacggttgtacatatcatgcacttgtgctcgtgcctatgtaaagtagtaataccaactcaactctgatcttcatccaagtaccgaaatgattaaaagatcagatgtgaatgctgttgcgatgggtgatcgcaagtagggcataatcagtggaccg

SEQ ID NO: 27716 - DNA, 1758 bp, Zea mays
  Clone ID: LIB4739-001-B6_FLI
ctcgaggccggccgggacgtctcctcgttcaccctgtcggactgcagcgcgcacgccccggccggatcagagagatgggcaccgtcggcggcggcgagcttcccgtcgccgacccggccgccgccgacgcagaccgggcgcggctgcagcagctggggtacaagcaggagctcaagcgcggcctctccgtcgtttccaacttcgccttctccttcgccatcatctccgtgctgacgggcgtgacgacgacctacaacaccgggctgcgctacggcgggccggcgtccatgacgctgggctggctcgtcgtggcgaccttcaacggctgcgtggcgctgtccatggcggagatctgctccgcctacccgacctccggcggcctctactactggagcgccaagctcgccggcaacgaatgggctccacttgcctcctgggtcaccggatggttcaacatcgtggggcagtgggcgtgcaccacgagcgtggacttctcgctggcgcagctgatccaggtgatcatcctgctgagcaccggcggggccaacggcggcggctacctcgcctccaagtacgtcgtgcttgccatctacaccgccatcctcgtcgtgcacggcctcatcaacagcctgcacatccagtggccctcctggttcggacagctcggagccttgtggaacgtcgcgggcgtgttcgtcctcgtcatcctggtcccgtcggttgccaaggagagggcgagcgccgagttcgtcttcacccacctcaacaccgacaacggcatgggcatccacagcaaggcctacatcctcgccgtcgggctgctcatgagccagtactccagcattggctacgacacgtcggctcacatgacggaggagacgaagaaggcggactggagcgggccgatggggatcgtgtactcggtcgctctttccagcgtgttcgggtgggtttacctgctggctctcacgtcggtggtcactgacatcccgtacctgctggacaccggcaacgacgccggcgggtacgccattgctcaggccctgtacgacacattccgccggagatacggcaccggcgccggcggcatcgcctgcttagtcatcatcgccgtcgccgtcttcctctgcggcaccgcctgcgtcaccagcaactccaggatgggctacgccttctcctgggacggggcgatgccgttctcgcacctttggtaccgggtgaacaagcaggaggtgcccttcaacgtcgtctggctctctgtgtccgtggcgttcgtcatggcactcacgtcgctggggagccaggtggcgttccaggccatggtgtccatcgcgacgctgggtctctacatcgcctacgcgctgcccatcttcttccgcgtgacgacggcgaggaagtcgttcgtcccagggccatttcacctcgggagatgcggcatcgctgtcggctcggtggccgtgctatgggtggccctcgtcaccgtgctcttctgcctgccggtggcgtaccccgtcgccaaggacaccttcaactacacgccggtggccgtcggcggcgtgctggtgctcagcctcgtcgcgtgggtgctccacgcccggttctggtttcgtgggcctatcacaaacgtctgacgttgtttgcaggctttcggtagttactttcgatgcattttatgtagtgtcaatctgttttaatgtcattgaacataaacatgaatatgaatatactcctatacacaggtattgtggttggaactgg

SEQ ID NO: 27717 - DNA, 1859 bp, Zea mays
  Clone ID: LIB4739-001-C8_FLI
ctcgaggccggcccctcgggtacaagtagtatagaacctgcctgccctgccctgccctgcgctccgatgaccggaggcgggttcgccgtggcggagggcggccacgcgcgcgacgactacgggggaggcgtcacggtcttcgtcgtggtcacctgcctcatggccgcctcctgcggactcatcttcggctacgacattggcgtctcaggtggcgtgacacaaatggagtcgttcctggcgaagttcttcccggaagtgtcaagcgggacaaaggacgcgaagcacgacgcatactgcaaatacgacgaccagcggctcacggcgttcacctcgtcgctgtacatcgccgcgatgctgtcatcgctggtggcgagccgcgtgacgaggacggtgggccggcaggccgtgatgctgatgggcggcgtcctgttcctcctaggctccgcgatcaacgccggcgccgtcaacgtcgccatgctcatcctcggacggatgctgctcggcttcggggtcgggttcaccacgcaggccgcccctctgtacctcgcggagacatcgccggcgcggtggcgcggggcgttcaccgcggcgtacagcatcttccaggtgctgggcgcgctggccgccaccgtcactaactacctgaccaaccgcgtcccggggtggggctggcgcgtgtcgctcggcctcgccgccgtcccggccgccatcgtcgtcctcggcgccctgctcgtcccggacacccccagcagcctcgtgttgcgcggcgacgccgacggggcccgggcctcgctgcagcgcctccgtggcccgggcgcggagaccgacgcggagctcaaggacatcgtccgcgccgtggagcgcgcgcggcgggacgacgagggcgcgtacgggaggctgtgcgccaaggggtacggccactacctggtgatggtggtggccatcccttccttcttcgacctcaccggcgtcatcgtcatggccgtcttctcgccggtgctgttccggacggtcgggttcagcagccagaaggcgatatttgggtccgtgatccttagcctcgtcaaccttgcctcgtcattgctctcctccttcgtcttggaccgcgccggccgcaggttcttgttcatcgtcggtggcgcggcaatgatgatttgtcagttggccatgtcgtgcatcctggcgggccacttcggcaagcagaacgcggtgacgatgccgcgggactacgcggtggccgtgctggtgctcatgtgcctgtacaccttcagcttcggcgtgtcgtgggggccgctcaagtgggtggtgccgagcgagatctaccccgtggagatcaggtcggcggcgcaggcgctgacggtgtccatcgcgctctgcctctcattcgcgcagacgcaggtgttcgtctccctgctctgcgccatgaagcacgccatcttcctgttctacgccggatgggtcctcgtcatgactgccttcatcgccgcgttcctgccggagaccaaaggcgtgccgctggaggccatgcgcgccgtctgggcggggcactggtactggaggaggttcgtcagggacgccaagcaggaggttcaggtgaactgcatgtagggaaaagtaaagagtggtaaaactcaagtgtttgctggtaaattatgatggttcagtgtgccgttagcctcgggctccctcgacacaaaatatcctgtctgcctagagcgcgtgcgcgggagctgggaggtctcgcttcgcctaactgggccacaacggactgtcgtgagagcccaattaaagttttcggccagcgtaacgattgcaggattatcttggctgtttttaatatctttttcctactgaacatc

SEQ ID NO: 27718 - DNA, 2595 bp, Zea mays
  Clone ID: LIB4739-001-E11_FLI
ccggggtctttgaaaccaataattgaagtaatctccaaaggttcagacttcagaggtgctcttggcttcaaggggcggctgggtgagggcagagctctcaactaaatgcccaaaggatatatccagcaaaaggacagaatgaaagtggtctctatacaccttgctgctgctgttgttgctgttctacttctgttggcggcaaagcgcacccctgctattgcggttcctagccctcaatgccaatggcaatgcggcggcgttgacattgcgtttccgttcggcatcggtgacaactgctcgctatcagcaggattcaacctcagctgccaggaggtccaaagtggcgtctacaggccattccaaggtaatattgaggtgctcaacatctccttgataaatggcacggtccgggagctgaaccccgtctcgacatactgctacgactcctcctctggttccatggagcccagtacctggtcattcgacgcgagcagaaccccgtaccggttttcggacgtccagaacaagttcaccgtcatagggtgccagaccctcgcctacatcacggacaacaccgacaagagctaccagagtgggtgcgtctcgacgtgccagaatgtgtcagacctaacggacggatcctgctccggcatgggatgctgccagacagacatacccaagaagatgggcttctacaacgtaagcttcgaccctgcctccgacacaagccaaatctcacggctgggcctcggcagctgcagctatgccgtgctgatggaggcggaggagttcagcttcagcaccacgtacatcaccaacacgacagctttcaacgacaccaacagtgggagggtgccggtggtgatggactgggcgataagagatgatggcgcgccgtcgtgtgagctcgccacaaggaacgagacgggcacttacgcgtgccgcagcggcaacagcaagtgtgtggaatcccccaatgggccagggtatctgtgcaactgctccgatgggtacgaaggcaacccatatctttcagatggatgccatgatgtcgatgagtgcaagaagaacaacagtccatgcccttcagtaggaggtgtatgccacaacacggtcggagcgtacaggtgttcttgtcgagcaggaagaaagcttaacaagcaaaacaatacgtgtgaccctgataccacattaataacaggggttacaatcggcttccttgttctcgtaatcttctcctccttcggatacatgatcctccagaagagaaaactgaaccaggttaagcaagatcattttcggcagcacggaggcatgattttgttcgagaggatgagatcagaaaatggccttactttcacggtgttcagtgaagctgagcttgtaaaagctacagacagctacgacaagagcagaataattgggaagggaggccatgggacagtctacaaagggatagtcaagggcaacgtgccgatcgcgattaagcgatgtgcgcttattgacgagaggcagaagaaagagtttggtcaggagatgctgatactctcccaaatcaaccacaagaacatcgtcaagctcgagggctgttgcctcgaagtggaagttccaatgctggtctacgagttcgttccaaatggcaccctctacgaactcatccatggcaagaaccaagcgctacagatccccttcagcaccctactgaggatcgcccatgaggcagcagagggcctcagttttctgcactcgtacgcgtctcctccgatcatccatggcgacgtgaagagcgccaacatccttcttgatggcaactacatggccaaagtgtcagattttggggcctccatactagcgccgtccgacaaagagcagtatgtcacgatggttcaaggtacctgtggatacctcgaccctgaatacatgcagacatgccaactgactgagaagagtgacgtctacagcttcggcgtcatccttcttgaggtcctcaccggccaagagcctctcaagttggatgggcctgagacgcagagaagcttgtcatcgaagttcctgtccgctatgaaggagaacaatcttgatgcgatcttgccgagccacgtgaatggtggacaagagagcaatgaattgatcagagggctcgcacagctagccaagcagtgcttggacatgtgtggctgcaacagaccatccatgaaggaggttgccgatgagcttggtagattgaggaagctttcgctgcatccttgggtacagatcaatgcagagatgatagagtctcaaagccttcttagtgggacaacgactgctagctttgaaatagaagttggtacaactgggtatcctacacaggaagctgagaacctgcccatgaacccaagaagttcgtactatgcgaggtaggtgattagcgtatgttgttgtgtactccgttgaaatttctgctgctaggataactgcaagctagcagttctgctatcaaagatatactgcatattgacacaaagctctgccgcctatctttagccattcaagtatgtatatgtgtttctgcggagcacgtctgcaacatatataatacggtctttttttaag

SEQ ID NO: 27719 - DNA, 1442 bp, Zea mays
  Clone ID: LIB4739-002-D2_FLI
ccggggaggttctccagacccccaaccaaccaaaaccctatccgccgcccccgcccccgcccttggctgaggacatgtatccaccgctcggggacgcataggttgtgttacgagtgggagaaagcttcttcagtacgtgctgatctctccgccacacctgcacaggagtggccatagatcgccggaacgcgcctccgccgccggacgcggcggcggagaaggatgagagcacccagggtctacaactcccggaggacatccgctgggagcggctcgacaaggcgcgcttctttgtcgttggcgccgggctcttctccgccgtctcggccgcgctctaccccgccgttgtcctcaagacgcgcctccaagtcgcccctgcggcggcggcggctgagtcagcagcgctcccgctctccgccgtcgcggcggcgactgccatcctgcgccaggagggggccctcgccttctaccgcggcttcgccacctccctcgccggcaccatccctgcgcgcgcgctgtacatgggcgcgctcgaggccacgcgctccgccgtcggcccagccgcgctcagcttcggcgccgcggagcccgctgcgtcggcggcagcgggtgcagtggcgggcctcgccgccgccgtcgccgcgcaggtcgtgtggacgcccgtcgacgtcatcagccagcgcctcatggttcagggcaacccctgtcctgcctcccgctaccatggcggccttgacgccttccgcaagaccgtggcttctgacgggctacgcggcctgtaccgtgggttcggcatgtccatcctaacctacgccccctccaatgctgtgtggtgggcaacttattcactgtcgcagaagataatttggagtggaattggctgctacttgtgcgattatggtgttggtgtccaggaaattgatctcggtgatggggattctttgctgcagccaggttgcaagactgtcatggtagttcagggagtgagtgccgcgatggccggtggtgcatctgcgtttgtgaccatgccactggacaccatcaaaaccaggatgcaagtcatggatggggacggtgagccaattacggtggggaggacagtgcgtaggctgatcaaggaaggtgggttggctgcttgttacaggggcctaggcccgaggtgggcgtccatgtcattgtctgccaccaccatgatcaccacctatgagttcctcaagcggctctcagacaagggccaggggagtgatcttgcatgatgtttgataaccagtatagacaacaagtgatcaggtgcatttgctttgtttctttatcgtttcatttccagcatgttatgtgttgaaaaaaatggtgggctaatgtttgtagataatttttgtttgctcttataatcgagttttccgacatggtgcaatttatgttggttatatattgtagttctc

SEQ ID NO: 27720 - DNA, 2182 bp, Zea mays
  Clone ID: LIB4739-002-E2_FLI
aaaggccttccatttccactccccgtcgtgtcccttcctccctcttcctccggagctgcgaaattttgagacccagccgggaaagcggaggcggagactacccaccccaccaccagccccctggaattcgcgcaaatcacagaagctccctagccgccggcgagcactcgcgggcgcgcgcgcccccggcggcggcggcggagccctcctctctgccggcgccggcgatgggcaactcgctggggtgctcggcctccggcgagcggctcgtctcggcggcgcgcgacggggacgccatcgaggcgcggatgctgctggagctcagccccgcgctcgcgcgctactccaccttcggcggcctcaacactccgctacacttcgccgccgccaagggccatctcgacattgtcacgatgctgctggagaaaggcgctgacgttaacgcccgcaactactgcggccagactgcgctgatgcatgcttgtcggcatgggcactgggaggtggtgcagatgcttcttctatttagatgcaatgttactagggcagattacttgagtggtcgaacagcactgcattttgctgcacatgatggatttgttcggtgtattagacttttagttgcagactttgtcccgagtgtggccttggaggatattgcttcttctgtggtggatggtggtgattgccagacaaacagtgggagcagtcctaattcatcgtcggggcagaagtttaatgaatcggcccgtgtgaggtacatcaacaaacctgcagatggtggtgttacagcacttcacatggcagcattgaacggtcacttagattgcatgcagttgttgattgacttgggcgctaatgtctcagctgtctcattcccctatggcactactgcaaatttgataggagctggcagtacaccgttgcattatgcagcaggtggggggaaacaagaatgctgtgagctactaatatcaaaaggcgctagcaggttgacactcaattgcaatgggtggcttcccgttgatgttgctagaatatttggacggcgctctttggagccattactttctccaaattcacactcgaatgtccctgtatttcaaccgtccagttatcttgccttgccactcatgagtatacttaatatagccagagaatttgggttgcagcataccacaccctcgattgatgataatgatctatgttcagtttgtctagaaaggtcttgttctgttgttgctgaaggttgcagtcatgaattctgcatcaaatgtgctctctacctctgctcaaccagcaacatccgtgtcgagttcacaggcccacctgggtccatcccgtgccctctttgtcggaacggcataatgtctttcaccaagttaccaagcacaccaacagaagggcttaaatcaggttcagcgctcacattctgcaacccatgcatactgaacacccggtccatggactcgccagccactttctccaaagccgaaatcagacggaaccgtgtggcagctgtctcttcggagctggtctgtccaatcacctgcagcccattcccgtcgtccgccctcccaacctgcaggtgcagcgacgacgatccatgcggcgatacagacgtgcaggatggtcccgagttccagtctccccggccctcgcacagcgcaagcatggagctggacaagaggggggagggggatctagaccgggccagctgctcaggcatgttctggagccgaagaagctgccacagggagcagcagtgtgatgcggagatcaacgcttgattctttatctatggttctgaattacgttgggattcgtagcagctccaacgcgggagatgagcagcggttgttttttccgccccagctatgttccttcctcctatctacagccaatgttttcttgattggtgaaatgctgctgcgtcctttgcagccgtagagtgtgtgttgtaacagttttgttactatggttcatgtgtacgtgtgaatctagatagccttcgaagttgctagccagttacggttctttgtagctgtatgtaaattgcagatctggatggaattactttctgtccctgatgataaatatttatatacaacgagtgaagtaccctctaaggccatctccagcggagctggatgtgagcttgtaaaatattgctttgaattgt

SEQ ID NO: 27721 - DNA, 1953 bp, Zea mays
  Clone ID: LIB4739-002-E6_FLI
ccgggagatgcttcttaatttaatagcagtggcggttgcactcctcccacgacggtggccatagtttagtcgcagcagtacaggctccacttgggagcgaggacgaggaggcgggtgccgctcctgtggcttcgccatgtgctctcgccccgcgtcctcggctcctccctcctcggtatctacatgccattatgccaagatctcccactctccgactccgatctgaccagggccgggccaccgcagccatttgcgtctgctcttcccgaatccctgtctcgctttgccctccgtttctccagctataaagccggggggtcctgtggcgtgtgacctttttataccggatgtgcagcgcagggtcaacttcgtcaggcttcttggctccaacaaccttccttggtcactctaaactgtaaagagatggggtgtggcccatcgatccccgacaagtacacgataggtgggaaggggcgcaagcgccggagcgtcatacaggaggttgccgtgttcgtgcccaccatccgcatcccagtggcctctgacatagctcatccactcaggggaatagtttccaaggatcttgtcgaccgactctccacactccgtgcccatgtcgcctcgctggctgaagaaatctatcacgcggacgtatcagctgttcaagaactgcagcatgcgctagaggagtacttgccagttgttcttggtttaacaacgaaagagagccgccttgaatcgtcagtacagttcagatggaagaccttagacgacgaccaggagtgttgtctggcgagcgcgtggtatgaggtgctctcggtggtccacatgatggccatgcttgcgttgtttgaggctaacctattgctcatcccaaagaacagccaaggtggtggtgaaaggaaggtagcagaagacgcaaagaaggatgtcgtcgattcgttgctcagggcgtcgggatgcttagactactccgtgcatcgcatacttgttcagatacctgcgcaagtcaagaagggttttcccagttacttgcaggagggcatgcttgaggccatctcaattcaggcattggctcagtgtgtggaaatacagcttggcttggcttctgaatgtgagaaggcaacgctgtcagtaaagaggaggctagcttgtgagcaagtcagctatttttctcaggctcactattgtctgtcgggatgcgatacgagtgactcgtacgggaagaagcttctgctgttcctcaagtggaagtggatggaggccaaggctgtagcgtattactaccatggtctggtgctcgacaagggcggcgaaccggcaaaccataccagtgcagtctgctgcctctctgcagctgatgacctgctctcagacagcaaaagggcttgcttgagtttttgcttggcaaatcctgtcacgagggtgcctcctccttggggtgtcatgaaaaacatgcacaaaaagatcccagatgtcgctaacaagaagttccaagcgcacgggcatctgtttgagcaaaacaagaacagcgcactccaatccgttcctgacctaccagagtttgcgctgtcgctgagaccggatggatacgagttgccaatcactgattcgatctgggagaatgttgatggccaacctcagattcaaagcctcaaggagcatatgatagatgacgaagatgaagtaggcacaaaatgatagttctcacttccaaatgcttcttttcattgtaccaccaaaagtagcagatttcaaaaacgcttaatccaaaatgttttggattcagcatatggctcaactttaaaaaggaatcgcgatctctgtattattgcaagtattaccatatgatatagtaaagtcttgatgtgtaatagaatcataaataatagttggtttcttgctgtaatcgcctttaattttattttcccaactggcagaatagagcatcac

SEQ ID NO: 27722 - DNA, 1455 bp, Zea mays
  Clone ID: LIB4739-002-G1_FLI
ctcgaggccggccgggaaaaaaaaaaagcatctcgcgggatcggacccccagcgccgccgaccgccgtcctcactccctacccccccacgccgccacacgaaccacctgagctccctgcgccactaccctcggcctgccgccgcacgcctcccgcgctgtcgttgtaagccctagccctacgctccccgatacgccgcacgcctcccgcgctgtcgttgtcagccctccgctccccgcgacgccgcccttggctttctgcccaccgacgtatcgacagcgccgcgtccgccccacttttccgttcgatttggtgggccgaggtctctcgctcgtggagtcgtagtacagcgcttcccgcacggcgatgtcggcgacgccgctgcccccgccgggccccgatggcgcggtggcgctcctgcctccgccgggtacggacatgactgggatctgcttccgcgaccagctgtggctcgacacttacccgctcgatcgcaacctcgtcttcgactacttcgcgctctcccccttctacgacatcacctgcaacaacgagtccctccgatcgcgccaaatccaccccctcgacatgtctcatctgacgaagatgaccgggatggagtaccttctgagcgaagtgatggagccgcacctatttgtgatccggaagcagaagcgggagagccccgagaaatctagccccatgctcgcctactacatccttgacggctccatctaccaggcgccacagctctgcaacgtcttcgcctcacgcataagtagggctatgcatcatatatcaaaagcctttaccatagcatgttcaaagttggagaagattggaaacgtggaaaccgagcccgatgcagtagcctctgaatcaaagacccaaaaggaagcaatcgacctgaaggaactcaaacgaattgatcatatcctgtcatccttgaaacggaagataggggctgctcctcccccacccccttatcccgagggctatgtcccaccatcagcagaacaagagaaagcgtcggatgatgtggcagcatcagaggcaccgcctcaacttgaccctatcattgatcaaggtccttcgaaaagaccaagattccaatgaaagatttgtagcttaaacctgctgactcgacaacttcctgtatgctttaaagtcgccgacgtggactttataaatccattcttgctggttggttatttacaggccaaagacagaactaacctcgtggcatgatatctcgttctctgagttactagcttgaatcttgtagattggccagtgccatttgctccgggcttgtaatcttgtagataggccagtgtcatttgatctggtctatctacttagctatcataacttatgaggtggttatagttttgccttggtgcaaatctgcaagactggacatctcatacattatttactatgcatacttacgtgt

SEQ ID NO: 27723 - DNA, 2220 bp, Zea mays
  Clone ID: LIB4739-004-D8_FLI
ggacgaacctgtcccgcgaggagtttagcgaagggcttttaaaaagagaaaaagggagaaaataaaggcgagagaaaaaaaactgcggagaggtagcggtggatcgaaaccctaggcgcggtcggcggcgatggcggcggcggcagcagcggcagctgcagcgcctgagtcgtacatcgggagcttgataagcctcatgtcgaagagcgagatccggtacgagggcgtcctgtacaccatcaacaccgaggagtccagcatcgggctaaaaaacgttcgctcatttggaactgaaggtcgtaagaaggatggccaacagattcctgccagcgacaagatatatgagtacatactctttcgaggaagtgatataaaggatttgcaagtcaaatcatctccaccatctcagtcggcaactttacacaatgatcctgctattattcagtcacattatcctcatccagcttcgctttctacaagtttgccttctgctgcaagcacaataggagccaaccctacttcacagaatgctccatctttgattcagatgccaccgccatttcaagggaatttgcccccttaccagtctggcaccagcttacagtcatggaactcagcacctatgccatcatctgcaaatggcactggccttacaatgccaccaatgtactggccaggatattacacaccaccaactgggttttctcatctgcagccaccactcttccttaggccaccccacagtttggctgttccacaggtcctgcagcttcctgtacaatatcctggacttggatctttacctgctggatttccaaatatgccggagcttccttctttccttcaacctggtaacagtaatagtttaaatcaaacttcaggtgtacctacatctgtgtcaacgcctgcttcattgagtacatcacaaactgaatcatcaagaagccaactgccaaataagttttcatctgattcagcttctgtattttctgtgggttttactcctccatctgtgactccttcagtttcgacagttgaaccttccattcctgtgtcagcagtcttgccttctctggtgaacagtaagccagtagctctacctgactccaccatgccatctctctccactgccaagcctgtgattgtacctgatgcttcagtgcttacctatctatcatctcagccaccatctgctaatgatgtttctccagtcaatgctgcggagcaggttccattggtaacccctgggcaacttctgtcaactacttcctctacaattatatcatctcatgccttgcaaactgcttctgctgtggatctgtcctctaaggctgccccctctacagttccatcttctcaggctacattgtttgaaggttcaaccacacaggttgcctcctcttctattttgtcacaacaggtggcaatgacaaatgaaagtaaagtagccaagcagcgtgagtggaaggcaaaacaaactgtggttgatagacccggaaataaggagcccctattgcctgaaccaaagtcggtgtttcaaaagtctgtaggagtttcctcatatgtccggtacaacagtagaggtcgcggaagaggaagaggccgtgggcaatcgcatcccataaccaagttcacagaggactttgatttcatggcaatgaatgagaagttcaacaaagatgaagtatggggccatcttggtaaaagaatagggcagttaaatgatgaaccaaatggttacgaagatgatgttatagaagatgatgagatatctcctagaaagccagaagctaaggctgtgtatgttaaagatgacttctttgattcactctcttgcaaccaaattgacaatggagggaggaacggaagagtgaaattctctgagcagaggaaaatagacactgagacctttggtgactcagcaaggcatcgaccaatgggcatccgaggtaggggcccccgtggcggcgctcgtggtcgtggctattatggtattagaggatatggatatacgggtagggggcgtggctactcttacccaaatcaccagccgtgatacctcggtgtctggaagcacactgaatggcaatggtaaattggccaatttgcgtggtaaaactgagatttatcgcagattacagtgctgctgttgtaagtgtcttattagtttgtttactgatgtggttggtaattcaagaatcaacgtctcttttattgaat

SEQ ID NO: 27724 - DNA, 1797 bp, Zea mays
  Clone ID: LIB4739-004-E9_FLI
ctcgaggccggccgggatggaccgcggaccgtccgcagcgcatcacaagcaatcgatcgagctgggtcgaagaaacttcaacacacaacatacgtatacagtcagctgctgcagtacagtaggagctagatcgagctagcatggcggtgaaggtgtgggtgttcgccgtggcactgatgatgtgcgctggtgtaggccttggagctgacgacgacgacggcagccgccttattagccgctgtcgtctgagctcgcccaactaccgcggcgccctggcaaaggccatcctcttcttcgaggggcagcggtcggggcggttgccggcaaaccagagagtcaggtggcgcggggactcggcgctcaccgacggccaacccgaaaacgtgaacttgacgggtggctactacgacgccggagacaacgtcaagttcggtttcccgatggcgttcagcgtgaccctcctgagctggagcgccgtcgagtaccgcgacgaggtggcggcggcgggtcagctccgccacctccggtccgccatccagtggggcgccgacttccttctccgtgcccacaccacgccgaccaccctctacactcaggttggcgacggcaacgccgaccaccaatgctgggagcggccagaggacatggacacgccgcggacgctgtacaagatcacccggagctcgcccgggtccgaggccgccggcgaggcggcggcggcgctcgccgccgcgtacctggtgttcagggacgaccgggacaagaccttggccacgcagctcctggccgcgtccagatccctcttcgacttcgccaacgactacaggggatcctaccagatgtcctgcccattctactgctcctactcaggctaccaggacgagctccagtgggcgtcggcatggctctaccgggcaaccaaggacagcaagtacctcgacttcctgcagaacaaccagggcggcagcgccaccgagttcagctgggacaacaagtatcccggagctcagctgcttgcaacacaggagtacttggctggaaggacagagctggaaggctacaagaggggcctggactcgttcgtctgcgccgtgatgcccaacagcggcaacacgcagatccgcaccacccctggagggcttctcttcacccgcgactccgttaacctgcagtacacaaccaccgcgaccctgctgctgtcgatctacgcgaaggccctcctcgcttctgcagcaggagcagtccagtgcagcgccgcgagcttctctccggaccagatcagttcatttgcgacgtcacaggtggactacatcctgggagacaaccccaggagcgcgtcctacatggtcggcttcagctccaagttcccgaggcgcatccaccaccgcggctcctccatcccgtccatcaaggtcctcccccggaaggtcacctgcagcgagggcttctcgtcgtggttcccgacggccaaccccaaccccaacgtccacgtcggcgccatcgtcggcgggcccgacgggaacgaccagttcggcgacaacagggaggactccacgcactccgagccggcaacgtacatcaacgcggcatttgtgggcgcctgcgctgctgcactggggcgcagccagcccgacgacacagcctcagcccacagtgatgttatgtaactagctagaacggaggagtatgcaagggcgggcaaccaaaccatgatatcgccttgtaacatccccaaggcccctacccccactaccactcttgatcatcctgataagataaataaataaatacaatggc

SEQ ID NO: 27725 - DNA, 1668 bp, Zea mays
  Clone ID: LIB4739-004-H3_FLI
ctcgaggccggccggaaacgtggggaagatggagacaaagaaacgcaagcctgtggtctactaaagacgggggcatcgccatcgagggcaaacggaggccacaggattagcagcttctccgaactcccctctcgtgctgctgcgtctcctcctcatcgtcctctccagtgtccagctcggccatggcgttcaccgtctccttctcccccgccaacgttcagatgctccaggctaggagtggccacggccacgccacctttggaagctgttccgccgtgccaagagccgggccaaggctgcgctccacggccgtccgggtcagcagcgagcaggaggcggcggcggccgtcagggcgccgtccgggaggaccatcgaggagtgcgaggccgacgccgtcgctgggaagttccctgctcccccgccgctggttaggccgaaggcccctgaaggaacgccggagatcaggccccttgacatggcaaagcgcccccgtcgcaaccgcaaatcacctgctcttagggctgcattccaggagacgagcatctcgcctgctaactttgtgctcccattgtttatccatgaaggagaagaagatgctcctatcggagctatgccagggtgctataggcttgggtggaggcacgggctgcttgacgaggtttacaaggcccgcgatgttggtgttaatagtttcgttctctttcctaaagttcccgatgcattgaagtctccaacaggagatgaagcgtacaacgataatggtctggttccacgtacaatccgcttgctcaaggacaagttccctgatattgttatctacacagacgtcgcgttagacccttattcatctgatggtcatgatggtattgtgagggaagatggtgtaattatgaatgatgaaacagtttatcagttgtgcaaacaggctgtttcacaggctcgtgccggtgctgatgttgtcagccctagtgacatgatggatggccggattggagcacttcgctctgctctggacgccgagggcttccacgatgtctccattatgtcctacaccgcaaagtatgccagttcattttatggccctttccgagaagctttagattcaaatccaagatttggagataagaagacgtaccagatgaacccagccaactacagagaagccctcatagaaaccgcagcggacgaggcagaaggagccgacattctgctagtgaaaccgggattgccgtactaggacatcatccgactgcttcgggatcattcagccctaccgattgctgcttaccaggtctcgggcgagtactcgatgatcaaagccggcggggccctgggcatggtggacgagcagaaggtgatgatggagtcgctcatgtgcctgcggcgagccggcgccgacgtcatcctgacctacttcgcccgtcacgccgccgcggtgctgtgcggcatggggcccaagtaggaggcgaggcccgcccgccattcctgccctgcactgtcattgtggagttgagcgatgagttggcttatcgtatgttttgggggcctggcactggcagaggattgtccgaggccttggatctcttccaataatctgcgccgggagataataagttttggagttctcgcatttcccggtactaatcttctgcgtgttgctagtaccg

SEQ ID NO: 27726 - DNA, 2067 bp, Zea mays
  Clone ID: LIB4739-004-H8_FLI
ccgggcccttctcatcctcatcctcagatccgcctccttcaccccactggtcgccgagcagcaaactccattcaccccactggccggcgagcagcaaactccattcaccccactagcaggcgagcagcaaactggagatctcgtcctcacgagcgatggataagaagaccaaggttatagtttgtgttgctgctgcacatatattactgtcatgtcaatgatggctatgattattcattctagaaaaagaaaacgaaatgcaaggaggactgggattacctatgcaccaatgcatgaaagggatagaactagaattgaatatctcaacacaaagatttggagggatgacacaacatgtataaacatgattagaatgaaaagggcttgtttctttcacctaactaaacattttagagagcgtggtttacttcaggacactatccatatgtgtgttgaacaacaagtggccatgtttctaaatacagttgggcataaccttagaaataggttgattggcacgaattttggtagatctggggaaacagttagtcgatgtttcaataaagttcttcgtgcaattggtgagctacgtggggaactaattagaccaccttcattggacactccaaccaaaatagcagggaactacagatgagatccatattttaaggattgtattggagctattgatggtacacatgtaagagccactgttcctagagatatggagcatgcctttcgtggtaggaagtcctatgcgactcaaaatgtaatggcggctgtagattttgatctacgcttcacttatgtgtttgctggttgggagggaacagctcatgatgctaatgtattacgggatgctttagaacgtgtgaatggccttcgcgttccacaagctttggtaattggtcgtatagtccctcatcatcggaatggtggggtcacttatctttcactcacctaatgtggatccgaaggcagagaatcctaatgagatggctacagctggtgtgctttcaagccttcagaatttcctacgcaagtgcctcatagctatcctctcatatggcccaatgccgaagcacattgcatttattatggatggcaatcgtcgatatgctaaattcagaagcatgcaagaaggagctggtcacaggatgggtttctctacccttattgcaagtctgatgtactgctatgaaatgggtgtgaagtacatcactgtctacgcattcagcatcgacaattttaaaagggacccaagtgaggtggaatctttgatgcagttaatggaggaaaaaatcaacgaactcttagagaaccaaagtgtaatcaacaagattaagtgtaagatcaacttttggggtaacttggacttgttatatgagccggtgcggttggcggctgcgaagctgatggcgagcacagctgggaacacagggctggtcttttctatctgcatgccatacaactcgacttctgagattgtcaatgctgtcagtggagtctgtgcggaaaggatggtaatgtttcagagcgaacatattggcgactgcaatggtcatgctgcaaataacggtgtgcgttcagagatttcagtggcagagttggatcgccacatgtatagtgccggatgcccagatcctgatatcgtcatccggacttcgggcgagactcgattgagcaatttcctcctttggcagacaacgtttagtcacttgcagaatccagatcctctgtggcccgagttctcttttaggcaccttgtttgggctatcttgcagtatcagagagtttaccctgctctggagcataacagaaagttggctaagaagcagttgtgattccatgttatttgcaaagaggtatcatgaagggctattaacatcaaacttttccttctcaatttcccggtaatgggaaatgcaaagaagaacatactagcatataaaattatgaatagatcaccatgtaacttaagtgtgattgctaccgtaaccatgtaacttaaccatgtaacttatttgagctcgtacaaatgctgaccactgataatgtctgttggtc

SEQ ID NO: 27727 - DNA, 1487 bp, Zea mays
  Clone ID: LIB4739-005-A12_FLI
acgggcgggggaggagaacacacgaccgcgacggaatcgcgaggggtaggcgaggcgaggcgaggcggcgaccgagggaggagcagtcgagcagagcgtagggggcgcgagggatggacgcgaacgggtgcggggagaatgacgacgcgcgggcgccgctcctggccgggcctgggcggcggcgcaactccgtcgcgtccatgcgcggggagttcgtgtcgcggttgcccaagaaggtgctcgacgccgtcgaccccgagcgcccgtcgcacgtcgacttctcccgctccaagggcctcctcgaaggggagagagagtactatgagaaacaatttgccacattgaggtcctttgaggaagttgactcactagaagaatccaatgaaatcaacgaggatgaggagcttgcggagcaaatccagagtgaatttgctatgaagatatcaaattatgcaaacattgttctcttagcgttgaaggtatacgctacaataaaaagtggatcaattgctatagctgcctcaacactggattcactgcttgatctcatggctggtggtatcctttggttcacacatctgtcaatgaagagcatcaatgtctacaagtaccccattggcaaactgagggtacagcctgtaggcattatcatcttcgctgctgtcatggccactttaggcttccaagtatttattcaggctgttgaaaagctggtagtgaatgaggctccagataaactgaaccaagtgcaattattgtggctatattcaatcatgatctttgcaacaatagtgaaattaggtctgtggctctactgccgaacgtctggtaacaagattgtccgtgcttatgctaaggatcactatttcgatgttgtcacaaatgttgtgggtttggctgctgctgtccttggtgatagattctactggtggattgacccaattggtgcaattgttcttgcagtgtacacgatttcaaactggtctggaacagtgtgggaaaatgcagtatcgctggtaggtgaatcagctcctccagaaatgcttcagaagttgacatatctggctatcagacaccatcctcagattaagcgtgttgacaccgttcgagcatacacctttggggtgctttactttgttgaggttgacattgagcttccagaggacttgccacttaaggaggcacacgccattggagaatctctccaaatcaagattgaggagctacctgaagttgagcgagcattcgttcacctagatttcgaatgtgaccataagccggagcattcaattctcaacaagcttcccagcagccagccttgatccgaacgaatcctgtgtggtagattgtcgtgcagaatctgctgcagttcttgcattggcgtcttgtgctgtatgacaaaactaagagttcaattagttttgtggcggtgagtttaagatcaggcgcatctaagactacgagagatgaaggtgccgaatgcagag

SEQ ID NO: 27728 - DNA, 1719 bp, Zea mays
  Clone ID: LIB4739-005-D3_FLI
ccctcgaggccggcccgggaaaaaaaaaaaggaaacccactgttgcagcgcgagtgtagcaggctgcacacacaaggaaggggacaaccacaagcgcctaagatcccgtcctccgcgtcgagatctttgccgaggcggtgaccgtcgagggatcgccatggcgttgagggcgtcccccgtgtcgcatggcaccgcggcagcgccgctgccgcctttcgcgcggaggaggatggcccgtggggtggtggtggccatggcgtccaccatcaacagggtcaaaactgtcaaagaaccctatacccctccacgagaggtacatcgccaaattacccattcactaccacctcaaaagcgggagattttcgattcacttcaaccttgggccaaggataacctactgaacctactgaagccagttggaaagtcatggcagccacaggacttcctaccagagccttcttctgatgggttttatgatgaagttaaagaactgagggagcgggcaaatgaaatacctgatgaatactttgtttgcttagttggtgatatggttactgaggaagccttacctacataccaaacaatgcttaacactcttgatggagtccgggatgaaactggtgcaagtccaaccacgtgggcggtttggacaagggcatggacagctgaagagaacagacatggtgacctccttaacaagtacatgtaccttactggacgggttgacatgaaacaaattgagaagaccatacaatatctgattggttccggaatggatcctggaactgagaacaacccctacttgggtttcctctacacatcattccaagaaagggcaacatttgtgtcgcatgggaatactgcaaggcatgccaaggagtatggtgatctcaagctggcccagatatgtggcacgatagcagccgatgagaagcgccacgaaacagcctacaccaagatagtcgagaagctcttcgagatggaccctgattacacagtgcttgcgtttgctgacatgatgaggaagaagatcacgatgccagcccatctcatgtacgacggtaaggacgacaacctgttcgagcacttcagcgcggtggcgcagaggctgggcgtctacaccgccaaagactacgccgacatcctcgagttcctggtccagaggtggaaagtcgcggagctcacagggctgtctggggaagggagaagcgcgcaggactttgtctgtaccttggcgccgaggatcaggcggctggatgatagagctcaagcgagggcgaagcaagcaccggttattcctttcagttgggtttatgaccgcaaggtgcagctttaatcaagaacgctaggcaatgtgggcatttactacgtatatcattttcagtcctggggttctctataagaaacagtctctaggttatctagcagggtagaattcaactactcgtggatctcactcggtgcaaagtagtgcaaagtacgctatctgttgttaccgtgcaagctgcagagtttggattactatgtgggcctggtggtggagaggaattctgtggggtgcctgcagccagttatgagtggcagctccatcgcaactgagttgttgtattgaatatgttacaggacctatagtaaccgaaagtaataatatggagtttgtatatcgacaagcttgctttggtgattgatgagaatctgaagtaataatatggagtttgg

SEQ ID NO: 27729 - DNA, 2261 bp, Zea mays
  Clone ID: LIB4739-005-H7_FLI
ctcgaggccggccggggcgccgcctctcgccgggggcggctcacggctaccggctgctgccacccgcgcccgtctctcttccatagtttcacctcgttcgcctggctataaatacccgcatcccgttgctctcgcggcccctccatccctcccgacggcatccccttcccctgccactcgcctccgctccgcgcagattagtattttaaactcaagatggttaacttcgggaagaaattgatggctgatcaaattccagaatggaaaggatattatatcaattacaagttgatgaagaagaaagttaaacagtatggccagcagctccagcagggcgagaaagatcgtcgccgggtcctgaaggatttctcgaagatgcttgatgatcagatagagaagattgcgctgtttctgttggaacagcaaggaatgttggcaagcaggattgaggagttaggaaagcaaagggcaatactacaagaccagccagatatatctggtattgctgagttacgagaagcttatagggaagttggtattgacctcatcaaactccttaaattcgttgatcttaatgcaactggcattcggaaaattttgaagaagtttgacaagcgtttcggctatagatttactgattactatgtgacaagtagatcaaatcacccgtactctcagctgcaacaggtctttaagcatgtgggtgtaggagctgttgtaggagctttgtcacgtaaccttgctgaacttcaagaacgtcaaggaagctacttatctatttatgatcagccatcttctgctcttaaggaccccatcattgatatgataaactccccagttgataagttgacaaggtcaactaattttcttcgctttttggggcaacatgccttgattgtggatgaggagtctcctagtactgcaggagaggaagaaatagaagatcagaaataccatttcatgtcccttatgctgaacctggtgaacacattcctttacatggtcaacacatacatcattgtgccaactgcagatgactattcagatgggttctgcaagagctgtcaatcgccggtacattagtgattgtgtccctgcaagaatacgcatgcaagcttcggcaggattcgttagcgcaagtgcacttggcatggcctgtgggccagcgctagctggtttacttcaatggaaattcaagatctacatggttactttcaatcaatcgactctacctggttgggtgatggcagttgcgtggctattgtatttgatttggctatgggtctcattcaaagaaccgaaccgtgctactgaggtgaatgaagccccacaaaatcctgcttctggacaaacggttgatattggacaagtagagaacggacttgcacagcctctgctcatggattccgtagataaacaaaatgaagatgaagatgaagaagttgatgaaagtgaagaagctgcagatgattcacgcaagcctgcaacatcaattggctcagcatacagactgcttactccatcagtaaaggtccagttgttgatatacttcatgctgaaatacgcaatggagattttgctttcagagtctagtgttatcactaatcactatttcagttggaacacaagcgcagtggcaatttttctagcaatccttgggttgacggtgcttcctgttaatgctgttgttggaacatacatcagcaatatgtttgaggacaggcaactgctcatggtctctcaaattacgttgctagtaggcattatcttcagcttcaaggttacgagtacatactctgttgtccagtatgttgtctcagcacttgtcacatttgtttctgcagaagttcttgaaggtgtgaacctttccctcctatcaagcgtgatgtcatctcgcctctcccgtggcacatacaacggtggcctcctctcgacggaggccgggaccctggcgagggtggtcgctgactgcaccatcactgcggcggggtacctgggcgtggggaagcttctcaacgtcaccctgctaccatccctggtgatatgtgttgcgtccattgcctgcaccttcctgacatataactcgcttttctgatggagcttcacaatgtatttgtgtcatcatgattcgttccatattagcgcaaatcaaggcagctgggagaccgccattgccattgcccgaaggggctattgtattactattattatatgttcgtcgatttgattgctataaattgattgataaaatgattgtagcg

SEQ ID NO: 27730 - DNA, 1983 bp, Zea mays
  Clone ID: LIB4739-006-B2_FLI
ctcgaggccggccggagaacagaggttattcgttttggctacccgttttgaagacgatgatgagtccggcgtcggagcgcagcctcatcatccagagcgacgacgacgacgacgcccgatccggccacgacgtggaggagccggagccagagcaggagcaggactccgactcctcgtcgtcgtcctcatcctgcgccaccccacgccgcggcccaagctcacccccctacatccagcaatggccgcagagttacaggcaatcgatcgacattctcagcagcgtgcagtcacccaacctgagctttctggggactccaactctgagcaggctgtcgaactcattcctcgccatcaccgattctttccggagcaaggcccccgaaacgatctctagctttatcaagccactccttggccccacgccaagtgacgatcagcagcggcagcatgaaggcacccgaaagagttccgagtaccttgtgccctcgagaagatcatctctgcagcagatcccagaggatcaaaagccacctgtaggtggccatggggcgtctcatgaccagaactgctcttacacccagggagtgatgaatggaataaatgttctatgtggtgtggggatcctatcaacaccttatgccatcaaacaggggggctggattgggctggcgatactctgtatatttgctcttctcgcatggtacacaggtgtgctcctgcgccattgcctggacagcaaggagggcctcaagacatacccagatattggccatgcagcctttggcagcacaggccgcatagttatctcgataatactgtacgtggagttgtatgcatgttgcatcgagtatttgatattggagggtgacaatttgtcaaaattattccccaatgctcacctgaccattgggagcatgacactgaactcacatgtattttttgcaatcttgactaccatcatagtcatgccaaccacctggctccgtgacctgagctggctgagctacatttcagctgggggtgtcattgcatcaatccttgtggtcatctgcctattcttggttggggttgtcaatgatgtcggctttgagaatgaagggactgcactgaacgccccaggaattcctattgcaattggattatatggttactgctactcagggcatggggtttttccaaatatctattcctccctgaagaatcgcaaccagtttccttcaattctttttacttgtattgggctgtctacctttttgtatgctggtgctgcagtgatgggatacaaaatgtttggtgaagccacagagtcccaattcacactcaacttaccagataattctgtcatttctaagattgctgtttggacaacggtggcaaatccaataaccaaatatgcattaactattattccattggctatgagtttggaagagctgctgccaccaaaccaacaaaagtattctacaataatcatgcttagatcatctctggtgatatcaaccctcctgattgctctatctgtgcctttctttggacttgtgatggccttggttggttctttgtttgccatgcttgtgacctacattttgccttgcgcgtgttttttggcgatcctcaagacaaaagtgaggtggcatcagatagcagcttgttcgttcatcatagttgtcggggtttgctgtgcctacgtgggaacatactcgtccctgtcgaagataatccagaactacgcatagcacagctgttcctgtgatcctgtatatgcatgtatatgcatctgcccgacaaaatcatgtgtgtgctatatgggccaaacatatgtacaagatgaaagtttaccattcaattcactcgatgtataataaattattggtgccttatcatagggctcaatgatttctactacgattttaaggttgtatggtgcgtgagtaacattgttccttatggtgagaaaaaaagttgatttggtcttcttctagc

SEQ ID NO: 27731 - DNA, 1915 bp, Zea mays
  Clone ID: LIB4739-006-D9_FLI
ctcgaggccggccgggaagcaaaaacagttgactctgaactcgcattgcaagccccttcctgacgaaaatggcagcacttgttcctctgctgctcgcccacctactcctctgcgtccatggcgccaccgttacctcggtcgccacgcctccgcctctcccggtcctgcccgtcccgtcctacgcgcagctccggtggcagctctccgagatggcgcccttccttcacttcgggcccaataccttcacggactccgagtggggcaccggccacgctgacccctccgtgttcgctccctccgcactcgacgcgggccagtgggcgcgcatcgcggcgcagggcgggttcggccgcgtcgtgctcacggccaagcaccacgatggtttctgcctgtggccgtcggcactgaccgagtactcggtggccgcctcgccgtggcagggcggggctggggacgtcgtcgcagagctcgccgcagctgcgcgcgcggaggggcttgggctgggcctgtacctctcgccgtgggaccgccacgagccggtgtacggggacaccatcgcgtacaacgagcattacttgggacagatgacagaattgcttaccaggtatggagatgtagaggaagtttggctagatggtgcaaaaggcgacgccaagaagatggattatatgtttgatgcctggttttcacttatacatcagctacaagaaagggtagttatcttctcagatgctggaccagatactagatgggtgggagatgaggcaggagtcgcaggctatacttgctggtctcccttcaacaagagctctgtgacaattgggcataccactgctgaatactcatccagtggggatccttttggtcaagactgggttcctgcagaatgtgatgtttccatcagaccaggttggttctggcatgcctcagagaaaccaaaaaacgtgacaactctgcttgacatatactacaaatcagttggtagaaactgtctcctcattttgaatgtccctcccaattcatctggcctcattgccgatgaagacatacaagtcctccaggaattcactgagattcggcgtgcaattttctctcagaactttgctgccaatgccactgttacagcaaacagtgtgcgtggtgagcaagataatctgcagtttgcaccatccaaagtgcttgaagacgggatatactcctactgggctccgcaggaaggccaaacctgctgggaaatgctcttcgatcttgggcaatctacttccttcaacttgctccagctccaggagcctatacaactggggcagcgtgttattgagttccatgtggctatccttgtagatgaactgtggcaaacaattgttgaaggcacgacaatcgggtacaagaggctgctactgtttccagtcactgaatctcggtacctgaagcttaccatcgacagtgcgcgtgcagatccacttatctcgttctttggtgtcttcatggatcccttctcgtccatacatagtttgcagaatcatgtcaaaccaccccggacaaatagtaacgaagttacaatgttgaggatggcccatgcttctgtcaacaagagtattgacgcaatgtagttgttgagtgtacatctgtcagtattacttctagtctgccctggtcatttcaacatgccagaatcacttgcacgttgatttgttctttggactggagaagggccactcgatggtgggcaatgtgtgtatatcttcagatttgcttgccaaagctactaatacgagaactactctttctgcaatcatgcatggatatgttgttcccaagatcagctgttgaaacttcatgtagtctgtactagtgtctgttgaattatgtgccagcaggaagtctggggtttgaatgaagtgaacgtgcactctct

SEQ ID NO: 27732 - DNA, 1617 bp, Zea mays
  Clone ID: LIB4739-007-A4_FLI
cgaagccgcgaaccaacacccaaaccgtctgttcccaacagataacaccctcggctgcggcagctgcagcgccctcgctgccggcgcaggtccggcgaggcggccagccaagttctaggcctccgcctccggggccaaccctagccaccactcgcaacgccagaggcggggggcgccatgctgttccaagtgggagggcagggcgcgcgacccaccttcttcgagatgtccgccgcgcagcagctgcccgccagcctccgcgccgccctcacctattcgctcggggtttttgcgctaagaagaccattactacacacagttttggattatgaagacgaattttttgctttgttaatgggtgtccttgagtcccatagcctacggacaacagatggttccttttcagagtcattatatggtctcaggaggagacctgttaaggttgcagtgaagagaaagagtcctggtacagaatccaatgacaaagtctatggttctgctctaaggaagcgccagaaaatcctttcagttgtttttttggttgttttgccatattttaagtcaaagttgcagtctatatataacaaagaaagggaagccaggttgcaggcaaccctttggggtcaggatgatgttagatttgatgaagttggctttgtattagatcaggagcagacttctcaagcacagactgaacctacaactggagaaatgtcaaacttgacacgttttaaaaagaattttgcctcacttataggtgtttgctatccatggattcatgcaactaatgaaggtctctcgtttgcataccagctcttgtatctgttggatgcaactgcattttatagtccagcactacatgtacttgggattcatgtttgtcgtgctactggacaagagctgatggattcatcttctaggatatcaaggattagaagtcgtgaacttgagaggcttcgcggtcctccatggttcaaggctgtgcaacgagtgttccttagttgtgtgtacacaactctagattatgcacaaaccggtttaattgctgcagtcttctttttcaagatgatggagtggtggtatcaatctgctgaagaaagaatgtcagctccgactgtatatccaccaccccctcctcctccaactcctaaggttgccaaagacgggatttcgttgccacctgacaggacgctctgccccctgtgctgccagaagcgtgctaacccttccgttctttctgtttctggttttgttttttgctacagctgcatattcaaatctgtctcacagcataaaaggtgccctgtcacgctaatgcctgccggcgttgagcaaatcaggcgtctcttccacgatttgtagccatggaagacccgaaaacttcttttctaaagaccagggacgtcagcaactcagcatacagaaacatatatcagaaccaccattttgtaaactataagaaactcagcatacttttttaagcaagctggagtttgagcttgacagtcttaggttgggggtgtataatctgttgttaggtgatactagcatatccattgagataggcattaactgtatacctgcatgactgtgtacccactctcttcatttgtttgt

SEQ ID NO: 27733 - DNA, 2056 bp, Zea mays
  Clone ID: LIB4739-007-B4_FLI
acctcctgccctcctataaaagccgcccgcctccgtttctcgcccgcaccgcatcacctcgccgctgttccccgcaacctatcgacccaatctcgtccgacccggcgcgtcgtcccctccagatctccgtcgccctctccaggtagcagaaactgttctgctgcagtctgacaaagtggagggcttaggagcttctgcttcttttatgtctgaacaatctttgctttatttgggattgttgggagagtactctcgtgcaacgaggaaaaggcacaaggttccgtcccactgcatgcgtcaagagcctgtctggttttcttgttctgatttgtcatttgctggtgctcagagccggcttggtttcctcgaaggatcagcaactactcttgattgtggactttgtcacatctgatatcaacttcatagatttttatccaagatggcgctgcaaaacattggtgcttcaaacagggatgatgccttctacaggtacaagatgcccagaatgattactaagatagaaggccgtggtaatggtatcaagacaaatgttgtgaacatggttgacatagcaaaagcacttgccaggccagcttcgtacaccaccaagtactttggatgtgagcttggtgcacagtccaaattcgatgagaagacagggatttccttggttaatggggctcatgatactgcaaagctggctggtctccttgaggtattcatcaagaagtatgtccaatgttatgggtgtgggaatcctgagactgagattctcatctcaaagacccagatgatatcactgaaatgtgcagcctgtgggtttgtctcagatgttgatatgagggacaagctcacaaccttcatcctgaaaaacccaccagaacagaagaagggcggaaaagacaagaaggccatgaggagagctgagaaggaacgcctgaaggaaggtgaggctgctgatgaggagcagaagaaactgaagaaggatgcaaagaagaagggttccaaggattccactgctaagggtttgaagaagaaggctactactgctactggctctgatgaggaccactcatcctctccaactcgcagccatgatggtgacaaagcagctgcagatgatgatgacgatgatgtccagtggcagactgacacttcaattgaggctgcgaagcagcgcatgcaagagcagctgagtgcagcaactgctgaaatggtgatgctgtcgactgaggagactgagaagaagatgaaacaggcaacccacaaagatggaagcactaatggttcagcaaaagaaatccctaatgacaagcctgccgtcactaagcctagtccctatgaagaactgattggggacatcaaggctagcctaggaagtgctccgacccctacccagctcaaggctgtgctggcctcatcaacccttcctccccaggacgtgatgaatgctctcctggaggctctctttggtggtgtgggtaagggattcaccaaagaggttgtgaagaacaagaagtaccttgcagttgctgtgccagatgagggtgcccagacccttctggttcaggccattgaggcttttggtggtaagtgcaaccctgaggcgctgaaggaggttcccgttgtcctcaaagccctctacgatggagatatcctggacgaggaaaccattgtggactggtacaatgatgctgtcgcagctgggaaggactcccaggttgtcaagaatgccaagccgttcgtcgagtggctccagagtgccgagtctgatgaagagggtgacgacgagtgaagaggccacactgctctactgctaatggccgaacttgataatattatttcaataagtttgttttgcttgcctggtgtgtcggtgtttaaaactgttaattgtcgtgtggcgcagcatactcttatgtggctgcatgtgtcgtcgtcagtttggttgtctgttgggtgtcacggtttatatcttcttatggattgctactatacaagtatttgtttcggatgtgttgtataacctttcggggtgtaacattttattattgcg

SEQ ID NO: 27734 - DNA, 2811 bp, Zea mays
  Clone ID: LIB4739-008-C3_FLI
ggccggccgggaaaatgggggttgtgtggccatgtctggcgcctgctgttcactctccaatctccactcccctgcttcccacaccggacaccggagctcactcgaggacgctgtacgagcagcagcagcatacataaggcacggcagctgagctggctcctccacctttctgtccatccatcacagcttcgagactcgtcctccatgggttctggcggcgtcagatggaaggctctgccgctgtgcctagctctcgtggctctgcaagcatgcctccctgctcgcggggcggctcccaagacttacatcgttcagatggccgcatctgagatgccgagctcgttcgatttccaccacgaatggtacgcatccactgtgaaatccgtgagctctgtgcagctggaaggagacgcggacgaccattacgccgcgaggatcgtctacaactacgagacggcgttccacggcttcgcggcgaagctggacgaggacgaggccgagcggatggccgaggcggacggcgtggtggccgtgctcccggagacggtcctgcagctgcacaccaccaggagcccggacttcctgggcatcagcccggagatcagcgacagcatatggtccgccggcctggccgaccacgacgtcgtcgtcggcgtgctcgacaccggcatctggcccgagagccccagctttagcgacaagggcctcggccctgtcccggccaggtggaagggcctgtgccagaccggccgcggcttcaccgtagccagctgcaaccgcaagatcatcggcgcgcgcatcttctacaacggctacgaggcctcgtcggggcccatcaacgagacggccgagctcaagtctccgcgggaccaggacggccacggcacgcacaccgcggccaccgccgcgggcgcgcccgtgccggacgccagcctcttcggctacgccagcggcgtcgcccgtggcatggcgccccgcgcccgcgtcgcggcgtacaaggtgtgctggacggggggctgcttcagctccgacatcctggcggccgtcgaccgcgcagtggcggacggcgtcgacgtgctctccatctcgctcggcggcggctcgtccccctacttccgcgacagcctggccatcgcgtcgttcggtgccatgcagatgggcgtgttcgtcgcctgctcgggcggcaacggcggcccggaccccataagcctcaccaacctgtcgccgtggataaccacggtgggcgcgagcaccatggaccgggacttcccggccacggtgacgctcggcaatggcgcaaacctcaccggggtttcactctacaaaggccggcgaggtctttcgtccaaggagcagtacccgttagtctacatgggcggcaactcgagcatccctgaccccaggtccctgtgcctggaggggacactccagccccacgaggtcgctgggaagattgtgatctgcgaccgcggcattagtcctcgggtgcagaagggtcaggttgtcaagaacgctggtgccgcgggcatgatactcgccaacacaccggcaaacggcgaggagcttgtcgccgacagccacctcctgcctgcagtggccgttaggcagtctgaaggcattgccgccaagaagtacagcaaaaccgccccgaaaccaacggccacgctcagcttcgacgggacgaagctcggggtccgcccatcgccagtcgttgccgcgttctcgtcccggggaccaaacttcctgaccctggagatcctcaagccggatgtcatcgcgcccggcgtgaacatcttggcggcatggagcggcgacgccagcccgtcgagcttgtccagcgaccgccggcgggtcggcttcaacatcctgtcggggacgtccatgtcgtgcccgcacgtcgccggcgtggctgcgctgatcaaggccagccacccggactggagccccgcgaagatcaagtccgctgatgaccaccgcgtacgtccacgacaacacgtaccggtcgctgaaggacgcggccaccggcaaggcgtccacgccgttcgatcacggagctgggcacatacacccgctgcgtgccctcaaccctggcctggtctacgacatcggccaggacgactacctggagttcctctgcgtggagaacctgacgccgttgcagctcaggtccttcaccaagaactcgagcaagacatgcaagcacaccttcagctcgccgggtgacttgaattatccggccatctccgcggtcttcgcggagcagccatctgctgcgctgacggtgcgtcgcaccgtgacgaacgtcggcccaccgtcttcgacttaccatgtcaaggttacagagttcaaaggcgcagacattgtcgtcgaaccaagcaccctgcacttcacaagctcgaaccagaagctgacctacaaggtgacgatgacaaccaaggctgcccagaagacaccggagttcggagcgctgtcctggagcgacggcgtccacatcgtccggagcccccttgtcctcacatggctgccaccgatgtgagcttcgtttgtgtaccgtgcgtttagagcaagcaatggagcaggaacctctgggcctgggtaatcaagccagagatctgttgtgtcgcagcggcagcggcagcggcagaacaggttcactaaccaacggaaaaatactgtcaaagctccacatgagaaccgcctttattcttcaatgtattcatgcttattccaaatgttcagttgccagtttgattgtttctacattaatgagtgtacaagaaatggaagcaaatagtacggaaaatttgctgc

SEQ ID NO: 27735 - DNA, 2084 bp, Zea mays
  Clone ID: LIB4739-009-E6_FLI
ctcgaggccggccgggaagcaacaaatacatttgcgtagcagacatcgctgcccgtgtctccattcacctcgctgctcagtctgacacggaaccgagcagaaaacccaggccagctcccgataagaaatcctcgagtcgagtcaccccagtcccataggccgtagaccgccatggcgaaccgcagcaagcaggtcgttaccaccgcactgccgctcgcggcagcagcagcttcgctcgccgtcgtgctcctgctgtgctccacgggctcatcggaagacgacggatacctcgggcgcgtgggtgcgccgtggggccgtaccctcacggtcctcccattcagccccgcggacctgctgcccctcctgccgcggggcgtcgccatggccgcgctccgggcgctccgcggcgtctcggacatcttcccggtgttcgtcggcgccgcgtcggccggcgggtcgggctcggtgcccggcagcgggggcacggtgagatggaagggggcctgcttctacgagaacgaggcgtggctggtgttccacaacgagaccgggtccaagtacggcggcggcacgctccatatcaagacatccaaagcacacagctggacttgcatagatctgtatgtatttgcaacaccatacagagttacatgggattactactttttggggcgagagcacactcttgatatcaaagaatgggaaagcgaggctgagtatgagtatgtgaaacgtaatggtgtgtccatcttcctcatgccatctggaacaattggcacacttcgagcactctgggatgtcttccctctgttcacaaatactgcatggggtgagaacgcgaatcttgcttttctcgagaagcatatgggtgccacctttgaggaacgcccaaaaccttgggtctcagagttaaatcctgatgatatccactcgggagatttcttggttttatcgaagatccgcgggcgttggggtggttttgaaacactggagaagtgggttactggcgcttatgctggccatactgcggtttgcctgagggactccgatggaaagctttgggttggggaatctggtaatgaaaatgaacagggagaagatgtcattgctatcctgccctgggaggaatggtgggagtttgaagtgacaaaggatgactcaaatcctcagattgcactgcttcctttgcatccagatctgcgggcaaaatttaatgagacagcagcttggatttatgcaaaaagcatggaggggaaaccttatgggtatcacaatatgatatttagctggattgataccatcagtcataattatccaccaccattagatgctcatgtggttgcttctgttatgactgtatggagcaagcttcaaccagagtatgctgctaatatgtggaaagaagcccttaacaaacggcttggaactaagggtcttgacctttctgaaatcatagtggaatcagagaaacgtgggataacatttgacaagttactatctgttcctgagaacgatagctgggtctatgaagatggtcagtcagcatcttgtgtggctttcgtccttatgatgtacaaggaggctggactctttgaccctattaccagctctattgaagttactgaattcacaataaaagatgcttatatcctcaacttttttgaggacaactcgacccgacttccggagtggtgcaacaaggatgacgatgtgaagcttcccttttgccagatcaagggcaagtaccggatggagctgcctggatacaacaccatgaaaccctatgcccacatgaacgagagatgtccatccctgcctccagattacaacaggactaagggctgctagtgctaaccagatatgcgtgtgcattttattcacgctcccttgtagccattgcttcagctgtaaatattatacatttatactagtataatagtactatgggggtatgtactgcttgcccttgagaagcgtgtattgattgtaggcaacttatgtgagacttcctcgaataaggaagaacatgaatcacacaaatgtacagtaaccatgcttgatctttttatcagtgtttacttatg

SEQ ID NO: 27736 - DNA, 1821 bp, Zea mays
  Clone ID: LIB4739-011-C12_FLI
ccgaggccggccggaaaaaaaaaaaaaaaaaaagttgctgtgggctgtgagatgctcataaccaaaacagcagggtgtgcatggagaccctccgcgcttacgatgagctgtttccatgggccctccttgtcctcgttaccaccattaccatcctctacctgaagcaactgttggtcacagcgttcaagagacgcgccaccagctctccttctctcccatgcccaagaggcctcccgctcatcggcaacctacaccagctggacacggtcccgcatgacgccctcgccgcgctcgccgccaagcacgcagcgccggtcatgctgctccggctagggtcggtgcgcacgctcgtggtgtccaccgccgacgcgctgcgcgccgtgttccagcccaacgacagggcgatgtccggccgcccggcgctgtgcgcggccaccaggatcacctacggcctgcaggacatcgtgttctcgcccccggacggcgggttctggcgcacggcgcgccgcgcgtcgctgtcggagctgctgagcgccccgcgcgtgcgcagcttccgcgacgtccgggagcaggaggccgccgcgctcgtcgccgccgtaacggacatgtccaggagcggctctcccgtgaacctgagcgaggagcttatggcgacgagcaacaagatcctgcggcgcgtcgcgttcggcgacggcggcggggaggaagagagcatccgggccagcgccgtcctcgaggagacgcagaagcttctgggcggcttctttgtggccgattacatgccgtggctggggtggctggacgcgctccggggcctccggaggcggctggagcggaacttccatgagctcgacgcgttctacgagaaggtcatcgacgaccacctcagcaagcgcggtgacgacgacgatgcctccaagtccaagggcgaggacttggtggacgtgctccttcgcctgcacggcgatccggcttaccagagcacgttcaacagccgcgaccagatcaaaggcatccttacggacatgttcatcgccgggacagacacagcggcggcgacggtggaatggactatgacggagctagtaaggcacccggacaccctcgccaaggcgcagaaggaggtgcgcggcgccgtggtcggcagagacgacgacatagtccgcgagtccgacctcccgcggctcaagtacctgaagcaggtgatcagggaggcgatgcgggtgcacccgccagtgccgctgctggtgccccgggagaccatcgagccctgcacggtgtacggctgcgagatcccggccaggacgcgggtgttggtgaacgccaaggccatcgggcaggaccccgacgcgtggggcgccgacgcggcgcggttcgtgccggagcggcacgaggagatcgcggacctcagcgaccacaagccgtggcacgacagcttctcgctggtgccgttcggggtcggccggaggagctgccccggcgtgcacttcgccacctccgtggtcgagctgctgctggccaacctgctgttttgcttcgactggcgcgcgccgcacggcggggtcgttgatctggagcaggagaccgggctcaccgtgcacaggaagcatcccctcgtgctcgtagctcgaagggtacgcgtgcaggcgccaagcgatgatgagctcgacggacgattctccgccatgcattccgttcctagctagttttttttttaacgtaactaaaccggagggagtataatatacttgcatgttgctgtgatccaagtgacgtgtatatatatatgctactatctctgcgtttgtttgttctgttgtg

SEQ ID NO: 27737 - DNA, 2181 bp, Zea mays
  Clone ID: LIB4739-012-E2_FLI
accctcccccaccgccattgctcagcagcagtagtaaagccacgcctgacagacagctggttcatttctggttgctgccttgctggtggtagccctcggcgcaggcagccaagaacagagagagcgagatggatgtgaacgacgtgctgctagtggtgctggcggcggcgctggctgccatgtggtggcgtcggtgctccaagaccggcggtgtcgacggcctcccgccggggcctccgggttggccggtggtggggaacctgttccaggtgatcctgcagcgacggcccttcatgtacgtggtgcgcgacctccgggagaagtacgggcccatcttcaccatgcggatggggcagcgcaccctcatcgtggtcacctcggcggagctcatccacgaggcgctggtgaagcagggccccatgttcgcgagccggcccgaggacagccccacccgcctcctcttcagcgtcggcaagtgcaccgtcaactcggcgccctacggccccctgtggcgtgctctgcgccgcaacttcgtcgccgagatcgtgtccccgcaccgcgtcaagggcttctcctggatccgggagtgggccgtggacgcgcacttgcgccgcctctgcgccgagctcgcggcggacggtgccgtgcgggtcatggccagctgccgcctcaccatctgcagcatcctcatctgcatctgcttcggcgccaagatccccgacgagctcatccgggagatcgaggaggtgctcaaggacgtgatgatgatgaccatgcccaagctcccggacttcctgcccctcctcacaccgctcttcaggaagcagctcaccgaggcccgcgccctgcgccgccgccagctcaactgcctcgtgccgctcgtccgcgcgcggagggacttcctccgcgacggcaccgcggcagcggcggacggcgtggagatgatgagcgggcctggggaagcgtacgtggactcgctcttcgacctggagccgcccggccgcgggaagcgcctcggcgaggaggagctcgtcacgctctgctccgaggtcatgagcgccggcacagacaccagcgccacagcgctggaatgggccatgatgcacctcgtcctcgaccccgccgcgcaggagcgcctctacgacgaggtcgtcgccaaggtgggcaagaccgcccggatcaccgaagccgacgtcgaggccatgccctacctccaggcggtggtgaaggagacgttccggcggcacccgccgagccacttcgtgctgtcgcacgcggcgacgcgggacacggagctgggcgggtaccgcgtgccggcggacgccagcgtggagttctacacggcgtgggtgacggagaacccggcgacgtggccggacccggacgcgtggcggccggagcgcttcctggaaggcggcgagggcttcgacaccgacatcaccggcacccgcgcgctgcgcatgatgcccttcggcgccggccgccgcatctgccccgccgccacgctcggcgtgctccacatccagctcatgctcgccaacatggtgcgcgagttccgctggctgccgcccgccggtgagggcccgccggaccccaccgagaccttcgcattcaccgtcgtcatgaagaacccgctccgggcagccttcgtcgagcgggccacgacggagacggcgacaaccgcgtgacgagtgacgacggaaagtaaaaaaaaagggagagagagagaagttactagtacaagttactctttcactgggctctggctgggtgggtaagttgctgcaacgtgcgtgtcgtgcggggttaattcggtcccgcactctgcggtataaattacagttattaattaattagtccacggggaaggtgcgtgatcatcatatactgtatggatggattgatcggttcatcctacctgttggttggtcgacggatggctggatggacacgtgccgccaggcggatggatggggttcatgggaatgcaacgcacgatgctgtcgtcatatcatattttttttctttagtgtttctatgtgctattaattttaatagtagaagtactgtttcttagctttcaatttctcttttctctgttcaatttcatccaaaagtgtacctacgtactagctattgcatgatcgatgtggtcaatatattggttgtcatctcatgtgc

SEQ ID NO: 27738 - DNA, 2217 bp, Zea mays
  Clone ID: LIB4739-013-F12_FLI
ctcgaggccggccgcacagttccacttcctcttcctcctgcccggcgcgctcccacctcctctcacaatcacaagccacacccatggcgacgacggcccatccggcgctccccttgctcatcgtcctagcatgtgccggcgccgccagcgggttctacctccccggcgtcgcccccgccgacttccgcaagaacgacttgctcgccgtgaaggtgaaccagctgagctccatcaagacgcagctgccatactcctactactccctccccttctgcaggccggacaccatcgtcaacagcgccgagaacctcggtcaggtcctccgcggcgaccgaatcgagaactcaccctacgtgttcgagatgatggagcctaagctgtgtcagatcgcgtgcaaggttgttctgaccgagcagggagcaaaggacatcatggagaaaatccacgacgagtaccgtgtaaacatgattcttgacaacctccctatggtcgtcccgattgagagattggatagagacgcgcctccattctatcagcaaggtgtgcacgtgggcgtcaagggccactacgctgggagtaatgaattcaagtatttcatccacaaccactactcatttctcgtgaagtataacaaggatgcacaaacagatctcgctaggattgtggcctttgaggttaaaccgttcagtcttaaacatgaattcgatggtgattggaaggggaatgcaactcgacttaaaacctgtaatacacaatctgagcatctaatagtgaactctgatgggcctgaagaagtaaaggcaaacaaagagatcattttcacctatgatgttaactttgaggaaagcagtatccagtggtcatcccgctgggacacctacctccgcacgcctgacgatcattggttttccatcgtgaattctctgaccacggtcctcttcctgtctgtgatggttgccatgatcatgctccgaactctgtaccgcgatatttccaagtacaaccagctagaggaccaggaggaggcccaagaggagtctggatggaagcttctccatggcgatgtgttcaggcctcctgccaatgccgacctgctgtgcgtgtacgtgggcacaggtgtacagttctttgggatgctgctggtcaccttgctgattgccatcctggggctcctgtcaccttcaaatcgtggagggttcatgacagccatgatcctgctctgggtcttcatgggcctgcttgcagggtactccactgcacgtcttcacaagatgttcggggggctggaatgggagaaggtcgccatcaagacggtcttggtattccctggagtcgtcttcgtgatattctttgccctgaacatgctcctctggggcgtgaaatcatctggggctgtgccattcaccaccatgttggcactggttttcctgtggctcggaatctcaatgccactcgtcttcgtcggcagctaccttgggtttaggaagcctgccatacagggcccagtgaggacaaacaagatcccacgcctgataccgcagcagccatggtatatgaacccagccgtctcggtgttggtcggaggtatcctaccctttggtgcagtgttcatggagctcttcttcatcctgacaacgatctggatgcaccagttctactacatcttcgggttcctgttcctcgtcttcgtgatcctgatagtgacctgcgccgagatcaccatcgtgctttgctatttccagctgtgcagtgaggactaccagtggtggtggaggtcctacctgacacccggctcgtcggctctgtacctcttcctgtatgcagcattctatttcttcacgaaactgcagatcacgaaggcggtctccggcgtgctctacttcggctacatgctcatcgcggcttatgccttctttgtactcaccggcaccattggcttttatgcctgcttctggttcaccaggcttatatactcttcggtgaagattgactaggaagctagaatgccatcgtttcatggtcggcaagagaaatcagaggtcaaagttgtgaaagaatacatgaaaatgtagcatggtttatgcacagaagtaaggtgtccatagggtatctattcgtctgataattcagttacacttttgcgttcagtaaaacttgaggtatgtgcgcgcactattatcatgcagtttacagaattgagatgatacttctagccgt

SEQ ID NO: 27739 - DNA, 2022 bp, Zea mays
  Clone ID: LIB4739-013-F6_FLI
ctcgaggccggccggagcctccgcccgcttccttcttctcctgagagtcctgttgctgtctatctcccccgcgcgctattcctccgcctcgcgatagcaatccgcgcattggacgtcgccgcctcaccggacggagccggtcgaaatggaggaggcggcgcccgcaggaactaataaggtgtactacgacgggtgccccggctgcgccatggaccggaggaaggagagccgcgccggcgtcccctacaaggagctgctgttcgtcgccgccgccaccttcgcctccgctctgccaatcacgtccctgttccccttcctctacttcatgataagggacctgcgcgtcgctgagagggaggaagacattggattctacgctggtttcctcggcgcagcatacatgatcggcagaggcgtcgcgtcggtcttctggggcgtggtggcggaccgcgttggccggaagcccgtcatcgcgttctccgtcctctcggtcgtggtgttcaacaccctgttcgggctgagcgccaagtactggatggctgtcgctacgaggtttctcctgggtgccctcaacggcttccttgcgccagcgaaggcgtactccatcgaggtctgccggcctgagcagcaggctctgggtatatcggtcgtaagcacagcgtgggggatgggcgtcataatcggcccggccatcggaggctacctcgcgcagcctgccaaacagtatccgcacctgttccatgagaaatcagtgtttggaaggttcccgtacctgttgccatgcctgtgcatctcgttcttcgccgccttggttgtcataagctgcgcatggctcccggagaccctacacaagcacagaggcctggagagagcagcagctgaagtggcagaaggcacgacagcagcagcagcagcagctcaagaaagcaccccggagccggagcaggagccacctaagagcagcctgctcaggaaccggccactcatgtcctccatcgtctcgtactgcgtcttctccctccacgacaccgcgtacgtcgagatattttctctgtggaccgtgagtggcagagatcacggcggcctcagcttcgcgtccaaggacgtcggccaagtcctcaccgtcgctggcgccagtctcctggtgtaccaaatcttcgcctaccgttgggtcgacaagatcctcggcccggtcaactcaacccgagtttcgtcgcaacgcatgcaggcgctatccataccgataatcgccgcttaccccttcatgacgcgcttgtcgggaataaggcttggtgtgcctctctacgtcgcggcgatgctcaaaagcgtcctcgccatcaccagagtcaccggcacatcgctcctgcagaacaacgctgtgccacaggagcagaggggcgctgcgaacgggatagctacgacggcgatgtctctgtccaaggcgttcgctccggccgtggccggcatcttgttctcgtgggcacagaagcgccagcatgccgcgttctttccaggtgaccagatggtgtttctgctcctgaatctgacggaggtcatcgggctcgtgctcaccttcaagcctttcctcgcggttccccagcagtacaaacagtgaaagcggtgctgcgtgcgtgctctgcatggatactatagagaggtagctatagctagccagtgtgtgcgcgagagcgagacgagggagatggacatggagactggagtagaagtatgccgtagcgcgtgtgttgccactcgccacgcatgctgtcactgcacatcagaacagatccaggtgtgcaacggaacggagcccaattaacgttttcaccccgtttgttgtctctagttggcacaaggaaaaaaacaaatagaagaagctactagcagagaatagagatgcatgctgttaacctggttatactgcacaatgcttcttttaggggaatgcagcaggggaaacctctactgtggcattaaaaatatataacactaaagctgtacaacaaactcatcgaagggtac

SEQ ID NO: 27740 - DNA, 1571 bp, Zea mays
  Clone ID: LIB4739-015-D5_FLI
ccgggacccctagccgccgcccgtcgctgtcccgcaccgccgcaccggccaacccccgcgcccctcaaccgtctccgtcgccgcgccacccgcaccgggacccagtatggccgcctccggcgcatatccgggcacggcgttcaagatactcctctcctgccccgacggcctccctcgctcccgcgtttcggtgaagtttggtcggtcattcgacaggattccccatcctgatgcagccttggaggaatctataagtgaggtgtgggaccaaagccttcagcggaacccatatctatacagcggtacaaagtttcggtatggaggaaatgccttgcactacaaagatgactcagatcatgatcttgagtactgtgtctcacttcatttgggtctcacagactacaggacatttgtgggaacaaatctcaatccattgtgggaattttttttggttccatctgaagatgattctgtacattgccaacacttgtcagatgcactgggaaatggtgctatagttgaaacatctgacaaaaagattattgtattgcaaaggagctacaatgtggcggactttccaggatactatgttttccctggaggacactcggagccgcaagaaattggaatcatgggtcatcaaactgatgaagaagacttcgctagtctcaatgaacgagtttcacaagaaatgtttgaaggactcatccgtgaagtggttgaggaaactggagttcctgctagctccctaactgatcctgtcttcattggagtttcccgccgagaagttaacgctaggccgactgcgttcttttttacaaaatgtaacattgattccagtggcgtaagcgagctttattctagagctcaagatggctatgaatctactaaactctacacagtatctgtggaagaactacaaggaatgaggcagcggatgcctggatgccacaacggtggtattgctctgtatgagttgatgaggaatgctgcaaaaaaaaaagtgaagacgtcattgatgaatagttctgatggtgctattacaccagaaacaagtgtggaggtattcgtatctcgtacaaacacccgtgaagaacactgcatgtgacatccatcagattgctgttctttgcagtagatgtgccatttcatgtttgttgagcctgacataggtctccttagaccgctgcataagtgcccacaaagaaataagagcatgaagcttaaagtttcctctgaatactaccggaataaatttcatctccggatattccaccaaaggaggcacaccagagcggcatcatgatgctaatctacatggtgagatgacccgtggattgtaatgttctttcaggattgaatttcctgggcaagtgatgcctgaatctgtcagctgttcttctgttggtttctgctgtagctgtgtactaggagtatgtaggaaccgaaggtgaagcttacatactttgctctgataacgtttatatacttgttagttgttacctttggtatggatatactagttcgtgctagggtatggattctacatatttcatcttgacttttatcgg

SEQ ID NO: 27741 - DNA, 1757 bp, Zea mays
  Clone ID: LIB4739-015-E1_FLI
ccggccgggtgtctccggcctttgccgcttccacagggagtccggggccatgcagagctccgtaaagctcgcggtgcttgctctactgctagcggcagcagctcaccacggtctgctgccgctgccgacggcgcgatgctactggctcaacccggagatctacgacgccggcgggctgagccgccgcgcgttcccggacggcttcgtcttcgggacggccgcgtcggcgtaccaggtcgaggggatggccaagcacggcgggcggggccccagcatctgggacgccttcatagaggttcctgggaccatccctaacaatgccaccgctgacgtgacggtcgacgagtatcatcggtacaaggaagatgtgaacataatgaagaacatgggctttgatgcgtaccggttttcgatctcttggtcgaggattttcccagatggaactggcaaggtgaaccaggaaggagtggattactacaacaggctcatagattacatgctccagcaaggtatcgcgccgtatgcaaatctctaccattatgacctcccattggcactccatgaacagtacctgggctggcttagcccaaagattgtggaggcgtttgcagactacgccgagttctgcttccacgcgttcggagacagggtgaagaactggtttaccttcaacgagccgaggtgcgtcgctgctctgggctacgacaatggcttgcacgcaccgggaaggtgttccgggtgccccgccggaggcaactccaccacggagccgtaccttgtcgcacaccatctcatcctttctcatgcagctgcggtcaggcgataccgcgacaagtatcagcttcaccagaaggggaagattggaattctcctggatttcgtgtggtacgaacctttcagcgacagcaatgcggaccaggctgcagcacagcgagccagggacttccacctaggctggttccttgaccccattgtacatggacggtacccgtactcgatgcaagagattgccaaagacaggctaccgttgttcagcgatgaagaagccaggatggtgaaaggctctatagactatgttggcatcaaccactacacttctttctacatgaaggaccctgggacatggaacctgacgccagtcagctaccaggatgattggcatgttggttttgtctacgaacgaaatggagttcctattggcgctcacgcaaactcctactggctgtacattgtgccgtggggcatcaacaaggctgtcaactatgtcaaggaaacttacaaaaatcctacaatgatccttgctgaaaacggaatggaccaacctggtgatgtcagtattactcagggtgtgcatgacacagtaagaatccgttattacagagactacataactgagctcaagaaagcaatagatgatggtgccagagtcattgggtactttgcgtggtcgctgcttgacaacttcgagtggaggcttgggtacacttcgcggtttggcttggtgtacgtggactacaagactctgaagaggtaccccaaggactcagctttctggttcaagcatatgctgtccaagaaaaggagctagagaattgcagacaagaggaccactggcttcaggtgtcatacaaaagttcactctgcaaatcctcttagtatgtcagatttagcttaagaaaccgtgcagacaattgagtctcaaggctcgacatctctagcttcgttaattgttgcaaggcaataaattggtatcttag

SEQ ID NO: 27742 - DNA, 1636 bp, Zea mays
  Clone ID: LIB4739-017-F11_FLI
ccgggggacaggtggtcccggcccgtcatcagctccggcagaagggtgggagtacggcaaaaggcctgcctctctgcgactgatctccggcggcgaggcgccgcaccggggtatgggccaggatgtggtcgcgcacgtctacgacgccgccaccgccggctccgacaccaccgtgctccacatcaaccgcttctttaaggacgccatcggcctcggcggcatcttccacaccgccatccaggtctacggtgatgaagaatggtcctttggctactgtgaacgtggcactggggtttttagctgtcccccatgcaaaaatcccatgtacacttatcgcgagtctatagtgctggggaagaccaactgctgtatcctcaaggtaaatcagatactaagggagctgagctgggagtggcctggacattcatatgaactcctgtcaagaaactgcaatcacttctgcaataccttctgcgaaaagcttgaagtatcgaagcttccaggttgggtcaatcgctttgcaaatgcgggtgacactgctctagaggtcgctgaaaccacagcaggaaagctgaaacaagcgaaaaaggaaatcgtgaccgcatgcaaagcagcctcaacatttttgaccggcacatcgtcaagcgcctcttcaaatgcggaggatacgggtggctcaacctcgacaggaaattccctctttgagggggcatggatccgaagtatcatcggtatgacaatgaagccgtcgaagagcctagtctgtgtagatagttcagatagcgacagctccgggagcgaatcagaatcagatggcgatcagcccaacagcgatgacaacgctgagcgacaagctaaaggcgtgaagcaggagcgaggcacgaaaaaaaagaataacggaccacattgccattcatgaagctcactcacaccaatactgcagagagaggaaagacctctacatgctgccgttttctgataaacagattacacagggagctgacctacagcaggaactaactttacaattatgttcatttctggttgagagctgggagcggcgaaagggccctgaggagtgcggaggtgatggagcgcaccacaatgcgtgcaatcttgagcttgatttgcccgcgccgtgggagcgggcgagccctcctttgcctctcagccctgtaaactctggtgagacgggttgtgctcgctttctctgccatccttgtcaaacgagggagatgtttcttctgtagcgagtagaagctgacggtggaggagatgttagagagcctggttgcacttatgcttagtttcatgctactgtggtctatttatagacgtcgaggagtttatctgaacataagacatgacagctagattcttgtttctgtgtagtatcaacagaatgctgttcgttataataatcctgcagtgtctgtaggtatgagaaacctcagctggtgtgtgtgtgtgtgtgtgtgtttgagtaatcatgattggtctgttcgtccgtgtggccgaatcttcagatctttgacttggtgatgtccatacgcgtctcttcggagcagatacgtatgcatcctatgaagaacaaatgattggcttgaatggtagtgtggcatttggcgcctcaaag

SEQ ID NO: 27743 - DNA, 2544 bp, Zea mays
  Clone ID: LIB4739-018-B12_FLI
ccgggatcatcagctacactacagctaggctttgagaggagctgagagaggatgagcgagtctgagtcgtccaacacgggcttcgccgcggccctagagctgtggcaagaaaaccagctgcgcatcctcgtcctgattagcctcgccacccagtgcttcctcttcgtcttcgccccgctccgtcagcaccggatcccaggtccgctgaggctctccatctggctggcctacctgggcagcgacgccgtggccatctacgccctcgccaccctcttcaactcccaccggtgcgacaccggcaccggcaccggcaccgcccgcgccggcgtggagctgctgtgggcgcccatcatgctggtgcacctgggcggccaggacagcatcccggcctacaacatcgaagacaacgagctgtggcggcggcatgtcgtgacagcggtgtctcaggtcgccgctgctatctatgtgttcgtcaagtcgtggccaaaatccatggcggcgactgctgcccatctagtggttgaccaagacactcgtaaccggataaatgccttcatggcccataaaagtgagatggcggcttacgggagaatcttgggaccggcgcttcttctcttcttctctgggatcaccaaatgcgtgtgcaagccctgggacctcaagagggtcagcgtcaacagcctcgtggactcctcctcatcgggctcctcggaagagaaggccgatgccggtgagagtgagatggattcgcttcaggagtacgtgggagctgcagcacagtatttcgagtccgtcggccacgaggaggaggaggacgacggcggcggcggcgacgacgacgatgacgacacctgtaaagcagaggaagtttggaagccctacaacctgtgcgtggacctggcgcccccctactccggccggctgagctgcctgaaacacctggcgcgcagcccagcggacgaagcccatcgcctggtgaaatccagcctctccgcgacgttccaccagctctacaccaaggaatcgctgaagctgcacgacatgtcgcacattgtccttacagacaaccgcgccttgaaccgattgaagctggtcacctcggctcgagggctccggacggtagccgcgaccaccctgctcggggcgatcgcggcgttctacggagaaggcgacgttgaccaggacccgacggacgtcaccatcacgtacgccctgctgtggtctgctttcgtgatggagtgcgtcttgcccaccgtgatccaccacacgttcggctggatagagcggctgttcaccgggcaccggacgtggccggaccaggtcgcgcagtacagcctcatggggtacgtggcacgcggccggagccactcgtggctcatgaaggcggtggcctgcctcggctgcggggacctggtcgaccagctctggaccatgaagccgcgcatgggtgcttcgtccagggagatcaccggcctggtccacgcccacgtcgccggagcgtggatggagggccacatagccggcgcggactcgttccgggcgttcaacgactaccgaggccagtggactctcggcaactgcagggagatcggggtcggcgtatcatccatggtggtactgatgagcagcgtgtcgaggccgttcgacgagagcgtcctcgtctggcacctcgccaccgacttctgcttccacttacttcaggtccagggagacccgtcccgcgccaccgccaccgccaccgccaccgcccgccgctgcatcgagatgtccaactacatggcctaccttctcttcgtcaagccggagatgctgatgcccggtgcccggcgcaagctgttcagggacgcgtgccgcgagctcgtgggcctgctcgaggaggatcgtcctggcgcgccgcgggcacggggcaagagagacctcgcacacaaggtcgtccagctgctcaagagggacggaggcgacgtcctgggctcagcaggcgtcggcgtcggcgtcggcgtcgttcgccgggcttggtgcgtagccgagaaactcgtggattcgcacagtggcgacgaggagaagatgtggaccgtgatacagggcgtgtgggtggagatgctctgcttctcggccagcaggtgcaaaggctacctgcacgccaaaggcttgggaacgggcggggagtacctgtcctacgtgtggctcctgctcctgtacatgggcatggagaccttggcggagaagatgcagaggacggagctgtacgagggctccactgcagcagcgttatccatcagtggccagaatgtttgataccgctcggtctaactactctttggaaggatcggagtctaatcctctcaagtttagataaattttaagataataatgtttattgttatatgtgtatccagatccgtcatgccacggacaagcgtgcttctccttttcgcaatttctcctattggtaatgtttgtttggactggtcgtatttagatggcttctcctataatctctttctagattgtaataactttttctatatttatgcttaatggtcg

SEQ ID NO: 27744 - DNA, 2149 bp, Zea mays
  Clone ID: LIB4739-018-C2_FLI
ccgggacgcaagcaagcagcgactccgtccgcgcacggcaccttcccctcccccgcacggccgcacacaccagacaccaccaccactcgcaagtctcttcgccgtctcgccgagttattagaaggcggggaaaaaaatcaactcgaacgggcgggtggcaaccaaccaccaagcggcgagggcgatggcggcgtccccgccgcggaagcggctccctgctgcgcgcctcatcttcgccctccttctcctgatgtcctccgtgctgccgagggacgccggggcggtggaactggggctgaagctgcccttcagtccgggggacgtgctccccgtcctgccgcggcaggtggcgtggcccgtcatgaacacgctccacagcgccgtcgacctactgccgtccttcgtcgccgccgtggcgcccgggtcgccggcgccggcggcctggaaaggcgcgtgcttctcggagaacgaggccgctatcgagctcacgcccggggaccgcaacgggaccgacgtcggcggtgccgtactgcgcctcaagactgcttcagctcatagttgggcgtgcatggatctctacgtttttgcaacaccatataggataacatgggactattattttgctgctcgggagcacactttggagattaaatcatgggaggaagaagcggaattgaaatatgtgaaggagcatggcatttctatttttctcatgccatctggaatgctcggaactttgctatctttgattgatgtcctgcctttgttttcaaacactgcctggggccaacattccaacctagcctttttagagaagcatatgggagcctcatttgagaaacgaacccaaccttgggttgctaacattagaaaggaggatatacaatctggtgactttttggctttatcaaagattcgaggacgatggggtgggtttgagacattagagaaatgggtgactggtgcatttgctgggcatacctcggtttgcttaaaagacgagaagggtgatctttgggttgcagagtcaggctatgaaaacgagaagggagaagaaatcattgctatagttccttgggatgaatggtgggccatggctctcaaggatgaatcaaatcctcagatagccctgcttcctttgcaccctgatgtgcgtgccagattcaacgaaagtgctgcatgggaatatgcccggagcatggttggaaatccttatggctaccataacatgatatttagctggatcgatacaattggagataattatccacctcctcttgatgctaacctggtaatggcagttatgtcaatgtggactagattgcagccagtttatgctgcaaacatgtggaatgaagctctaaacaaacgacttggcactgaggatttggaccttcaggggatcattatggagattgaaagacgtggaatgtcttttgatcagttgctcaccatacccgagcaagacgaatgggtgtacagtgatggtaaatcaactacttgtgtcgccttcattcttgcaatgtacaaggaggctggaatattcacccctttctcggagtcgatccaggtcaccgagttcactattcgtgacgcatacatgctcaagatatttgaagacaacccggcaaggcttccaggttggtgcaacgcagacacggacaagcttcccttttgccagattctcggagagtacagaatggagttaccagagtacaacacgattgaaccttatgcgaaaatgaacgagaactgtccgtccttgcccccaacgtacaaacgacccgcacgctgctgactacgagattgtctactatgtatctttctgcagctgcttcgtttacacagtggcagtagagtgttgttgctatgttctgtaaataaaagacactatatatataggtgcttggtagatggtagttcttaccagtaatgtagctgcgatgtattcaggttcacggttttcagtcgatcagttctgaagccacggcgtcggcgaccaatatgaaggttaggatttgtcagctccggaaagttgcttatatgtatcaatgtatgtatgtaggcaacattatggcttggtcataaattgtgaactccgtcaagaaataaatctataatgcaacgtcaggtgattctgatgtgtggc

SEQ ID NO: 27745 - DNA, 1680 bp, Zea mays
  Clone ID: LIB4739-018-D10_FLI
aaacgggtccaaatctcggacccgcaaacggacctcacccacccgttcctccatctccgccccttgccggcgatggcaccggcgccggcagcggcctcggcggggcggaagtctcatgtcaccgttctcctcctctacgtagtgtgcggcttgatcctgctgcttctcctcgcctcctactcgccccgcctccagccccacgcccacggccgcagcctccaccgccgcctcaagctccacccaaagagctccttaccatccgacgcttcctccggtgggaacggggggcaacagaagacgcagcaccaaaaccaccatgcggcctccttcgacccgaccatcgccgagctggagcgtcggctggacgacaaggagtgggagcgcgagcactacagcctcctccacggcggcgagccggatgaccatatgaaggagtgggaggagttcctcaaggaggaggaggacttcatcaacgacgacgaccgattcaacatcgccgaccgtatccgcgcgctcttccccaagatcgacgtcgccccgcaggacggattcgtctccctcgacgagctcaccgcctggaacctccagcaggccagggctgaccagcaccaccgctccgccagggagatggagctctacaacaagaacggcgatgagatagtctcattcgaagccttcaatgctctgcgccaagaatcccatggagagggcaatatgcttgggttcgaatggtggaaggaggatcatttcaatgcgtcagatgcaaacgctgatggtttccttgataaaactgagttcaatgatttccttaatccaagtgattcggataatcccaaaatcatcaatttgctctgcaaacaagaaataaggcagagggataaagatggtgatggaaagttaaactttgaagaatactttactgggctacatgaccatatacatggttatgatgacgagaatgcagatatttcccaaattgggaacataacagttgcgaaggatcggtttttcaaacttgacaaagataatgatgggtttatttcggagcatgaactagagcctgttcttgataagctctatctttctgaacgctattattctagacagcaagccatccatgctatttcagaggcagacaaagatcatgatgggaggctgactttggaagagatggttgagaacccctatgcattttatggcagtgtttatctcagcagcagcgacaacgacgacgaagactacttccacgacgaatttcgctgagaccaatattgttactatcctgacacacgcaaggaacacagctgacgagcatcaaggtgcgcacagaggttcggaacgtctagcatactatgtgtgatgcccgggctgggctgctgacagaatgggagagcttagagttacggccatggagtgaggaactagtttttagccgcttggttcttcaagttgtttgtgttaaatggaacgacgacagcatcctagtaccggccaggcccagcagtgatggatgttacgcggcaagttgagccacctttatctaggctgagctgcattggtctccatcctgatgttcctgcagcaggggaaatgtagttcaggagaacaatgagtggaggagcgtcatctctgtggcgagcggcttcagaaatctaacgggaacgtgttgtttggtgtctg

SEQ ID NO: 27746 - DNA, 1771 bp, Zea mays
  Clone ID: LIB4739-018-D9_FLI
tcacttctctttggcccgaaaccgagatctagtgcttgattcggtcgtttttgggcaccaaacacgttcttgggaccgccgccgccgccctacttccagtcccagctgctcaggtctccatcggcctcgagccctttgccggcgacgagcactcacaacaccagttttgtaagaggggatctgtaccagtcaggctgagcagcagcagcagtggtgtgttctggcttgtgtgggacctagaggaagcttacacaacagggaagagtattgtgttagggtgtaacaatgtcttcttcaatggaatcgtcataccttcctgctacaactgagtcattagcccaagctcaagaggctaaggatgcttcagagtccatttcaatcctttaccgtgtcattcaggacccatcttcttctgctgatgcactgagaacaaaagaagttgcaattacaaatcttacaaactacctcactaaagaaaacagagctgaggagctgcgtaatcttttgacccagctcagaccattttttgcagttattcctaaggcaaagactgcaaaaattgtccgtggaataattgatgctgtcgccaagatacctggaacatcagatcttcagatttcactctgcaaggaaatggtagaatggacctgggcagagaagcgtactttcctccggcagcgtgtggaggcaaggttggcagctctcctgttagagaatcaggagtatactgaagcccttaccctgcttactagtcttatcaaggaagtcaggagacttgatgacaagttacttcttgtggacattgaccttttggaaagcaaacttcacttctccctgagaaatctgccaaaggccaaagcctccttaactgctgctagaacagcagcaaatgccatttatgttccacctgctcagcaaggcactattgatctccagagtggaatcctccatgctgaagaaaaggattacaagactgcttacagctacttctttgaagcatttgaagctttcagtgcactggaggacccgaaggccatctttagcctgaagtacatgctcttgtgtaagataatggttaaccaagctgacgatgttgcaggaataatctcgtctaaggctggcctaaaatatctgggtcctgatgttgatgctatgaaggctgttgctgatgcatactctaaaagatctctcaagtattttgaaactgcccttcgtgattataagtcccagctggaggaggaccctattgtccacaggcatctttcttctctgtatgatacactgctggagcagaatctctgcaggttgattgagccctactcaagggtggagattgcgcatatagcagagatgattgaattgccgattgaccatgttgagaagaagctgtcgcagatgatccttgacaagaaatttgctgggacactagatcaaggtgctggctgcctcattatctttgaggatcccaagacggaggaaatcttccctgccactctcgaaaccatttcgaatgtcgggaaggttgtggacagcctttacgtgaggtcggccaagatcatggcttgaaagcagctagtcttacctgtttgctctgatttcatttccagtctgtcgatgtcctcagacatttattccttcaatattgacagtttattgtgaccgctacatgttcatgtgaccaaaggctagctatttttacgactgaatgagttatgcatgtattggtcttttaatatcagcgtgcagagtcggacggatgttattgtgtgtg

SEQ ID NO: 27747 - DNA, 1951 bp, Zea mays
  Clone ID: LIB4739-018-F5_FLI
ccgggagaggaagctagcgagaaggtcaagccgcgaagagaagagacgcacgtcacagatccctctccactgtctcaccctttctctctcctcgaccctcccgacgcggcaaagcaaaaacacaaggaggagaggagggagagaaggaagaaggcgaggccaaaaatcccctccccctccccaaatcctagcccaataatctctcaatcaggggattcttaggtctgatcaagtcggaggattcggcagggcgcagccatgaacgagaaggcgtccgtctccaaggagctcaacgccaagcacaagaagatattggaaggtcttctacggcatcctgagaatagagaatgcgcagactgcaagtcaaagggtcctcgatgggcaagtgtgaatctaggtatctttatatgcatgacatgttctggcattcatagaagcctgggggtgcacatatctaaggtaagatctgccaccctggatacatggctgccagagcaagttgcatttattcaatcaatgggaaacgaaaaagcaaatagctattgggaagcagagctgcctcctaactacgatagggttggaatagagaatttcatccgtgcaaaatatgaggacaagagatgggtaccaaggaatggaacatcaaaatcttcgtccagtgttcgagatgagaagagccaagagtctccggctagtgctaataggagtggacatggtcatagatcttcatttgagcaaaaccgtgcttcaccagctcttccgagcaaagttgcacatgcagcttcaaggatatcctctcaggcatcacctcagcccccgaaggtagaaacaccagttccaaaggtggttttacctcctcagtcacagaaatcccccgccaaagttgatgcaacaccgcctaaagttgagaagccatcggttacaccacctcctaaagttgattatgccactgatctctttaacatgttgtcaatggatggaacaacagagaaagagtcagcgtcatcttcaaacgacgataatggctgggatggcttccagtctgcacaaccagtacctagttcagagaaaaaagattctgccaaaccagcagaaagcaagacccagtctacatctggaatggaagacttatttaaagactcaccagctgtgccattatcctcagctccagctgtttcccaagtaaacgctaagaatgatatcatgagtttgtttgagaagtccaatatggtatcacctttcgctgcccatcaacagcagctggcgctcatgtctcagcagcaagctcttctaatggctgctctcaaagctggaaatgcaccacaaatgatgattccagggactgccaatcagctaaatgctaacggaaccttgcctttccaaaactggacaaatctttatcaaaatcctgggtcgactccagcagcagcacagaatggtgccaccaaggttgctaacaacaatcaggacttctcttctggtaccttcggttttggcacacctggggtgtacaacattagcccaactgtcccagcaaatggggccacgacagcaggtgctatcaacaacggcactgcatcaactgcctcttctactctcccctcacaatctggcaaagactatgatttttcgtccttaactcaaggatttttcaccaaacgatgagcgcctagtgagcttgaaaaccaaacagaccacaggatcatgttggacgaggcatattgatttagggagcacaaggggcttacacatgcttatttcgaggcagattttcttctggtggatatattgttgtttcatgaccttgtagctgtcggacaataagagtggaaatatgccgcaaaatagctttgttgtttctaaaagcgaagaatacattgccggttatgtcaacggcttttactcgaggaccaccttgtcagttatacaagtctaatgcagtcttttcact

SEQ ID NO: 27748 - DNA, 1963 bp, Zea mays
  Clone ID: LIB4739-018-G6_FLI
ctcgaggccggccgggacgggcgcgaacttgacacgcgccccctgccccgccgccgcagttctcacctcccacggccacgccggcacgtccgctcgcgcgcacactgtttttttggtaaagggccggcggccgggcagataatcgtaaaggaaggcgaggcaatacacccaccgagagagaagaactaagctttggacacggaagatcgcaagagcctcaaccacactattcaggtggcctaggactctacgagggacgttcgtcgtgcctcggatgagatgggcggcggcggaggaggaggaggcgggaagtccgagaaggcgcggcgttcgtcggcgcgggtgaggctgtgggtcgcgcgcgccagcaccgtgctgctctggacgtgcctcgtccagctcgcggcctaccgggagctctgggcgcccagcgtgctctccaggtggcctggctgcctcaaccagccgcacgtcgcgcggaggccatcggagcgtgtggcggacgccggccagacgcaggcagcgcgcgctttggtggtgctcccacccaaaagaatctacaggaacaacggctatctgatggtctcctgcaacggcgggcttaaccagatgcgagcagcaatttgtgacatggtaaccatcgcaaggtatctgaacgttactctcatcgtaccggagttggataaggcttcattttgggctgatcccagcgatttccaagacatattcgacgtggactacttcatagcgtcgctgagagacgaggtccggatcctgaggcagctgcctccgaggctcaagagaagagtggagatgggatccctccggtccctgccaccagtcagctggtcagacatcggctactaccgccgtcagattctgcctctggtaaagaagtacaaggtcgttcacctgaacaggacggatgcccggctcgcgaacaacggcctgcccgtggagatgcagagactgcggtgtcgcgtcaactacaatgccctgagatttacccctgaaatcgaggatctgggcagacgcctggttcgagctcttcgccgcaacgggccctttgtggtccttcacttgcggtatgagatggacatgcttgccttctccggatgcacgcatggttgcagcagcatggaggccgaagagctcacgaagatgagatatgcctacccatggtggaaggagaaagtgatcgactccgacgccaagaggaaagacgggctgtgtccgttaacgccggaggagaccgcgctggtgctgcaggcgctcggcattgaccgcggctaccagatctacattgccgcaggcgaaatatacggtgggcagagaagaatggctgcgctcacctcggcttatcccaacgtggttagaaaggagacgctgttgccttgggaagtcggcctgttccagaaccactcctcccagatggctgcgctggactacatggtgtccctggagagcgatgtcttcatacccacctacgacggcaacatggccaaggtcgtagaaggccatcgcaggtacctggggtttcggaagacggtgctgctggaccggaggcgtatcgtcgagctcgtcgacgagtacaggaacggcacgttgagctggaccgacttctcgtctgccgtgatggcgtcgcacaccagccgcatgggcgaaccgtccaggaggcagacggttcctgacagacccaaggaagaggactacttctacgcgaacccgcacgagtgcctgcaccagccggaagatgtctccgccttgtgatacaggccctgccgcggtacagtacagtggatgatgcgcgggctttcggaatccagaaccacatgtatatgtaatagcgcattcgacagcgttgcgttggcagaggataaacgtaaacggacgaggatgtgagttaggtttcggtacagattcatggaacggtggttcgccgattcttttttctgttcagaag

SEQ ID NO: 27749 - DNA, 1121 bp, Zea mays
  Clone ID: LIB4739-043-F6_FLI
ccgggattccgtcgtcgtcatcagcagcttctgcttgctctggggggaaggagagagagagagagcgagagagagatctagtagagaggctagtaggtggtcctcgaacgaagatgttggcggtgttcagcgggcaggtggtggaggtgccggcggagctggtggcggcgggcagccggacgccgtcgcccaagacgaaggcgtcgcagctggtggggcgcttcctggccgcgtccgagccggccgtgtccgtgcagctcggcgaccacggccacctcgcctactcccacaccaaccaggcgctcctccgccccaggtcgttcgcggccaaggacgaggtgttctgcctgttcgagggggtgctggacaacctgggtcgtctgagccagcagcacgggctgtcaagcaagggcgccaacgaggtgctcctcgtcatcgaggcctacaagacgctgcgcgaccgcgcgccctacccggccagcttcatgctcgcccagctcaccggctcctacgccttcgtcctcttcgacaagtccaccaactccctgctagtcgcatctgaccccgagggcagggtgccgctcttctgggggatcaccgccgacggctgcgtcgccttctccgacgacatcgacatgctcaaaggctcatgcggcaagtcgctcgcgccgttcccgcaaggctgcttctactccaacgccctcggagggctcaagtgctacgagaaccccaagcacaaggtcaccgctgtccccgccgacgaagaagagatctgcggtgccactttcaaggtggtggaagggtctactgtcctgacggcgctgcactgatcgatcatcagctggcggaggcgatgcgacgatgatgcagaactttgtacatgcgtggtgggtgtgtaacatagtgtggctggcaacaagccatgctcatgccaaccgatgaatctatctctgtatcatgcatcgatctcggttgcttgctagtcccgactccagactccagacatggctatatatagctggtgctaataaataggagtataatcgtcatatcgatcgattgcgtgtggaatgccaatcaagtgtgtaatctgttccaaataacaaacctctgttcctccg

SEQ ID NO: 27750 - DNA, 1724 bp, Zea mays
  Clone ID: LIB4739-044-G3_FLI
attaggtccatagcatctggaggggacccgtctggcgtctggcgtctggcgtctggcgtctgtctgggaccgggctgcccagccgctcgatcgacgttcggcgaggacgctgctccggtactccggttggttggaccggagggcggaggcgcggcgatgggggcgctgtcgcggccggaggaggtgctggcgctggtgaaattgcgggtggcagcggggcagatcaagcgtcagatcccgcccgaggaacactgggccttcgcctactccatgctccagaaggtctcccgcagcttcgccctcgtcatccagcagctcgggcccgaactccgcaatgccgtgtgcatcttctacctcgtgctccgtgccctcgacaccgttgaggatgacactagcatcccgaccgaggtgaaggtgcccatcctccaggaattttatcggcacgtctacaaccgcgactggcattattcatgtggaacaaatcactacaaagtgctgatggataagtttcacctcgtatccactgccttcctggagcttggtcaaggctatcaaaaggcaatcgaagaaatcactaggcgaatgggagcaggaatggcaaaatttatatgcaaggaggttgaaactgttgatgactatgacgagtattgtcactatgtagccgggctagttggttatggactttccaggctcttttatgctgctgggacagaagatctggctccagattcactatcaaattcaatgggtctctttttacagaaaactaatataattagggattatttggaggacataaatgagataccaaagtcccgcatgttctggcctcgagagatatggagtaaatatgcagataaactcgaggatttcaaatatgaggaaaataccgaaaaggcagtacaatgcttgaacgatatagtgacgaatgcactgattcatgccgaagagtgccttcagtacatgtcagccttgaagaaccatgccatcttccgtttttgcgcaattccccagataatggcaattggaacatgtgctctttgctacaataacgtgcatgtctttagaggagttgtaaagatgagacgtggtctcacggcacgaataattgacgagacaaattcaatgtcagacgtctataccgctttctatgagttttcttcattgatagagtcaaagattgatgacaatgatccaaatgctgctctaacacggagacacgtgaattcaataaagcaaacttgcaagtcatctggtttggtaaagaggagggggtaccatttggacacatcaccttacaggcctatgctgatcatgattgtcctcctgctggtggctatccttttcggggcactgtataccaagtgatgcacttgtagctggcctttttcccctatggagacgagacaaactctgccaatctgatccttttcgtactctgtagtccccaatggctgcaggaagttcgaaattactggctgtagaagtgtagatcatacggcagcatgctactgcttccatgactccgttactgctctcgattcgtttcttcattatgttttctcgcgcgttgtatcgtttgaagctgttttaagcaacggaaaaaaataccatgtgacacgtgtatcctacgaacatgggtttctgtttagttagcagtgggcgcactgtattatgttgtcttgttgacatgtcatgttttcaaagctgacgtgtttgtgttc

SEQ ID NO: 27751 - DNA, 1486 bp, Zea mays
  Clone ID: LIB4739-058-F10_FLI
ctcgaggccggccgggatcccctcttattcttatcttggcggcggagaaaagtgcggcgcaggcgcaggcgagcggccgtccagtcgcgccggcagcagggcgcaggcgagcggccgtccgtccaggcgcaggcgagcggccgtccgtctaggcgtccgtccaagcgaactggtccaatcgtccaggcgagcgaccgtccgtccaggcgttggattccaagaactgatggacaaggcgaccaagcttttgatttatggtgcttcagcacacttgttgttgtccatgatggccatggttattgagtctagaaaaagaaaaagagatagtagaagagtcggtattacttatgggccaatggaggaaagggataggatgagacttgattatcttaacactaaaatatggatgagtgatacaacatgtgtgaacatgcttagacttagtaggtctagtttctttcgcttttgtaagggctttagagaccggggtttacttgaagatacaatacacatgtgtgttgaggaacaagtggccatgtttttgaacacagtgggacacaaccttaggaataggttggtgggaacaaattatggtagatctggtgagactgttagtcgctacttcaacaaagtgcttcgtgctattggagagctacgagctgaacttattaggccaccatcattagagactccatccaaaatagcaggaaatccaagatgggatccctactttaaggattgcattggagctattgatggcacacatataagagctttggtttccatagatatggaaccttcatttcgtggtagaaagtcttatgcctctcaaaatgtaatggcggctgttgattttgatcttcgattcacatatgtcttggctggttgggagggttcagcacatgatgctttagtactaagagatgctttagagcgagagaatggccttcgtgtaccacaaggaaaattctatctagtggacgcgggatatggagccaaacctggatttttgcccccttttcgtgctgtccggtgtcacttgaatgaatggggaaataatccggtacaaaatgagaaggagttgttcaaccttaggcactcgtctcttcgtgtcaccgtagagcgtgcatttggttcactgaagagaagatttaaaatacttgatgatgccacaccattctttccattttctactcaagtagatattgttgtagcctgctgcattattcacaattgggtcatacaagatggaggtgatgagctgatcattgaagaatctaattggccaattcataatcatgctacaacatcaagtggccaagctagtgaacatgcattcatggttaatttgaggcaggaaatagcaaatcagatgtgggaagatcgcaaaaccactatgcttcctaatttgttattgtttttcttgctgtaatttttatttatggacattaatatatggacttaattaatgtattcatatattgtg

SEQ ID NO: 27752 - DNA, 920 bp, Zea mays
  Clone ID: LIB4739-062-D1_FLI
ccggggaaaggctcgcgtatgccttccccctcctccacctttttcccccgttcgagtgctcgagctccgaccaaatctcgcagcggtagcaatccccgagcggccgagcccgaagcgggatcagtggaggacgagtggacgacaccctcgattctgacctgcggtcggcgcgacttacagagaaccggagatgcagcagggcgacagcacggaggcgcaggtgacgtgggaggaccagcagaacatcaaccgcttcggtcgcctcaacaaccgcctccacgagctccaggacgagatcaaactcgcgaaggaaacgaacgagaaccttgacgatgctgggaacgaactcatcctgtcggacgaagatgtcgtgcgcttccagatcggggaggtgtttgctcacatgccgagggacgacgtcgagactaggctggagcagatgaaagaggatgcggctaagaagctggagaggctagaggaggagaaggaatccgtcctcgcccagatggccgagctgaagaagatactgtacgggaagttcaaggacgccatcaacctggaggaagattaagagtagtactggagttgtgacgacgtggccctctctttctagttcaggtcctgtttttgttcccctgctccccccacagaagcgcttggcccgctcgtgtaatggaagcttgagtctctcagtctttcagaagctcttttcaccaagaacccagaatagttttcattctgcgggtttatacggattgaagctaatggcgctgggcccatgaatcctttttcagtttgattgtacttggtgtatgtgggtacatcgcttgccctatttcctagtacttactagcaagcctgtgactgtgagtaccggaaaacagtggagataacgggcatgtaggtcttgttttctgccg

SEQ ID NO: 27753 - DNA, 1490 bp, Zea mays
  Clone ID: LIB4739-069-A10_FLI
gagagtgagaaggccgaggccgacgtgccacgctcggatctcacaactagtcacaagctgcttctccatattccacaatccacacatccggaccgagcgcgaccccacctcccagatctcatctgcgacgacctcctccctcccgatcccgctccgtctccccccaccgccaccgctgccgctgccgcctcccccaccgaggtcttgtcttcggcgatccagccggagcccgcggcggcgacgatgtacgggtgggagatgctgtcgttcaacatacacgatgggttcctggaggccatcgtgcggggcaaccgctcgggcctcctcaccgccgccgactacaacaacctctgccagtgcgagaccctcgacgacatcaagatgcacctcaccgccaccgagtacgggccctacctccagaacggaccttcacccttgcacacaacgacaattgtggagaagtgcactcttaaactagtcgatgagtacaagcacatgctgtgccaggccactgaaccactatctacgtttttgcagtatataacttatggccacatgattgacaatgttgtccttattgtaactgggacactgcatgagagagatgttaacgaacttttggagaaatgccacccattgggcatgtttgacagcattgcatcacttgctgttgctcaaaacatgcgtgagctttatagattggttctagtcgatacaccactggccccttacttctcagagtgcattacatctgaggatttggatgacatgaatattgagattatgaggaacactctctacaaagcatatcttgaggacttctacaaattttgccagaaactaggtggtgcaacagctgagatcatgtgtgatctcctttcatttgaagctgacagaagagctgttaacattacaataaatagtattggtactgagttgacaagagatgaccgcaggaagctgtactccaactttggtttattgtatccatatggccacgaagaattggccgtttgtgaagatgttgaccaggttcgtggtgcaatggagaagtacccaccataccagtctatattttccaggatttcatatggagaaagtcagatgttggataaggcattttatgaggaggaagtcaagaggctatgcttgtcctttgagcagcagttccactacgctgttttcttcgcttacatcaggctccgcgagcaggagatcaggaacctgatgtggatctctgaatgtgtcgctcagaaccagaagtcccgggtccatgacagtgtcgtcttcatattctgagaacccccgccactatatatgtatgtacaaaatgcctgctttgatgatggcacaatcgctcgacaattataaatctgggacttattattattcccattccctctgttagacgccggcgtaaaaaatgccagacctggagttgatgtattatttgttttgtagtcaaataaaggtgtgattatctggcacgg

SEQ ID NO: 27754 - DNA, 1709 bp, Zea mays
  Clone ID: LIB4739-069-F8_FLI
taccctcgaggccggccggggccctaaactaaaaaaaggtaaccgtccccgaagcccaaagccaaaaattcccccaccccaaggccgcatcctcctgcagcctgctcgaaaccctccttcctcctcctgaattcgtcaaccggtctcccaaatcgtagcggcaatcggattgtttggtctcgagactgagctgtgctccagtccgtgagctattcgttgatttttccagcgtgaaggcgccgatttttgggccgttggctgtggtggccggttcggcgtctctggatccggctggcttcccgcgatagatcgggccattggagcagcacaatacttcggattcttgatgtgtccgtagctgcactcgcggtgaccttttttgaggaagccggttgaattcgtagacctgaagatttattagctggcccacgccattttcggcaataaaatattcggctgtttcatagcaatttcagggtccttctcaatcttctgaagaagcgagcagagacggcttttgaaccgggcgatgcaggccaaggctcggatccacgctgacccggtccatgagtttgaccaattcgactgcttgcacgattctcttgtgctgctgatcctgaacaagctcgaggacgtgcgttcactcggcaggtgctctgccgtgtccaagcgattcagtggcctggttctcctcgtccatgatgtgcgtgtcaagatcgaccacgttgtgaccgtggacggcggcgccgatgacgctctgaacctgtcgtcaccgaagccccacaacatcatctcgcatctattcaagatgatgctgttcgcgatcgccaagcccttccatgacatgcggagccccattagcgcagggcggctgctgttccctcagctctctcagcattcaccggtgcaggtgctgaagaacttctcccatgttcgcaatcttcaggtagagctcccctccggagatgttgcagtcgaggagggggttctgctgaagtggcgggctgaatatggcagcacacttcagagctgcgtgatccttggtggaaccttggttgatcgcaaggccgctggcagtgggcatgagccatcaccggatgacaagggaagcatgccagaatctttctataccaatggtgggctgaaactccgtgtcgtatggactatcagctgtttgattgccgcgtcgacaaggcactatcttctccggtcgatcatcaacgaccatccgacgctgaggagcctggtcttggcagatgccgagggacagggcgcactctccatgggggcagagcagctgaatgatttcagggaacaccaattgtcagcctcaccatgttctaacaggacgcaggtgccggcatgcaacatgaagctgaagtacgctcagtacctcgaattgcctggtggcttggcactgcaaggtgcaaccttgcttgtcaccaagcctgccagcgatggtcatggcaatcgcaaggaagttgaagcctttgtttcaagcgcgttcgatggacccttgaggtttgctgcgaaggcgctgatgaagaggcgcacctatctcctggagatgaatgggttctagagaccttgtttttttggtgcttcttatgaggaactcctgtctgtctggtctttgtatatacactatagtcatcgaagcggatggacatgatatcagattaatgcctaaagtaagcatgcgtagagat

SEQ ID NO: 27755 - DNA, 1317 bp, Zea mays
  Clone ID: LIB4739-074-C1_FLI
ctcgaggccggccggggtccagtcctcgccaattcccattccggttccggcttccgccgccagcggcagcaatcccctcctcctccctgttcctggacgccggcgccggcgtcggctcctcatcgtccgcgggagactgaagtggtgaacacggaagaaggttgccattttactaagttaaagttagatcattggagcaatgccgccccataagatcgagactgggcaccaagatgtggtgcatgatgtcgccatggattactatggcaagcgcctagctacatcctcctctgataatacaataaagatcattggcgtaagtggaacctcacaccagcagcttgcaactttgagtggacaccagggcccagtatggcaagtcgcatgggctcatcccaagtttggttccatgcttgcatcctgcagctacgacggccgagtgatcatctggaaggaaggaagcaagcctgatgaatgggcactggtacacacctttgctgagcacaagtcctccgtgaattccatcgcgtgggcgcctcatgagctgggtctatgcttggcttgtggttcatcagatgggaacatttcagtcttcactgctcgttctgatggaggttgggataccacgcgtattgatcaggcgcatccggttggtgtgacctcagtttcttgggctcctgcaatggcaccgggagctctaatcagcgcggggtcttctggtcagtttgagtatgttcagaaactcgcttccggtggctgtgacaacacggtgaaggtgtggaagctcaacaacggcagttggcggatggactgtttccccgccctacagatgcacaaggactgggtgagagacgtcgcgtgggcgccaaacctgggccttccaaagtccaccatcgccagcgcctctcaggatggaacagttgttatctggacagcagcaaaagaaggcgagcagtgggaaggccggttgctgtatgatttcaggacccctgtgtggaggctgtcgtggtcactgactgggaatatactggcggtgtctgacggcaacaacaatgtgaccctgtggaaggaagctgtggacggcgaatggcagcaagtgacgactgttgagccataggtctctagagttgtccctcgtctatattgccttaatacttgtagtttttgtgtacctatggccctgtgtgggtagcaagcaggccacggtgcatgactacttgagacgtgatttcaggctcgggcagaagtgaaaaatgaacttgttgtatgtgtggagcattctgtttctcgattcagtgccttttctttcccatggtg

SEQ ID NO: 27756 - DNA, 992 bp, Zea mays
  Clone ID: LIB4740-001-A6_FLI
acggcactaccccttcagccccagatttctccaagcctccgggacgaggcgcatccgtccatgggggccaaggcggcacaccggcgtggggtgctggacctggaggcgcagttcgccttcttccggtcgcagcaccggcaccccgtgaacgcggcggcgcacgtgctgctcacctggcccaccctcttcaccaacctcttgatcctccacttcctgccgctgccgctgcccgtctcccccgcgctggccctcgcgctcgcatacgccgccgcctacctcgctgtcgaccgcagagccggcgcagtcgcggggctgctcttcctcgccgcatgggccgccagccgcgccctcgcggcccgcctcggcttcgctctctcctggaagcttgtcctcgtcacgcagctcttctgctggacctggcagttcctcggccacggcctcttcgagaagaaggggccgagtgttagtgatcttcctgaggtgttcttgatggagccgttcctcatcttcctgcaggtaaccacaggcacagctgacaaacatatactgaacaaactgttcggctatgagccgtatcctgggttctgcaagaacgtggacaggaagatcgaagccgatctcagggcgagcgagagctcaagcagaggaaagactacctgattgattgggaattcgggagtgatcctccggagcggtgcgcgaaattgtaccatctatacatgtagcatattgcctgccatttgtgttgttttattcaggtacatgatgtctgcgcaccattatatagtgtagtaaacatcagtcatgtgtgttgaggtcagcttgaatcccgggaggaaggtagagagcggtaataatctcctcgtttactgccctataatttgctggtcaaagataatctatcttgtttaaattactatgtttaagatgaactaaattttacatgatccatcccccttcatagaaaggggaggatgagtgtcaacacaacc

SEQ ID NO: 27757 - DNA, 537 bp, Zea mays
  Clone ID: LIB4740-001-B3_FLI
gccttttctttttcgttctccgttcactcctatttccggccgtttgcacgcttgcctcttgagtcttgacacgagctcccacacgtacactgcataaataggcgagcagcgggagagagacgaccgacgaggacgaagaggaattaagccagagcgatcgagacctgactgtgagcaagcaagcaagctcctaccgttgccgccggccggagatatgtcgtcgggcggccgacgtggcaggatcagcgacgacgagatcaacgagctgatctccaagctccaggctctcctcccggaatcctcacgccgccggaacgcgagccggtcgtcggcgtcgaagcttctgaaggagacgtgcgcctacgtcaagagcctgcaccgggaggtggacgacctctcggagcggctgtcggggctcatggcgaccatggacaacgacagcccccaggccgagatcatccggagcctcctccggtgactccaggtccaggttccagccatgcatgccgcttgccgccccggtcgtccggcgcgcgc

SEQ ID NO: 27758 - DNA, 1350 bp, Zea mays
  Clone ID: LIB4740-001-D10_FLI
ggtgttctctggtcaggcgcggaagtctccactctggagtctggaactcccctcatcctccacatctccaccgcatcggaactaggaaggcgaagccgaaggcgcggcgcggcgcggcacggatcgagcgatggcggtggcccctcctacggcggcggcgctggagcagctaagcagcagcaagatgttcgacggcttcaatctccgcttccgccaccagagcgccacccttggctgcgccatgactttctccatctacctgcccccgtccccggcgtccaaccttcccgtgctgtactggctctcgggtctcacctgcaccgacgagaatttcatcataaagtccggcgcccagcgcgccgccgctgcccacggcatcgccctcgtggcacctgacacctccccacgtgggttaaatattgaaggagagtcagacagctatgattttggtgtgggtgccgggttttatttgaatgccacaaatgaaaagtggaaaaactggcgcatgtatgactacattgtgaaggaacttccaaaagttttaagtgataactttgaacaactcaacacgtcacaggcatcaatttttgggcactcaatgggagggcatggcgcgctgacaatttacttgaaaaacactgataaatacaagtcggtgtcagcatttgctccaattgccaatccgataaactgcccttggggtcagaaagcattctcaaattacctgggctcaactaaatcagattgggaggaatatgacgcaacctgcctgattaaaaagaacagcaaagttcccactactatcctaattgaccagggggaggccgacaagttcctggctgagcagcagttgctacctcacaagttcgaggaggcgtgcaaggccgcaggggctgctctgaccttgcgcatgcagcctggatatgaccactcgtactatttcatcgctacgttcgtggacgatcacattgcgcaccatgctcagtttctcaagagcgcctgactgtaaatgtgtagcgtgaggaagacaaggaggcagcctagcatgggtgttttatctatgccgacagtgttgtctcgtgtggcagcttgaggagaggtgaacagcacaccccacatgcgaaataagatggaagatttgctgttcctgtccattgacattgacgagctcgaatgggactgatgttgcaccgaatgtagtttccctgtcattcgctatgcgcaattatgttataacggccctggtgcaaggaatgattgcccgagtgcttgtgtgtgcggcgcgcgcggttgactcttcttggcattctgcagggggtgtacaaatctgtatggatcagagcttggttc

SEQ ID NO: 27759 - DNA, 1341 bp, Zea mays
  Clone ID: LIB4740-001-G10_FLI
ctcgaggccggccgggaaaaaaaaaaaaacaatccatgcggcggcatatggcgcccatcaaggagcaaaaacacacgacaagcgcagaacagcaggtgatgctggatgccgagctccagctgtggaaccacaccttcggctacgtcaagtccatggcgctcaaggccgcgatcgacctcggcatacccgaggccatccaccagcacggcggcacggccaccctcccacaaatagtcaccagggtcaagctccacccgtccaagacaccatgcctgcggcgcctcatgcgcgtgctcaccctcaccggcgtcttcggcgcgcaggagccgcacgatgacgacggcggctgtgacgacgagctcgtctacacgctcacgccggcgtcccgtctcctcgtcggctcaccggggcagaacgtgggccctttcctgaccctgatgctcggccccatcttcgtgtcgtccttcctcgacctccgcgggtggttccagcacgagacgccggacccgtcccccttcaagatgacgcacgggcgggacatatgggagctggccccccacgacgccgccttcggcaggctcttcgacgccggcatggtcgctgacagcagcttcatcatggacgtcgtggtcagggagtgcggcggcgtctttgaggggatcagctccctcgtcgacgtcgccggcgggctcggtggcgccacacagaccatcgcgaaggcgttcccgaacctggagtgcagcgtgctggatctcccaaacgtcgtcgccagcgctcccgctgataccgccgtgaagtatgtccccggtgacatgttcgagagcgttccggcggcagacgctgtcttcctcaagtggattatgcatgactggggtgatgccgactgtgtcaagatactgaagaactgcaagaaggccataccggctcaaggaggcaaggtgataatactggatatcgtggttggagcagggtcgtcatgcgaccggaagaatgtggagacgcaatgcttgtttgatctcttcatcatgtttatcaacggtgccgaacgagatgagcgacagtggaagaagatcatctttgaagccggctttacatcttacaagatcatacctgtcctgggcattagatccataattgaaatctgcctatagaagctaatataattaaggatgaaaacgggtcaggttcgggttgagttgagcaaaattctacccgggatggcatccttaaagtctatataaacccacccacgatcgtacccacgagtgcaattctaaacccgcacctgaacccgtcgggtttgaggtattgtatacttttaaataataattcaactatctc

SEQ ID NO: 27760 - DNA, 654 bp, Zea mays
  Clone ID: LIB4740-002-A9_FLI
ccgggagcagcagcagcagcacagtcatccacactaacgaacgaactcttgctccgatcacgagctagctgaggtcgacgatggcggctgtgctgaacagcaggaagacgccgcaggcggtggtggccgtgctggtggcggcggcgctgctggcttcgtccgcttcggcggcgatcacctgcgggcaggtggggtcgtcgctggcgccgtgcatcccgtacgcgacggggagggccagcgcgctccccgcgtcgtgctgcagcggcgtcaagagcctcaacagcgcggcgcggaccagcgcggaccgccaggcggcgtgccgctgcctcaagagcctcgccaacagcgtcaagagcgtcaacatgggcaccgtcgccaccatccccggcaagtgcggcgtctccgtcggattccccatcagcatgtccaccgactgcaacaagatcagctaagttacgacgaccaagctaataagcctaccgaacgtacacgtacgtcccgcgcgctgcacgagtgatgaagccagggaagaaataaaataaagccgctgtattgccaggagcagcatgcagtatcgatctatatatatactgtactgtagtactctatattatgtatgtgtggcctgcagtgcgagttgcttcgatccaaaag

SEQ ID NO: 27761 - DNA, 851 bp, Zea mays
  Clone ID: LIB4740-002-B7_FLI
ctcgaggccggccggggtgtttggttaggggattggctcagctccatcactgagacaagagagcacactactactcatcactcgccaacgtgcagagatcagggaagcagcacactccatccactgaccgctcatggcgaggatccacctctacgtcgccgcggcctgcgccgtcgtcctcgcgctcgccgcccccgcccttgccggcgaccccgacatgctgcaggacgtctgcccggctgactacgcctccccggtgaagctgaacgggttcccgtgcaaggcgaacttttcggcggacgacttcttcttcgacgggctgaggaaccccggcaacaccaacaacccggcgggctccgtggtgacggcggccaacgtggagaagttcccgggcgtgaacacgctgggcgtctccatggcgcgcatcgactacgcgccgggcggccagaacccgccgcacacgcacccgcgcgccaccgagatcatcttcgtcctcgagggcacgctcgaggtcggcttcatcaccaccgccaacgcgctcttcaccaagaccgtcaccaagggcgacgtcttcgtcttcccgcgcggcctcgtccacttccagcagaacagggggcacggccccgccgccgtcgtcgccgccttcaacagccagctccagggcacgcaggccatcgccatgacgctcttcggcgccgtgccgcccgtgccctccgacatcctcgccaaggccttccgcatcagcagcggcgaggtggaccacatcaaggccaacttcgcgcccaagtagagatccaacgtctgcattcccttgattttctcaataataaatccccgcggtgtgcagttcg

SEQ ID NO: 27762 - DNA, 1146 bp, Zea mays
  Clone ID: LIB4740-002-F4_FLI
aaaagtctctcccttcccttcacgactccgcccccactcgtgagactctacctagccctagcgccagcaccacccgcccaacctcccggagagggagagagagagagagagaggaggaggccttcgccgccgccgtttctgtcggccgaggcgccaggatgttcgggtaccagaagggcctcgacgtcgaggcggggacatccggagccgccgccactggcggcgcgcgccagctctacccggggatgcaggagagccccgagctgcgctgggcgctcatccgcaagatctacgtcattctctccctccagctgctcctcaccgccgtcgtcgccgcagtcgtcgtcaaggtccgcgccatcccgcacttcttcaccaccaccagcgccggcctcggcctctacatcttcctcatcatcctcccctttatcgtgctgtgcccgctgtacttctaccacgagaagcacccagtcaacctgatcctgctcggcctcttcaccgttgccatcagctttgctgtgggcatgacatgtgccttcaccagtggcaaggtcattctggagtctgcaattctgacaacagtggtcgtgctcagccttaccgcatacactttctgggccgtgaataggggcaaagacttcagcttcctgggtcctttcctgttcgccgccatcatagtgctgctcgtgttcgcactcatccagatcctgttcccactgggcaagctctcccagatgatctacggcgggctggcgtcgcttatcttcagcgggtacatcgtctacgacacaaacaacatcatcaggcgctacacgtacgaccagtacgtctgggccgcagtctcactgtacctggacgttatcaacctcttcctgtccctgatgaccctcttcagggcagccgactaggcgctctgctctcgtcctgtctatctacgagtcggtgcctgaatgctcccgtgggttaagctccggtacccagaattccagttccaagaatagagttgtatatagctacctgcgttgcctttctactagtatggtcttatttggcttggctcgtttcgatcagagtcttgatacgtagttggatggatcgcgaacaaatgaaccttgcatgggagtatggagagccatctgctttatg

SEQ ID NO: 27763 - DNA, 725 bp, Zea mays
  Clone ID: LIB4740-002-F6_FLI
aacttgctcgctgcgccgccgcctccgacatcgtcccttcgtccccacgagcaaccgataatccgccggcgttgagatgttggtttatcaggatctcctatctggcgacgagctcctgtcggattcattcacctacaaggagctcgagaacggcgtcctgtgggaggtcgagggaaagtgggtcacccaaggtcctgttgatgtggacattggtgccaatccatccgccgagggtggtgaggacgaaagcgttgatgacacagctgtgaaggtggttgatattgttgacacattccgtctacaggagcaacctccttttgacaagaaatcatttgtgtcttacatcaaaaaatacatcaagaatctcactgctgtgttggagccagagaaagcggatgagttcaaaaagggtgtcgagggtgcaaccaagtttctccttagcaagctgaaggacctccaattttttgttggtgagtccatgaaggatgatgcgtctgtggtattcgcctattacaaggatggtgccactaatccgacattcctctatttctctcatggtcttaaggagatcaagtgctaggcgtgcggcgaaattagttacccatgttgggtactatctatgtactattattatatccaaaactatagttgtcctggctgaattgaactcaaaagggtttgtttgagaaaaaattgtcccaagattggattgcttgttaaagctc

SEQ ID NO: 27764 - DNA, 939 bp, Zea mays
  Clone ID: LIB4740-003-F7_FLI
ccaaagaagactgaatatgcttgatatacccgtacccaaactgccatacatgagagtagatagacagagaacatgaatcaaaacagagacacaagctgcagcggcacacatggggcaccgcgccccactaccaccaccagagaccagacgacgcacactttatttagcccatgtcactcgcagtccgcaccgggcactgctatagctacgactacgacacacacacagagagatggagagaaaccgtcgcgttcgcgttgtactgaacagcaagcccgtgccatgtaggcgcgcgcgcgacaaggctgccaggccacgcgctgagccatcgatctcccgacccgctgtccgccgccgcagtgcgcgcacggcgcacggcctcactcgctggccttctcggccacctcagcggccggctcggccttctcgggctcctcagcggccggctcagccgccgcgggctcctcggcagcagcagcctcgggctccgcggctgccggttctgcttctgtctcggcagcgggcgctgccgcttcctccttcacctcttcagccgccgccggctccggctccgcctcctttggcgtctcttcctccgcctccacgggggccgcctcgggctcagcggcggcagctggctcggtctccgccggggcagctggctcctccaccttggcctcggcggcgggagcagcctcctcgggcacggcggcggccggagccggggtctccaccaccggcgcttcctcggtcgccacgacggtcggggtctggacctcggcagtggccatgggtgacgatcagaaggctgatgactacacgaccgagtggctagctactagctagggctagagctagagcagctaaagaatgatcgagctgcaagagtgagcgatcagctgctgatcgggagtgggatcgctcgagctcgagtcccgg

SEQ ID NO: 27765 - DNA, 1129 bp, Zea mays
  Clone ID: LIB4740-004-C2_FLI
ccgggagctaccgcgacacgacgccgacgcgagagggcagggaacacagccactcgccgacgagaccccggcgcgcgcgagagaaagagaagagaggaggatcttttgttcgtgaaaaatattggaggcggagggaaggtgaaggagggggatcggagatgaacgtgttccggctggcgggggacatgacccacctcctcagcgtggtagtgctgctcctcaaggtccataccatcaagtcctgcgcaggcatatctctgaagacacaggagctgtatgcacttgtttttgcagcacggtacctggacctgtttgttcattttgtgtctctgtataacactgtcatgaagctggtcttcttggcaagttctttctcgatagtttggtacatgaagcggcataagattgtgcggaggacatatgacaaggatcatgacacctttcgccattacgttttagtgttgccttgtcttcttctggctctcctcattaatgagaagtttacttttagagaggtgatgtgggcattctccatttatttggaagctgtcgcgatatttccacaacttgtgttgctacagcggacaaggaatattgacaacctgactggccaatatgtcttcttcttgggtgcctaccgtgtgctttatatccttaactggatttaccgatacttcactgagccccattttgtccactggataagttggatggcaggaatagtgcaaactctgttgtatgctgacttcttcttttattacataatgagctggaagaacaatgtgaagctagagctgccagcttaaggttgctgctcctgtccccaagatatagtagggtaatatatcagataggcaggccccatacacagcatgatcattgctatcgccaactgggttatgaaaaaagcattttagttgcgtggcttgtatcgccttgtatctctctgctattgttggaagaacaggaaagtcaggctcaccatgtaactttttacaataagctgcgtaagatcagcactagaaggttgtgaattgtgatcgtccttagggaattttgtgctgatgtaaccctttcggcaagtgattctcatacaatataatctcagactataattggtaattgtttc

SEQ ID NO: 27766 - DNA, 1132 bp, Zea mays
  Clone ID: LIB4740-004-C3_FLI
tcccgcacgaatccgcgctccggccaacgggccaagccctagccacccccgcccattcatggtgggcgggccgtgagatctctagggaggcttgtcggcttcgtcgggcgggaggggaggagatgggcgcccggaacagcgctgccgccacgccggtgctgctcaacgtgtacgaccttacggccgcgaacgattacctctactggctcggcttcggcgtcttccactccggaatcgaagtccatggcacggaatatgggtttggagcccacgactacccatccagtggtgtgtttgaggtggaatcaaagagttgccctggctttatctacagaagaacagtgtggctaggcacaacagacatgtctcaggaagaattccgctcgtttattgaaaaacttgcaggtgattatcatggcgacacatatcatttaattaacaagaactgcaatcacttcacagatgatgtctgccagaacttaactgggaaacccatcccttcctgggtgaataggcttgcaagagtagggtcagttttcgattgccttcttccagaaagcgtacaagtttctcctgtaggtcgtgtcccaacgagtcggcgaatatctgatgatgatttgtattcaatacattcaccaatggccgacaaagatgacaatgatgaggacgaggccaaacacctgctgccagctccatccaacgaccagctttctgtagatgtaccgccaaagctagcgaaagatcttctctgaaccactccatgttcataggcgcctaccatacttcaactcatatagccattggtgctaaagtgatcctcaagatggcttgacacggatagggattgggcatatttgattaaagatgaagctctaatttcttgtggcttaccagtttgcagtttcaccttgctgtctcatctcagcaaacagttgtcatctatggtagtagtggcatgattgttaccctgccatttagcacatctggaaattgccaatttggaatgtggggttccggtacctgttaggaatcaggactgtcgatgcttgttgagccccagtgttgaaggcacatactgtaacatgttactatcaaaaacagtgtacatgtacatggctaccgagtatttgct

SEQ ID NO: 27767 - DNA, 1384 bp, Zea mays
  Clone ID: LIB4740-005-G7_FLI
ctcgaggccggccgggattcttcctcctcctcctcctcctcctcctccctctcactctcccgtcccttccccagttgcccttgccattgtttatcccggcctataactagtacaagaccgagcccgacccccggccactggagctgcagggccgcaggcggcaggcacgcacgcagggagagagatagataaaaggtcgcccccttgaggacagggcagggcagctgagggcaatgagcgctggcggaggcggcggcggcaccagcacgcttggcggcgggggcccgagcggcagcggcagcggaggccctggaggaagcggcggcggcgggccttgcggcgcgtgcaagttcctccggcgcaagtgcgtcagcggctgcatcttcgcgccctacttcgactcggagcagggcgcggcgcacttcgcggccgtgcacaaggtgttcggcgccagcaacgtgtccaagctgctgctccagatcccggcgcacaagcgcctcgacgccgtcgtcaccatctgctacgaggcccaggcgcggctccgcgaccccgtctacggctgcgtcgcccacatcttcgcgctccagcagcaggtggtgaatctccaggccgagctgacctacctgcaagcacacctcgccacgctcgagctgccggccccgcccccgctgccggccccgccgcagatgcccatgccaggcccgttctccatctcggacctgccgtcgtcgaccagcgtccccaccaccgtcgacctgtccgcgctcttcgacccgccgccaccgcagtgggcggcggcgcagcagccgcaccaccaccaccaacagccgccgcagcaccaccagctccggcaaccggcgccgtatggcgctggcgcgtccgtcaggcccggcggcggccccggcatggcagagagctcaggcggagacgagctgcagtcgctggcgagggagctccaggaccgccaccggtccggcggcgtgaagctcgagcacccgccgccacactcaagatgagctggatgggggagtagaaggatcaaaaacccgtgcagaacaaggtgagagttggcgcccggcagtatcgagggagataggggtcggtgacgggcgatgtccagcacagcaggagtaggtaagcagcattggccggttttcgcgtacccagcacccctgttgttaatcggctggggtgcaatggcggcgcccacttgcttgatatattctccagtttgatcatatttgctccaagacaaaagaaagagtgctggggatcgacgagagtattactagaattgacatgtattagtaacattattgttacctttgataccgttccattagttgcaggatttttattaagaaaagaatctcaacatggttac

SEQ ID NO: 27768 - DNA, 1292 bp, Zea mays
  Clone ID: LIB4740-005-H9_FLI
ctcgaggccggccgggtcagcgaggttttctgctataaataaggcatcgtccaggcaaacaattaatagggcaaagcaaatcaaggacgctctgcacgtactattcatcttccattgttgctttgctttgctttgcttaccggcaaccatggccagcactcgtgcagcagcaactctccttttgctcctcgcgctcgccggcacctcgtcggcgcagctgtccacgggcttctactcctactcgtgccccggcgtgtacggcgccgtcaagtcggtgatgcagtccgccatcgccagggagaagcgcatgggggcctccatcctccgcctcttcttccacgactgcttcgtccagggctgcgacgcgtcgctgctgctggacgacacgcccagcttccagggcgagaagatggccaaccctaacaacggctccgtcaggggattcgaggtcatcgacgccgtcaagtccgccgtcgaaaagctgtgccccggcgtcgtctcctgcgccgacatcctcgccatcgccgccagggacagcgtcgtcatcctgggtggtccgacctgggacgtgaaggtcgggcggcgggactccacgacggcgagcttcagcggcgccaacaacaacatcccgccgccgacgtcgggcctcgccaacctcacgtcgctcttcgccgcgcagggactttctcagaaggacatggtcgcgctctctggtgctcacaccatcgggcaggcacgctgcaccaacttcagagcccacatctacaacgacaccgacatcgacgctgccttcgcgagaacgaggcagtcaggctgcccaagcacctcaggcgccggcggcgacaacaacctggcgccattggacctccagacccctaccgtcttcgagaacaactactacaggaacctcctcgccaagaaggggctcctgcactccgaccaggagctcttcaatggcggagccaccgacgcgctggtccagtcctacgtcgggagccagagcgcgttcttcgcggatttcgtggcgggcatgatcaagatgggcgacatcacaccgctgaccggctccaacaacggacagataaggaagaactgcagaagagtcaattagcagatagctagctagggtcactaattaagacccatgcatggctgttgaactgcaagctaagtaaacactatgtgagatcgtcgcgtcgatgtgctcacatgtcgtctttttatttgggtgaaggatggatgcatgtatcagatcacttgttgtttaattaatgccatttcagtctttgtcc

SEQ ID NO: 27769 - DNA, 1269 bp, Zea mays
  Clone ID: LIB4740-006-A3_FLI
aggcagggagcagccacagcctgctagggagagacgcagacggcacatgaaaactacaagaaatccgctgcgaaactccggattaaaaataaggacttggccttctggaatcccccgctaaaccataggcgtgttctattggaagttggaacaaaaccatggagagtgaaatcatggcctcctatgaaacaaagcagaattgcgaaattagggtatttgagagttcagacgagatggcaacagatctggcagagtttatttcacaagcttcagaaatttcagttaaggaaagaggatgctttgctattgccctttctggaggtcctcttgttagacatatgcggaagctctgtgaagcaccatacaacaagacccttgattggtctaaatggtacatcttctgggctgaagaacgtgcagttgcaaagaaccatgcagagagtaactacagattaacaaaggaagaatttctctccaaggtgcctatccttaacggccacgtctactccatcaacgacaacgcgacggtggaagaggcagcgagcgactacgagttcgtgatgcggcagctggtgaaggtccggacggtgggagtctcggagagcaacgactgccccagattcgacctggtccttctgaacatcgggcctgacgggcacgtagcctcgctgttccccaaccacccagcgctggagctgaaaggcgactgggtgacctacatcaccgactccccggagcctccgcccgagaggatcaccttcacccttcccgtcataaactcggcgtccagcgtcgccattgttgccaccggagaggacagggcgagagccgtgtccttctccgtctctgcctgccaggaccaggaggaggaaggcccagcagacgacgacgctggaacgacgatgataccgccggctagcatggttcagccaaccgatgggaagttggtatggttcctggacgaggcggctgcttcgtctcttgaggcttcgaatggcgcttgcgagcatcaagaagggtactgagaacagactggatgctacctctgcgaacgccgcctactctctggtttcttcagagtcgaaagtttgcatgcagttggatgtgggcaattaagagtgaagcggtttgtgtgtttttatgtcaagacctcacgcatatcgcgcggagtagctaagctcgaccgtatattggttgcgacgtatgatccttgttttatttaagtgtgttggcggttttatcctacctgaaactagattccttcttgtg

SEQ ID NO: 27770 - DNA, 840 bp, Zea mays
  Clone ID: LIB4740-006-B3_FLI
ccggggcctcgaagctcccttcccaaattggcacgcaaaaaaaaactgactgttgctcctctctctctctccctctccatttgggtcccccttctctttctcatggcggcggcggcggcgtcgacgccgcagggagtggcggagcggcggggcatcccggcagcggccttcgttgaggacgttgaggcctacctccgccaggtcgggctcgacgtcaattccgcgctcgcttttctccaggaaaggctgcagcagtacaaaatagtggagatgaagcttctagcacaacaaagggatcttcaggcaaagattcctgatatagagaagtgcttggatattgttacaacattacaagctaaaaaggatttgggtgaggcactcatagctgatttcgaattgtccgaggggatctactcccgtgcaaaaattgaggatactgactcggtgtgcctgtggttgggtgcaaatgtgatgctggagtactcttgcgatgaggccaatgccctcttgaagaaaaacttggaaaatgccaaggccagcttagaagtccttgttgctgatctccatttcctgcgagaccagcaaaccatcactcaggttacaattgctcgggtattcaactgggacgtgcaccatcggagaagcaaacaggccgtaaaagaaacctgattacttacatcacgaggccgaccaatgcgactgggactttttttttttgtaccttctgctacctctggcagattagcccgtcatagcaagcagtttgttgttgtatcggtttgttcagagttttacggtgtgggaacattagtagaaatgtcatttcactgccttcctttc

SEQ ID NO: 27771 - DNA, 1021 bp, Zea mays
  Clone ID: LIB4740-062-A12_FLI
ctcgaggccggcctgtagtgtagcgccccccgactcccgagcagcaaccaaccagcaaccgagccagccatgtcgcccacccctgcgccggccgcccgcgccggcgaggagctgccgtccactgaggtggtggtggtccggcgcggcgagaccgcgtggaacgcctcccgcgtcgtccagggccaaatggacccggagctgaacgaggccggcaggcggcaagccgtcgtggtggcccgccggctgtcgagagaagccaagcccgccgccgtgtactcgtctgatctgcggcgagccgccgagaccgccgagaccatcgcgagggcctgtggcgtatcaaacgtggtgctgacggaggcgctccgcgagaggcacatggggtacctgcagggcctcaggtgggacgacgcggtggacaagagcccggactccttgcacatcgtcaaggtcatcgagggctctgaccccgacagcagaaaccaggagctgcccggcggtggagagagcctgaaccagctgaacgagcgttgcgtctgcttcgtgaacaagatcgcgcaagaacacgccggggagcgggtggtggtggtctcccacggcgcagcgatactggagctctgccggcacaccgacccgccgggcagctgcgtccgcaggcacgtccccaacacctcgctcagcgtcttccgcgtctccgccgccaccgggcagtgggcgctcgagaggtgcggggacgtcggccatctcaagggacacggagacggagacggcttcctggagggctcgttcgggggcgacggggcctcggcgtaaacgtacgtacaggccgatcagccgagagctcgcaccagtcttcctttggatcgaaccattctttggttccgatgctgtttggagcttgtattccattgtttttcaaaaagagaaccaaccattggagtttgaaacgttgatcaatttgtggtttacagccttttgctgtagcgccatgcatggcgtttgacaaaactgcggtatctctgag

SEQ ID NO: 27772 - DNA, 859 bp, Zea mays
  Clone ID: LIB4740-064-A6_FLI
ccgggacttctctagtctagcccctctgtcgctctcagacgacgggggcgccgccgccgccgccctaagccaggtgctgactgctgaggctttctttggtctcttcgccggcgacgacacccgccagtatccacggtgtcattgcaagacaagatggtttccttcgagatgaatgacctcaagaagattgggcttggcctgacaggctttggaatattcttctcatttctgggaattgttttcttctttgataaggggctcatcgcaatgggcaatattcttttcctgtcaggtttgggtttgacaattggtctgaaatcaactatgcagttcttcaccaagccaaagaattacaagggtactatctcatttggtgctggtttttttctggttctcattgggtggccgttttttggcatgctcttagaggcatatggctttattgtactcttcagtgggttctggccaacactttctgtgttcttgcagaggattcctatcatcggctggattttccaacaaccatttgtgacatcgttccttgaccgctacagaggaaaacgtgttccggtctagcaacctttgcggtgtagcaactagcagcctgtattttttttaactacagtagcaaactgattataccgatgtctgacccctcatgtttatatgttttctttaggattgctctttgtaaattacagccccaaactggccaaatcaaaggtccattcctttgagaccagaatgcaggttcacccatgaaatggatctgttgaagaaactcttaagcttgtatggaagtaaaagctaatatgttcctttatatgataatataagttatatattattgtgtggaccc

SEQ ID NO: 27773 - DNA, 646 bp, Zea mays
  Clone ID: LIB4740-064-B5_FLI
ctcgaggccggccgggaggccacttaccagcagtcaccactcccaagccagtaccgagtcctacgagcagtcgcacgcaagtgtcaagagacgaaacggtcgacatggctcgcacgcaatctgccgtagcggtcgccgtggtggccgcggtgctgctgctggcagcggcggcgacgacctcggaggccgccatcacctgcgggcaggtgagctccgccatcgcgccctgcctctcctacgcccgcggcacggggtccgccccctccgcgtcctgctgtagcggcgtcaggaacctcaagagcgccgccagcaccgccgccgacaggcgcgccgcctgcaactgcctcaagaacgccgccaggggcgtcagcggcctcaacgccggcaacgccgccagcatcccctccaagtgcggcgtcagcatcccctacaccatcagcacctccaccgactgctccagggtgaactaaaacctagaccacgcgcgacgacggccgcctgatcgatcgaccaaccattccgccgtcgccgccggccggatcatcgatcgtcgtcatgatgatatctatcaatctacgcgtgatgatcgatgactacttgtctactgctatgtactactaaataaaatctctccgtgtgtacacgt

SEQ ID NO: 27774 - DNA, 1252 bp, Zea mays
  Clone ID: LIB4742-013-A12_FLI
agagcagcatggagacggcggagaggggcaccaccgtgtgcgtgaccggcgcggggggctttgtggcatcgtggctcgtcaagctcctcctctccaccggccgctacaccgtccggggtaccgtgcgtcatctcggtgatggcaagaatgcccatcttaagacactggaagatgccggggagaggctgcagttggtcaaggctgacatgctggactatggcagcgttgcgtccgcggtcgccggctgtcagggtgtcttccatgtcgcgagccctgtcccctctggcaaatcctccaaccctgaggaagatgtcattgctcctgctgtaactggcacactgaatgtgttgaaagcttgctatgaggccaaagcgaagagagttgttgtggtatcttcagtggctgctgtgttcaataatcctgactggcctaagggcgaggcctttactgaggatagctggtcagatggggaatattgcagaaaaaatgaggaatggtatttcctttctaaaacattggcagaacatgaggcttttgcttatgcagccaaaactgggctagacattgtaactatttgcccatcattggtaattggacctttgttgcaacctgcagtaaatacaagtattaaagtcttcctcagttatatcaaaggagatcaggagatagttaaagatggacccaaaaatcttgtggatgttcgtgatgtcgctggtgcccttctgttggcttacgaaaatctgcaggcatctggacgatacctctgcagctcaccagcaataagagtctctgatattgtaaacatactgaagaccgaatatccaacatacacttaccctcaaaaattcgttgaagcagaaggtagcaacacatacaacacggagaagcttcggaagctagggtggacctctaggcccatggaggaaaccctccgggacagcatcgaatgctacagagctttgggcatcctgaactgagcttcccttcagctttgggctttggctgctgctgctgctgctacttttcagcttctttcttcttcatgtaaacagtgaatcagaaattcagaatacgctggtataggaactagagaagtggatcatggaagatgctgatgctaaaaatgaatttggatactatccatcatttgtgcctgcgggattgagggcaaattaattaagtacttatatttgtaaatctggggccgtcgaactgaaccaacaatgaagaggtgaagaacaaatcgaagtgt

SEQ ID NO: 27775 - DNA, 1558 bp, Zea mays
  Clone ID: LIB4742-013-A4_FLI
ccgggagccgagccggttcaaccccatgaataccgctgctgcagagatcacggcctgcttctgcgtctgcagctccagcagtagcaacagcaggggctgcagtgcaaacgactgctagttcccctttccccgcatgatctctgccccttcccctaccttctcttgttcttgcttgcacgacccttttccttgtgcgctagctgccgcttcttcttcgtcttcctggagctcctcgcatccacacatgccccaagaaccagacaataaaacaacacggaaccatcggagtctttttctactactatttccagcgattttattatatggatgtgtgcacaggtgcacgtagataggtagaatagaagggagattatagctagctagaggcagcgagcagctcggttgctgggacacgcgatcgagctacagcaaagaagactgcagggtggcgcggcgggcatggaggatctgtacagcatccacccggggatctcgcgccacggggcggcggcggctagcgaggcgtccggggtcgccggtggaccgggctcacccccgcccccgcccccgccggcggcggatctgacggagctggtcaaggcgcagatcgccgggcacccacgctacccgtccctcctctccgcctacatcgactgccgcaaggtgggcgcgccgtcggaggtggccacgctgctggaggagatcggccgggagaggtgcgccgccgcctccgccggcggggaggtcgtcggcatggaccccgagctcgacgagttcatggagacgtactgccggttgctggagcggtacaaggaggagctgtcgcggccgttggacgaggcggcgtccttcctcagcaacgtcaggacgcagctcagctccctctgcggcggcgccgcctcgctctccgatgaaaatgaaatggtggagtcctctgagaacgagccatgctcaggcgacacagacgcgacgacagacccagggcaggagcacagctcgcgcctggccgaccgcgagctcaaggagatgctgctgaagaagtacagcggctgcctgagccggctgcggtccgagttcctgaagaagaggaagaaagggaagctgcccaaggacgctcggtcggcgctgatggactggtggaacacgcactaccgctggccgtaccctacggaggaggataaggtgaggctggcggccatgactgggctggacccgaagcagatcaacaactggttcatcaaccagcggaagcggcattggaagccgtcggaggacatgcggttcgcgctcatggagggcggcgtcgccggatcctcctccgggacgacgctctacttcgacacgggcaccatcgggccgtgatcacctctgacgacaagccgtttcgaattgagggcaaattgttggttgatacggagatcagttcattttgtcggattcattgtgtatatgcatgggcgacaacgtgtattgtcgggtacacagtatgtagtggcatgtaaagacaccgtaacaatataacatgaattgtttaattgcctgttgcattttgatcaag

SEQ ID NO: 27776 - DNA, 1099 bp, Zea mays
  Clone ID: LIB4742-013-H8_FLI
taccctcgaggccgggccgggaacccctctccttcgtttgcccatcctcgtgacggctcctcgccagtcgcctcgtctctccctgccgcgtcgcctcgcctctccctgccgcgtcgcctccagttccgacgccagcgcgcctcccgcctccgccgcgcctgacgaacgcagtgtaggactgtgcaggtagagaggaggagggtccggcgagatggggatgcgagataagaagcggaaccagaagcgagtgctcgcgcgccgtaccgcggtaccgcgcccaggcgagggcaaggacttcctgccgctggaaggaggccccggtaagaagctccggaaggtgcagcagcctgaagagcccgaaaacacagccacagtcgtctacattgggcatatcccccatggtttctacgaggacgagatgaaagggttctttaagcagtttggggatattaagaggcttaggatcgctcgtaaccgcaagacaggaaagtccaagcactatggattcattgagtttgagaaccctgctgtggcaaaggtcgtagcagatgagatgaataactatctcttgtttgagcgcaccttgcaagttgcacttgttgagccggagaaagttcatcctaaattatggaaaggggtgcgaaggggatttatacctgttgatcgagtagcaattgaacggaagagacacaacaaggataagactgtagcagagcacaaaaagatggttgaaggaattgtaaagcgggatggaaagcgtcgcaaaagaatcaaggcagctggtattgactatgagtgtccagctcttatagggagcattcaaccatcagcgaaaaagatcaagttcgatgaggcatagtattttactctaatttactctaatgggttgttggatccttagtagacgaggcggtggaatggttgagcaatatattcaccttttgaggagacggcagacaactatgtatttcacttttgaatttctctatgttttatgaatgacaccgacacagatgttacaacttaagtatgaaaatgcaatgagctgtgttcttcatttgcccttggaaggttccatataacattgtgttcttaattc

SEQ ID NO: 27777 - DNA, 717 bp, Zea mays
  Clone ID: LIB4742-016-C5_FLI
ggccggccgggcaagcgccaccaatctcgccttccgaggaaactcaccagcccaccacagacccgagcggaagaagccatgtccgggcgcggtaagggtggcaaggggctcggcaagggcggcgcgaagcgtcaccggaaggtgctgcgcgacaacatccagggcatcaccaagccggcgatccggcggctggcgaggaggggcggcgtcaagcgcatctcggggctcatctacgaggagacccgcggcgtgctcaagatcttcctcgagaacgtcatccgcgacgccgtcacctacactgagcacgcccgccgcaagaccgtcaccgccatggacgtcgtctacgcgctcaagcgccagggccgcaccctctacggcttcggcggctaggctgatgggctcctcgcgatgttctccccttctgcagatgcgacgttttctggccgtgcccacaagtcttgcggtcaagaaagtttcaggaactcttgttagttcatccctggctttggtaggtttatctgaatcgtgagactagtaggtttatctgaatcgcgaggctagcaggtttacctgaatcatgaagcagtgataaaattatgtgagcatcggatgttgaaaatcgagcttgtaatgcaatttgttactcttgatgcaaatgaatggtctggtcgttacttctgtagttacgattttaaactggtgattgttgcgtttctc

SEQ ID NO: 27778 - DNA, 1257 bp, Zea mays
  Clone ID: LIB4742-033-E4_FLI
ctcgaggccggccgggggcggcccactcgctctcgctctacctccccgtcgtcacgcgctcgcctgtgcccctagcgtttcgccacctcctgctcccgcaccgcctccggctccgcctcgcctccgccgtctccccatcccgggcgcggcccctcggcctcggcgcccgcccgccccgcccccacgccgcacccctcggctacggagttggtgcagggagaaggccgagtggtggactggaccacagagccatgtcaagttccacaaattcaacagtggccacggagttgtcggtgtctgagaatagcagggaaattgagccgctaccttttgtgaatgacaaacatggaggcgtcatcattgagatgaagactccaatggatcctggagtgttttcagcttacttgaaagcagcgctggcaaaatggagggagcagggaataagaggtgtctggatcaaattacccatcaccctttccaaccttattccaacagttgtagaggaaggtttctggtaccatcatgcagaggaaacttacttgatgcttgcgtactggcttccaaatacaacacatacactaccagtaaacgcaacccaccgtgttggtgttggagcttttataatgaatgacaaaagagaggtcttggttgtacaagaaaagagtggtgtacttcgaggcctaggtgtgtggaaatttccaactggcgtagttgaaccgggggaagatattaacgttggagccataagagaagtaaaagaagagaccgggattgatgcagaatttgttgaagtgctggccttcaggcagagccacaaagctttttttgataaatcagatctatttttcgtgtgcctgctacgaccgctgtcatatgacattacgaagcaagactcggaaatagaagcatgccagtggatgccagtagaggaatttgcagcacaaccatttgtccagaaacatgagcttgtgaagtacatcctcgaagtaggcctggctaaagttgacaagaaatatgcagggttttcgccaatctccataaaatcggcgtttacagacaaattgtccttattttacatgaaccggagggacctggacaaagcctcaggatagagtaatatgtaattaaacacagggaattcaagatagttgaaatttcagttctggtatgtaaaagcaggccaagtcatattcatacttgattattttgttaacaaattggaagtttcgggcatccgacacttgtgatttttcgact

SEQ ID NO: 27779 - DNA, 1236 bp, Zea mays
  Clone ID: LIB4742-034-B11_FLI
ctcgaggccggccgggagactgcgaggccgagacagaggggatagattgagagagccagagaggtgggcagatggcgacaccgtcgtcgtcgctttgctccagcttcgcctccctgcggaccgcctccatcggccacccccgcggcatcgcgtcatctacacccaggaaggcgttccaagtgagggcatcagctcgggttgacaagttctcaaagagtgatatcattgtgtccccttcgattctgtctgcaaacttcgccaagcttggtgatcaggtaaaagccgtggaggtggcaggatgtgactggattcatgtcgatgtcatggacgggcgctttgtgccaaatatcacaattggacctttcgttgttgatgctctgcgtcctgtgactgatcttccattggatgtacatctgatgattgtggaacctgagcagcgagtccctgattttatcaaggcaggtgctgatattgttagtgtccactgtgaacaaacatcgaccatccatttgcacagaacagtcaatcagattaaaagtctaggagcaaaggcaggagttgttttgaatccagcgactccactcactgcaattgattacattcttgatgttgttgacctggtgttgattatgtctgtgaatcctgggtttggtggccagagctttatcgagagtcaagtaaggaaaattgcagaattgagaaggttatgtgcagagaagggagtgaaccctggattgaggttgatggtggtgttggtccgaaaaatgcccacaaggttattgaagctggggcgaatgccatcgttgctggctctgcagttttcggggctccagactacgctgaagctatcaaaggaatcaagaccagccaaaggcctgcagctgtacacgcataaggaactggacgtgtgatcgtgctctgttcaggtttagcagtgttgggattcgtatagatagatgtgtcttgttttcgagccatacgttatactggagatgaaaggagacggaggaaatatttctctacgtgggtgaatcaatcatgtggacggtaatcacatgacgacaaagcatatggacgagcgctggctcacgagacagagtaatcaacgggagaggcttctagacagctctgcatgtccattccctctataaacaggagagcagttcagtctccattgtaaaggcacccagatatagaagaaagaaataaagagctctctatttgtctcaaaaaaag

SEQ ID NO: 27780 - DNA, 593 bp, Zea mays
  Clone ID: LIB4742-036-C3_FLI
ctcgaggccggccgggaccagagtcaccgcggcgggttcaaatctcacaatcttcttgtagcacaccactgtcttcgtccaactcggcggcgatgtctgggcgcggcaagggcggcaaggggctgggcaagggcggcgcgaaacgccaccgtaaggttctccgcgacaacatccagggtatcacgaagccggcaatccggaggctggcgaggaggggcggcgtgaagcgtatctccgggcttatctacgaggaaacccgcggcgtgctcaagatcttcctcgagaatgtcatccgcgacgcggtcacctacaccgagcacgctcgccgcaagaccgtcaccgccatggatgttgtgtacgccctcaagcgccagggccgcactctgtacgggttcggtggttgagcgcatctcttccctcgtctgcagcggctgccggtggcgtttcctcagttccctctgccttgcttggcttgatgtagagagttatcagattaaaatatctctgatgtgcttcgttattgggtggaatcatatcgagatcaagatgtatctttctttgcagtaatgaaatgttaaaatcgagatcaaaag

SEQ ID NO: 27781 - DNA, 1913 bp, Zea mays
  Clone ID: LIB4742-064-F10_FLI
ccggggcacacagacacacaaacacaagtcgtcgtaggcagcgagcgtctctcctctcccacgcatcgcgccaaggaagagagagagatcgccgctccccttctcggcgtcggtggtgcgggtgccctccctcctcgagcgagatctgtctggtcacagatctatctgacaaaatggtgaagatctgctgcatcggtgctggctatgtcggtggcccaaccatggccgtcattgccctcaagtgcccagacattgaggtcgtcgtcgttgacatctccaagccccgcattgaggcctggaacagtgacaccctgccaatctacgagcctggtctcgatgatgttgtgaagcagtgcaggggcaggaacctcttcttcagcactgatgttgagaagcacgtcgctgaggctgacattatctttgtctcggtgaacacccccaccaagacccgtgggcttggagctggcaaggctgccgacctcacctactgggagagcgctgcccgcatgattgcggatgtctccaagtctgacaagattgttgttgagaagtccactgtccctgtcaagaccgctgaggctattgagaagatcttgacccacaacagcaagggcatcaactaccagatcctttccaacccagagttccttgcggagggcactgccattgaggacctgttcaagcctgacagagtgcttatcggtggccgggagacccctgagggcaggaaggccgtccaggctctcaaggatgtgtacgctcactgggttcccgaggacaggatcctcaccaccaacctgtggtctgctgagctctccaagctcgctgccaacgcgttcctggcacagaggatctcctctgtgaacgccatctccgccctctgcgaggccaccggcgcgaatgtgactgaggtggcttacgccgtgggcaaggacacgaggattggccccaagttcctgaacgccagtgttgggttcggtgggtcttgcttccagaaggacatcctgaacctggtgtacatctgcgagtgcaatggcctgcccgaggtggccaactactggaagcaggtgatcaagatcaacgactaccagaagagccggttcgtgaaccgcgtcgtgtcgtccatgttcaacaccgttgccggcaagaagatcgccgtcctcggcttcgccttcaagaaggacaccggcgacaccagggagaccccggccatcgatgtctgcaagggcctgctgggtgacaaggcccagatcagcatctacgacccccaggtgacggaggaccagatccagcgggacctagccatgaacaagttcgactgggaccacccgatgcacctgcagccgacgagcccgacggccgtgaagcaggtgagctgcgtgtgggacgcgtacgaggccaccaagggcgcccacgggctgtgcatcctgaccgagtgggacgagttcaagaccctggactaccagaagatcttcgacaacatgcagaagcccgccttcgtcttcgacggccgcaacatcatcgactccgagaagctgagggagatcggcttcatcgtctactccatcggcaagccgctcgacgcctggctcaaggacatgcccgcggtcgcctaatcccacccccctcacccatggattggattccgggaaggaagaggagagaagctggttgaccgttctttattacagtttgtttttgcaggctacgctaccgattttctcttgtgtcaggcataaaaaaaggttggacgggctgctagtattccctgctgtttggtgttttcgtatcggaggacgtctgtagatgtacaattcctcaggccccttgtgttcggcttgaggaagtttccgttgtaccctggacctgctatagccggttgattcttcaattgtattcctaaaagttactac

SEQ ID NO: 27782 - DNA, 989 bp, Zea mays
  Clone ID: LIB4742-064-F12_FLI
ggccggccgggctctctgtctctctagggtttttgattttagccgccgccgctgctcatctcacatccctcgagaagacgcctgctcctcgccgatcgatacgatggccgtcttctccgacctccacaccgccgacggcctcaagtccctcgaggctcacctcgccggcaaaacctatgtgtctggtgactccattactaaggatgacattaaggtcttcgccgcggtgccgtcgaagcctggcgctgagtttcctaatgccgcccgctggtacgagaccgtctctgcggctgtagcctcaagattccctggtaaggctgttggtgtaaatctgcctgcgggatcagctcctgcggcagctgctcctgcggatgaggctgaggatgatgatgaccttgatctttttggtgatgaaactgaggaggacaagaaggcagctgatgagcgtgctgccgctgccaaggcctcttctaaaaagaaagaaagtggtaaatcctccgtccttatggatgtaaaaccatgggacgatgagactgatatgaagaagctggaggaggctgtccgcagtgtccagatggagggtctgacttggggagcatcaaagcttgtgcctgttggatacggcatcaagaagatgactatcatgttgacaattgtcgacgatcttgtgtccatcgacactctaattgaggaccaccttacgcaagagcccatcaatgagtacgtccagagttgcgacattgtggctttcaacaagatctagagttcagtttctgagtttgggcaacggcagcggctcagctcgtcaagtttgtgctgggatgccagtttatcccttctagtctattacagaaacgttgttcggagctgagtctattataaacatcttggtctgagtttattgttgagtggtgccagtttttttcaatatacatttatcttaaaaacagcggtactgatgtttttttgtctaaagttaatgagtttgc

SEQ ID NO: 27783 - DNA, 1074 bp, Zea mays
  Clone ID: LIB4742-064-H9_FLI
ccgggataccaccacgcctagactgtgcctgcatccctcatcgctcggctcaatcgctgatcagttctgcggccggcgacgtgtgctagctcacgacgacgacatggtttccccttcagttcctctcctttaatttcggtcgaatgtatcacgactactggagctgatgacagcgcaagtcacaataagcaaacataatctctctgctcgttttcctctgtgtcgtcctgccgcgcgcagggctcggcggtgaagatcgggacgtggggcggcgacggcgggagcccctgcgacatcacggtggcgccgcggcggctggagagcatcaccatccgctggggcaaggtcctcgactggatcgccttctcctaccgggaccagagcgggaagctgcacaccgccggcccctggggcggcaacggcaaaggagagggcacggagacggtgagttcttcttcttcctcttcttcgcctttgcattgacgagcagacatgaggatccatccatctacatcttgcacatgctgcacgcagatcacactggaggcctcggagtatgtaacgggagttgcctggtccgtgggcccgttcaagttcaagaacgtggagcgctgcatcacctccatcaaggtcgtgaccaacctccgcagctacggccctttcggccacggggtggacagcacgcaccacagcttgcccgtgatcgacggcagcgtcgtcggcatgttcgcccgcgcaggggattttctcgacgccatcggcttctacgttctcccagatgccctccctgctctaaaaccgacgacggaccctgctgaacaagaagaaaaagaaaaggactctggccatgaacagaatgggaaggcaaaatctaaccaagaagaaaacgaggactccaaaaacgagaaggataaaccctgcttgtcgtagttcgttttctactacaaaaaatgaatcctaatctttgtcggatatctgtttgtgctcttgttgtgagtctcttcagctattgttccaactattaatatatatgtacatgcgtgggagctatgcattgtaataatgaattttcag

SEQ ID NO: 27784 - DNA, 996 bp, Zea mays
  Clone ID: LIB4744-012-C2_FLI
taccctcgaggccggccgggctgctgccgctgcatcttccactcgcgtcaagaaacgaaacccagctgcaccagcaacttctgccagcagacccaacgaccgaagctttttttttctttcttttcatcgccgccgctcggggttcaaggttcagcgcgtccccgaatgacgggcacgtacgaggcctccgaccgtcctcctcctcccaactccgccggctaccggaccgacaaagtccggcgaaagcggctgacggcgcagaagaggaaagagatcaaggaggcgttcgacctcttcgacatcgacggctccggcaccatcgatgcaagggagctgaacgtcgcgatgagagcccttggattcgagatgacaccggagcaaatcgggcagatgatcgcggaggtggacaaggacggcagcggcaccatcgacttcgacgagttcgtgcacatgatgacggacaagatgggcgagcgggacgcccgggacgagctccacaaggcgttccgcatcatcgaccaggacgccaacggaaagatctcggacatggacatccagcggctggccatcgagaccggcgagcacttcacgctggacgaggtccgggagatgatagaggccgccgacgaggacggcgacggcgagatcgacctggaggagttcatgaagatgatgaagcggacagactttggctctgggttctagtagtcacagacaagccaatcccaacatacattgatacataccatcggtgaaaaatacatatcacctagctactacgctacatatgactggagtattgggatttatttgagaaataatggcgtacacacaccacacatcattgtgcactaactactctagtacgtcctagctacgggttgtgtatttatttacacgtaatgaaacacatactactatttgtactgtcgtttttcagtaaaaaccagtaaaaatcgatatttttattggtggctattttggaatagccagtgg

SEQ ID NO: 27785 - DNA, 1470 bp, Zea mays
  Clone ID: LIB4744-023-G4_FLI
ctcgaggccggccgggagtctcgatggccgccgccgactcctccccgctccacatcgtcattttcccttggctcgcgttcggccacttgatccccggcctcgagttcgccgagcgcctcgcagagcacggccagcgcgtgtctttcgtctccacccagggcatcctccgcaggctccgcccggtcgcgcccgcgttggcctcgctcatcgacttggtggccctcccgttcccgcgcattgacggcctccccgatggcgccgaggccactagcgacctcccgcccggcacggccgagctccacgtgcaggccatggaccgcctcgccccggccttctccgccttcctcggtgccgcctgcgccgacgggagcgaccgcaaggtggactgggtgctcctcgacaacttccacgcgtccatggcggacgtcgccagcgagcacaaggttccctgcatactgaacatgccctactccgcggcgacgacagaggatttcggcattccagacccgtcggttctaccaatgttccggccatttgtggagaccttcaagagatgcaaagtcatcgctgctcgtagcagcttcgagttggaaccggagtccctgcctctcatgacaaagatcctcgggaagccggtcatccccgtgggcctacttcctccggcgcccgccggaggcaacacgcagcgcgacgacagcgcagccctgtcgtggctcgacgagcagccgtccaagtccgttgtctacgtcgccttcgggagcgagtacccgatgaccgtcaagcagctgcacgagatcgcgcgcgggctggagctcgccgggacgcgcttcctctgggccctcaagaggcctagcgtcgcccaccccgacgaggacctcctgccgccaggtttcgaggagcgcacgcgcggccgtggctccgtcgtcacgggctgggttcctcagaccagcatactggggcatggcgccgtcgccgcgttcatgatgcactgcggctggggctccaccatcgaggcgcttcagtacggccatcctctggtcatgatgccagttctcgtcgaccacctgtccaccgcgcgggtgatggagcagcggaaggccggagtcaaggtgcggaaggagaagagtgacgaagcgttccttggtgacaacatcgccacagcgatacgggctgtcatgtgcgaagaagagagcaagaggatctttgtggccaatgctaagaggatgcaggagattgtggcagacgacgagtgccacaagaggtacatagacgaattcgttcagagcctgagaacctacaagaactgaaacatgcatgctgagtgcactcaggcagcatacttggcaatggcattggcgttacacaagtgatccgctggactccagctaatagtacgatgtatcttattttgctgcaatatgtaactttatcattgtttggttgtaaaaatatttgaatttgtttctcgtg

SEQ ID NO: 27786 - DNA, 1088 bp, Zea mays
  Clone ID: LIB4744-024-B3_FLI
ctcgaggccggccggggaatctggagctggttagcttctgccgagtcgctcccccttccagggtctcaaacgcaaaccccaatctcggcgtcaccgccccaaatctagcaaacggaaatcccatctcgccgccgccgcgatgtctcgccgctatgacagtcgcacgacgatcttctcgccggaggggcgtctctaccaggtggagtacgcgatggaggcgatcggcaacgccgggtcagccctcgggatcctggcggccgacggcgtagtcctggtcggcgagaagaaggtgacctccaagctcctccagacctcccgctccgccgagaagatgtacaagatcgactcccacctggcgtgcgctgtggcagggatcatgtccgacgccaacatcctcatcaacaccgcccgcctccacgcccagcgctacgcgctctcctaccaggagcccatccccgtcgagcagctcgtccagtccctctgcgacaccaagcagggttacacccagttcggtggcctccgcccctttggggtctccttcctattcgccggttgggacaagcaccacggtttccagctctacatgagcgacccatctggcaactatggcgggtggaaggccgccgctgttggggccaacagctaggccgcgcagtccatgctcaagcaggactacaaggacgccttgacccgcgaggaggccgtcggtctcgcgctcaaggtcctcagcaagaccatggactccaccagcttgactgccgagaagctggagctggccgaggtatttctgcagcccgacaccggggaggtacagtaccaggtgtgctctcctgaggcgctggggaagctgcttgcaaagtccggcctgacacagccaacacccgaggcataatgtactggtttgctgtggcatgtgatgccttctactgctcttagacatggtttaagcagttatgcttctgttgtgtgaacttaaatattcgacaattatgtgttctatttttgtgttgagcatccttgatccgttaatgtttcatctgtaatagtgcattgcattgaattggttgcaaattgttgatttctatctg

SEQ ID NO: 27787 - DNA, 763 bp, Zea mays
  Clone ID: LIB4744-077-H8_FLI
ccgagaaaacttttccggcctcccattcctcgcgcggcgaccacccgattcgaagcgtgcggagagaccgaagaagcgggagagatggctcgtaccaagcagactgctcgcaagtccacgggagggaaggctcccaggaagcagcttgccaccaaggctgcccgtaagtctgcccccaccactggtggagtgaagaagcctcaccgctaccgccctggaactgttgccctccgtgagatccgcaagtatcagaagagcactgagctgctgatcaggaagctgcccttccagaggctcgtcagggaaattgcacaggacttcaaaactgatttgcgtttccagagccatgcggtgcttgccctccaggaggctgctgaggcataccttgttggcctgtttgaggacaccaacctgtgcgccatccatgctaagcgtgtgaccatcatgccaaaggacattcagctggcaaggaggatccgcggcgagagggcctaatcgccacctcaaacatcgtgacaaaaacatgaagtcctggggttattgttaatctggtgccattgtaaggacatatgagtagggtttgttttgtggatcgcaagtttctcttctgctactgttgctgctacctttgctggtgttattgctagggtcgaaacttaagttaactatgcgctgacagtctggactagcagtgttatgtgcgctgctggaccttgcgcgcaatgctgtggccgatttgttcgttaatgtcaagaattgtgtt

SEQ ID NO: 27788 - DNA, 848 bp, Zea mays
  Clone ID: LIB4744-079-B6_FLI
ccgggccgcaggaccggtcactcggcacgcaggctagcagcacagcagcagccagagccatcccctctcctcgctacgcttcgcttcctcggcgccgattcctcctcctcctcctccaccctcgtccgtccccttccggcgcgcgagctcgcccgagatggcgaacgcgagatcgggtgtcgctgtgaacgatgagtgcatgctgaagtttggcgagctgcagtcgaagaggctgcaccgcttcataactttcaagatggacgacaagttcaaggagatagttgtggaccaggtcggggatcgcgctaccagctacgatgacttcacaaacagcctccctgagaatgactgccgatacgcgatctatgatttcgactttgttactgcagaggatgtccagaagagcaggatcttctatatcctatggtccccatcctccgccaaggtgaagagcaagatgctttatgcaagctcaaaccagaaattcaagagtggcctcaatggcattcaggttgaactccaggccacagatgcgagtgaaatcagcctcgatgagatcaaggatcgggcacgctaggcgcaccgccatcgcgagtttcatggtcacgcatcatggactcgcctactactgtggatttgtacgccattatagacttggtgctgcgaaagactgctttggtgatttgtgggtttgttgctgtgtaaaaagatcctcatggcttccagaagaccatgaaggtttggatctatcatgtaattccttgttatctgccaattatgtatggactatggacatgtgttgcgctgttcaactcactacaaataagtaatcgatatattccctacac

SEQ ID NO: 27789 - DNA, 956 bp, Zea mays
  Clone ID: LIB4740-006-D5_FLI
ccgggcccatttcgaagcccaccgaattccctgcgattcctctcccctcgcctcctcgtctccccctaggggatcgtcggagaggaatcgcaaagagggccgtctcatccgagttaaggaagccatggagcacaaggaggctgggtgccaggcccccgagggacccatcctctgcatcaataactgtggcttcttcggcagcgcggcgaccatgaacatgtgctccaagtgccacaaggagatgataacgaagcaggatcaggccaagctggctgcctcctctatcgacagcatcgtgaacggcagcgacgccgtcatggagccggttgttgctggcagcaacacggtagtagctgttgcccaagttgagttgcaaacaatgaacgtgcagcagcccgctgatgttgccggacccagcgagggggtggcggcgatctccaaaggggggaaggtagggccgaaccggtgcagcgcctgcaggaagagggttggacttacgggattcaactgccggtgtgggaacttgtactgcgcactccaccgctactccgacaagcacgactgcaagttcgactaccggactgctgccagggacgccattgccaaggctaatccggtggtgaaggcagacaagctcgacaagatctagggggggttccctacggttgggtatcaggaagattaaaccgcggtaactcgtcatgcggaactgctgccttgccccccgcgcctttctcttccatgtttgctgctacaatcttgttgttgggcattgcagtgcacggtgcacacttgtgtagcccgcctccgagaattctcctgcctctgcatctggtcagttcaaaaatgatttgcatgttggctatgttgtgtaagctctatttatggtggtctcgctgagacgggtatttggcttcgcagttatctagctatgtgatgtactgttgtcttgtccc

SEQ ID NO: 27790 - DNA, 736 bp, Zea mays
  Clone ID: LIB4740-006-D7_FLI
ctcgaggccggccggggagccgcccatttgcgccgccgcagcccgcagtcgcttgcgcgcagcagcacttcgcaccgccgccccatcccatcgccgccagtgtctgctcgatccgatggctcccacgaagaagtcgaagaagagcacagagagcatcaacaacaagctgcagctggtgatgaagagcggcaagtacaccctgggctacaagaccgtcctcaagacgctgcgcaactccaagggaaagctgatcatcatcgcaaacaactgccctccacttaggaagtctgagattgagtactacgccatgctggccaaagttagcgtgcaccatttccacggaaacaatgttgatcttggcactgcctgcggcaagtactacagggtgtgctgcctcagtatcatcgacccaggtgactcggacatcatcagtaccacccctggcacccagtgagccagccccggcacccattgcagctgcttcgcctttctcaaaatgagatgagatgtagcgctccggccctatgtccgtttccttttttatcttttagctatgtaattttgctaccatgtgtccatctaccatactgatagtacctcttattatggctgctatgcaaggcatatccatggttttgtttgatgagatgattgtacttgttctcttgttgatgttgatcggatcaggtcaatcgatgggctgcttggttacgctgtttgtctttgttacgaatcg

SEQ ID NO: 27791 - DNA, 941 bp, Zea mays
  Clone ID: LIB4740-007-C8_FLI
ctcgaggccggccggggtgtccggtgccccagggaagagtcacggtactctttccagacatccagaggctcttctcctcctcgcctcctctccctagcctccacgacgcaagggagagtgatggaaagcgacgcggcgcgagcgaggagggccaaggggaagaggggaagcaccgcaccaggacccttgttcgccgccgccgcctctgatctccgcgaggttgtcaggattcaatatgtcgaccagcacattcgctacttcctgcacgctgttgggcaatgttagaacaacgcaggcctcccagacagcggtgaagagcccttcgtctctaagcttcttcagccaagttacgaaggttccaagcctgaagacctccaagaaactggatgtctccgccatggctgtatacaaggtgaagcttgtcgggcctgaaggtgaagagcacgagtttgatgctccagacgacgcctacatccttgacgcagccgagactgccggtgtggagttgccatactcgtgccgtgctggggcttgctccacctgtgccggcaaaatcgagtctggttcggttgaccagtcggatgggtccttccttgatgacgggcagcaggaggaaggttatgtgctgacatgcgtctcctacccaaagtccgactgcgtcatccacacccacaaggaaggcgacctgtactagggctagggctttccaatttggcgagggacaaaaaatgctctcgagtggtgtgttgtcaagcaaagctcctccatctgcgccctaccccgttgtgcgaactgtttggcatcaaacttgtgtggttgctatcttctatgttctgctagtttatgttcggagtccgtgggaatatactagctaattaataaaaagaaaaactgatgtgatgccataatagtataatgtcatggctttttgttatgtttgg

SEQ ID NO: 27792 - DNA, 915 bp, Zea mays
  Clone ID: LIB4740-008-E6_FLI
ctcgaggccggccgggacggacaccacgctgcgttcactcgcaaccgtggcccgtgggtttcgcctgtggtcacggcgaggccgcatccagtcgaccatgccgccttccgcatcgatgccggcgacgcacacggccgtgtacgtggcggcggtgcccctgcgggcgcccaagggccccgcccagctgctgatgtcggcgggctactcgctgggcatgtgggacctgcagcacttcatggtgctcctccggcccgacccggcgctggcccaggcgctggtcttcgatttccagccgcgggacccagaggacgtcctcgccgcgctcgcggtgctgtcgcggagagagatccctggcgtggttcgcagaagaacgctgcggagggtcccggaccggcggtgctggctcgtggggcactgctgcgacgccgtcggtgccgccacaaggttcagcgagcggtggacgaccggcctggtggtcggggagcacgactgccgggactacaccgacgggctggtcgaggtcctgacaggtgaaaaacgtgtcctggagtcgctcagattgcgcggcaacggcagcagcaccagcaccagtggggcggcgccgccgtgatggatgatctaaactgtacggactacggtcatttatcggattctataaactggagacccaacacgcaaggcagaaatttcatggaaacgaggagacgttttgaaaggaaaaaaaaatgaggagagaaaacaaagaagctactactcaaggcaaggcgatggtgtaacgaagaaatgaggccgcttgactgtgaaagaaactagaggtgctacgtgaagcaaaaaattagacacgctatgtggagaagcaccgatgacaaatttggtggtataaactcattcatcgtattattaataattactagc

SEQ ID NO: 27793 - DNA, 713 bp, Zea mays
  Clone ID: LIB4740-008-F1_FLI
ctcgaggccggccgggaacaaaccatcggccaattccgaagaagaagaagcaacaggaatcgtagcagccaaggcaaccgtgagcatgggctccctgggtcctagcgtggtgaccctgcaggaacagcagcagcagcccaagccccgcaaaccggcggcagcgggcggcggctgccacgagctggagcagcagagcagcaactgcggcgggtcgtcgttccggatgccgctgcactacccgcggtacaagaaggcggactacgaggccatgccggagtggcgcgtcgactgcctgctccgcgagtacggcctccccgtcgccggggaccttcgcgggaagcgggagttcgccatgggcgccttcctctggcccggtcagtactgatgaactgtacgtttgatggagtcccagatcgaagcagcatatgcataaggagtcgagattctccccgccggattcaccattttacctacactagacataggatccagtgattcggtatgcatcagctcgttctcgatcgttccatgaaactactataattgtcgtcgctctcctcctcacctcgcgtgcatcgttgtggaatcagtaattcatcagcacctgtacaataccatgtggctgggcagagtatgtattgtcagtgcgagttagttatttcatcaaaaatggaataaacataaatattccagcttctatgtctgggattcat

SEQ ID NO: 27794 - DNA, 2033 bp, Zea mays
  Clone ID: LIB4740-008-H3_FLI
aattctcacgcccatcacaagtgaaggaaggctactggtgctggtgccggcactggcagccggtgcctaaaccatatctaccggcctcatataactttccactggccgtagtcggcttcttctctgaactgaagcaaggggggagacaagcgccatggctgaggatgccagaggagagaagaaggatgcctacgcggcggcgccggcgtccaagttgccggcgaagcaacggggagggttcaggagcatgcccttcatcctagcgaatgacttctgcgaccggcttgcgtcggtggggttcacgacgaacctgatctcgtacctcaccctgcagctgcacctgccgctcgtggaggcctccaacatcatcaccaactacaatggcactgctaaccttactccgctcatcggcggtctcatcgccgactcctttgccggccgcttctggaccatcacattcggctccatcatctaccagctcggcatggtctgccttaccctctccgccgcgctcccctcgctgcacccgccatcctgcgccaagcacgctgcagactgccagcgcgcgtcctcctaccagatttccgtgctgtacctgtctctgctctgcacgtcgatcggcaccgggggcacgcgcccctgcaccatggcgttcggcgccgaccagcttgagctgaacgcgcacaggcaccggggcgccaagcccaagtggagtttctttaacctctacttcttcgccgtcgagctcgcgaagctcgcggccgtcaccgccgtggtgtacatccaggacaacgtcgggtggggttggggaatcggcgtgcctaccgtcgccatggtcgccgcggtgatcgccttcgtgtccgggtactcgctctacatcaggatgccacccgggggcagccccctggtccggttggcgcaggtcgctactgcagcatacaagaagcggaaagccgtcgtgccggacccgagcctcctgtacgaggacaaggagctcgacgctggcatctccaccaccggacgccttcttcacaccgaccagctaaagtgcttagacaaggcggctattgtgacggacggcgacgtgctgccgtcgggtcagccgaagctatggcggctgtcgacggtgcaccgcatcgaggagctcaagtcgatcatacgtatgctgccgatctgtgctgccggcatcatcctggtgacatcggcgtcgcacaatcacagcttcgccatccaacaggctcgtaccatggaccgtgacatcacgccacacttcaagatcccgccggcctccatgctcatcttcaccaacttcggcatgttgctgaccctggccttgtacgaccgcgtgctcgtccgcgtgctgcgccgcttcactggccgcccgaacggcatcacccacctccagcgcacgggcgtgggactgacgatcgccatgctgtccaacgtggtggccgcggtcgtcgagcggagacgcaagtccgttgccgctgcgagtgggctgctcgacgctcccaaggccaccctgccgatgagcgtcttctggctggtgccgcagtacgccatccatggcatcgccaacgccttcatggacgtcggccgcatggagttcctgtacgaccaggcacccgagagcatgcggagcacagcgacggcgctctactggctgaccttctcgatcgggagctacctcggcacgctgctggtgaccatcgtgcacgacaagacgaagcgaaccgggcaatggctcccggacaaccttaaccgagggaagctagacaactactactggctagtcgtggctctagaggtggtcaacctcgtctacttcttcatctgcgttaagtactacacctttaagccattggagatggtgagcggtgaggagctctaccaccatggcaatggcaccgacgacgccaagaagcaaggtggaagcttagagtgagcaaatccggatcccaacaagaaggcttgggtccggatgaaataattgtacttcgacatttctttaaaaaatcgcacctatcttaaac

SEQ ID NO: 27795 - DNA, 1526 bp, Zea mays
  Clone ID: LIB4740-009-D3_FLI
ctcgaggccggccgggaaacctcagctgaggccatcttctccatctccaattgtgctactgtaggagctgctgcattcggggagagacacgcgaccagtttgccggcaccaacacggcctgctgctccgcattttgatgactatttctgtctgaaaactgtctctgtcagttgttcattcaggctgctgcagcaagcaactggatgatggcttccaggcagtcagggaacaatgcacaagaagcagcatcaccattggcgagtcctcctcactccaacatagccagcatcatcccttcgctgcccctcgagaccaggtgcccaccgttccctctccgccggtacgccaacttttgggtgcctgaggtaatattgaaggcagacctccccggcattcattcctgcttcaagccgagacccaccgacgtgttcgtcgcaagcttccccaagtctggcaccacttggctcaaggcccttgccttcgcgacgctgaagcgttccacgcatccgccattggatggcgaccatccgctgcgtcgttgcaaccctcatgactgtgtcaggttcctcgatgctaatttcaaccagcagaaggatgagttggaggctctcccgtccccgcgcgtgctagccacgcacctcccctactccctgctgcccggcagcatcaccggggatagggagcgctcggggtgccggatcgtgtatgtctgccgggaacccaaggacgcgctggtctctgcctggctgttcacgaggaaggcggcgtcggcgctgggggctgacgctcgatcgttcacgatccaggaagccttggagcttttctgtgatggtcgctgtatgtgcggcccgcagtgggagcacgtcctccagtactgggaggagagcgtgaggaggcctgacagggtgttgttccttcggtacgaggagatgctgattgatcccgaggcacacgtcaggaagctcgccaagttcatggggtgtggattttctgaggaggaggaggagcacggggtggtgagcgccatcgtggagctgtgtagcctgggcaagatgagggacatggaggtgaacagaaatggaagcaatatgttgggggtcaagaacgaaagctacttcaggaagggagttgctggggactggagcaaccatatgacgccggacatggcgcagaggctagacaaggtcgtagaggatgcattgcaagggactggattcagctttacgagcaaagcatgatgagccactgcgctcatggtagttgcgaactccataatgccaagaacaactcgttttgtcggtattgcttgctggatggagatcataccagccagccatggtgagcatccttcttttgtgatgaaggggaaattgatttgcgtataattcatctgtataactttgttacaaaccatagtttgtggcaccttggcgcgccaaaaccatatgcattactgtgtaagattcgtcataaagctatgtgtatcatcattgacatatttgtcttaataaaattcatcataaacc

SEQ ID NO: 27796 - DNA, 797 bp, Zea mays
  Clone ID: LIB4740-009-F10_FLI
ctcgaggccggccgggaccagcaccagcacggcgaccaaccctctcccaacccgactagtcggactcgcagctccgccccaagtccaggtcgaagcatggaagtcgcggcggcgtcggcgaggcccgtcctgcgcgtggctgccatctgcggctccctccgcaaggcctccttcaaccgcggcctcctccgcgccgccgcggaggtgtgcgaggactccatcccggggctccgcatcgacgagctcgacatctccgacctgcccatcatcaactccgacctcgaggccttccgcgcccgagtacaactactccatcgccacccccctgaagaatgcacttgactgggcctctagaggaaagaactgttgggcagacaaacctgctgcgatcgtgagtgcaggcggtggctttggaggagggaggtcgcagtaccatctccgtcaggtcggggttttcctggatctccatttcatcaacaagccagaactgtgcgtccaagccttccagcagccacccaagtttgacagcgatggaaatctggtcgatgctgaaatcagagagcggctcaagaaagtgctcctatcccttcaggccttcacgctcaggcttcagaaggaggactgaatcaactcggtaccattgtagtacgtgcttccctgagaagcgtttattgctcttggaagtttgtaacgcgttgctgggtggcctggaagtttgtaataaatccaagaagtgttctcgctgaatatttaagatttgatcgcatctatatataataaagattgtgttctagcgc

SEQ ID NO: 27797 - DNA, 840 bp, Zea mays
  Clone ID: LIB4740-010-A11_FLI
aggatctcacggctagctagcacaagcatagtgcaggggcttggcatccaaggcctgagagccatggcatccaaggccgtcctcttcttggctctcaacctcctgttcttcacggtggccaacgcctgcggcaactgcccgaccccaacgcccccggtcgagccaccgccgccgcctcctgctgctaccccaccccccttcgtccagcggcaagtgcccgctgaacgcgctcaagttcggcgtgtgcgccgatgtgctcggcctcgtcaaaggcgaggttggcaaggtgcctgccgagccatgctgtaccctcatcaaaggccttgcggacttcgaggccgccgtctgcctctgcacggccatcaaggccaacgtgctcggcgtcgtcatcgatgtccccatcaagctcagcgccctcgtcaactactgtggcaagtgcgtgcccaagggctacttgtgcgcgtaagcagccccgcgcggtcacacgctcgtagctgttcacgtacgagattatatatgcacgcaccctgcatggcacgaatgcatgcattgtgtctgctgatatatctctcctgtctcagttgttgtgcaccttcggttctacaaaacctagaaccattccagccaaatacttacttgtcagttcaattcgcatgtattgtctcttgttgaattcccatttttcttttgtatttggtcatttcctcgtaagagtccgacaccttctcgaagggaaaaaaaagaggggtgttgcttctagttttttttatatctacgaatcatgtaatttgttgagagtcatttgatgtgtatgtaaaaccaaacacttgaacttgcagt

SEQ ID NO: 27798 - DNA, 987 bp, Zea mays
  Clone ID: LIB4740-010-E7_FLI
ctcgaggccggccgggaaagccactttctttctccatcactccagccatccccaaccccaactcccttcactgtatatatgatacatccatccaccattcgtgaggacagcagcatctgtgcgtctcttccacgagaggcaacctaccgtatagtactgccgacatggtgctctccggcggcctagtcgtgccgtggctcgcggcggtggccgcgctggccatcaccgccgccccgctcggcgccgatgcctacaagaactacaccgtcggcgacgacaagggctggtacgacggcctcagcctgcccggggtcgactaccaggcgtgggctgacggcaagaacttcagcctcggggatttcctcatcttcaacacggacaagaaccactcggtggtgcagacgcggaacgtgacgctgtacgagagctgcgactacaacgactcggggcccgacgacaccgtcgagtgggccgccgcgccgccggagttcagcaaggacgccgtcaccgtcgccgtgccgctcctcgacgagggccgcgcctacttcttctcgggcaactacgacggcgagcagtgcgagagcggccagcgcttcgccgtcgacgtggcccacggccagggcctgccgcctgacctcaggccgcccgtcgccgacgcgccggcgccctcctccgcggggcccgccgacggcgccgccgcgctcgacttcagccaccccaagaacgtcaccacgccgagcgcgacggacgatgacgacgagcaactgggcggtggctcggcctcctccagcctcaggtccgctctgcccgtgaccgcgacgctgctcatcaccttgctcttcgcgttcgcggtgtaggtggcatgcgttagtttcgcttttgtttgtgctgctgctgcttgggcctcataatttgtttgtttaatgcactagtacagttgaagggtttctctgtatagggagagagatgagatatgtttagtgctgt

SEQ ID NO: 27799 - DNA, 1095 bp, Zea mays
  Clone ID: LIB4740-010-F7_FLI
ctcgaggccggccgggaaaataaatttccacaaccgaaacctgcagtcgggtcatctcgtccacgaaacgtacggacttcgggcatcggccccaacgccagcggcaccgcacccgcaccaccaagctcgtcggcgacatgaatccgcccgcagcagccgcgtccaccggcgcaggaggccacgccgcggcgcctgcggcagccccggagtacgcgcactacccgaggctctcgccagaggaggtggccccgcccccgcccccgccttatcacgccgccaccgccgcgccgtccgcctacggaggcaacccctacatctactcccccgccggcggcgccgccacctccccgaagaatacgatggactccgtgaaggacgtgctcggcaagatgggaaagaggtttggcgaggcggcccgcaagaccgagaccatcaccggcaatttctggcagcacttgaaaactggaccaagcattactgatgcagcaatgagcaggatctcacaggtcaccaaagtcattgcagaaggtggatatgacaaaattttccatcaaacttttgaggtcgcccctggtgaaaagctcaagaagccatatgcatgttatctgtcaacctcggctggtcctgttatgggtgtgctttacctgtccaatgtaaaactggcattttgtagtgataacccacttgcataccaggttggagacaaaactgagtggagttactacaaggtggtcatcccccttgctcaactgcgatcaattaattcatcaacaagcagaacaaatgcagcagagaaatacattcaggtggtttctgttgataaccatgagttttggtttatgggcttcgtttactatgacagtgcggtgaagaatctgcaggaagcacttcaggaggctcagaatttacgtgcttagtgatgttcatggattggaactagcatgtcttatacattacagttgtgatatactgttttcccgtcagtttcgactgtttgtccagatttagtttgcgtaggtatcagctgtttctgtgttttgtactgacttaaaccgatgttcaatatgtgacgtgcatcctttcatggttgttcac

SEQ ID NO: 27800 - DNA, 679 bp, Zea mays
  Clone ID: LIB4740-012-C12_FLI
ccgggatagcacacagccaaagccaccagcgctcgtcacctccaatcaacaaattcccaatccgccgcttcccatcccgcgttcgccgctccatttgatcgaattcccgatggcgcccaaggccgagaagaagcccgcggagaagaagccgacggaggagaaggccgagaagaagcccagggcggagaagcgcgtgccgggcaaggagggcggcgagaagaaggggaagaagaaggccaagaagagcgtcgagacgtacaagatctacatcttcaaggtgctcaagcaggtgcacccggacattggtatctcgtccaaggccatgtccatcatgaactccttcatcaacgacatcttcgagaagctggctgccgaggccgccaagctcgcccgctacaacaagaagcccaccataacctcccgggagatccagacttcggtgcgcctcgtccttcctggcgagctcgccaagcacgccgtctccgagggcaccaaggccgttaccaagtttacttcctcttagatcgccgccgcacggagcgacggctctgtttcgtttcctcgtacttttaggccagtgctaataggttgctcgaggaacaatgtagtgtggaaatttctaatatattccaaattgtgctgatataatttgcttcaaaccttgaggaggcgctgtttt

SEQ ID NO: 27801 - DNA, 1320 bp, Zea mays
  Clone ID: LIB4740-012-H8_FLI
ctcgaggccggccaggattctgctctccgcctcccgcagccctacgcgcccgcaggtctgagcccgctacgcctgtaccctagtccctacgaagtcctcttcgacccctatcccctccccagcggcgagaaagaacgggcgcgctcgtcttcgcctcctctgtgcctgtggatcggcgcggcgaggggatccgtccgggggtttggatcggtttcttctccatctccatcttcacctgttgttgaactttgagttaaagacaatggacctggagacagagaatcgtcttgcttctttgctaattgaagaggcgcggagattgcagttagaggctgacagggaaggtgttcatgcatatcttcgaaaacctaatgttaggcatcgtccaaattcaaggtttctcacagccacagttcgtggagttcagcaagcaaaccgtgttgtggaggttaatgaaatgtggcgtgccagggcaaaggaactggagttggagtcaaagatgaaaagcagaagtagcagaagtaacaatcgtgatgattttagaggagagaagcgcaaaagtgatttgagaaatcatggctcaaggtttgaacaagaagggaccacttatagtaattcttactcagaccgggaggatggtctcagtgatgatgagattgaaagatttcttcattcaagggcgaaacgaggacgtggggctgttggttctaggatggacgagcctggtccatatcttgattctttgtcccgacatcaggacaacggacctagtcctgacatacgtgtggaagaaaaatgggaacgccaagtacaaggcccagagaagccttcatttttgagacccaagtcttctgatagtcattggcataaggatacttcggatggaagggcatcaagctctgaaccactgaataaaaaggaaaagaaaaagaagtcggagaaaaaagataagagagagaaaaggaaggaaaaggacaggaagaaatacaaacatcgccatcaccgcaatcacaaaagccgaagacgggagtgaattgggtgatggtagctggtagttagtggtggtaatggatcatgatccaaatgtttttcacactaagttagggtccttaattaattttagttctaaagtgaatagaaatagagctcgatcctaatccgattcgattctttaattttatagtgtaaaatttagagtttattaccacctttactgataataggacagaaaaatgtagctagcatattatgctctgtaacttgaaacatgcattgtatggaaatctcgatattgtgtagcaatggagtatggttcttacg

SEQ ID NO: 27802 - DNA, 778 bp, Zea mays
  Clone ID: LIB4740-013-F6_FLI
tcgaggccggccggggatttcgattctttctttttcccccacgtgcgccgccgcgaccttcctcgatcccatctcccaacgcccccgcctcgcctcgggatcccgccgccgctccatctgcctttgctcccccacccgcaggcagcgagcgacagcgacggcgagggatggccaaggccaggtcgttggcgaagcagaagcaggcgcagcaatcaaacggcggcggcggccacgcgctgtcctccaagctcgcccggtacctcgacccggaggcctccttggacaaggaccaactgctggacgcggtgcactggatccgccaggcggtggggctcatatgcggcctgctctggggagccgtccccctcgtcggcgccgtctggatcgcactatttatggccatctcgactggcattatctattggtactacacctacttgctgaaggttgacgaggaggaatatggaggccatggggcgcttcttcaggagggtcttttcgcttcattcacccttttcctgctttcgtggactctagtatacagtctggctcacttctgagaagctcctttggcgcacatacctttgttcactgtgccagacagaaaagactcaccaggacagtgtagactaaggagcattttagaacgagcgttgtatcaaaacggttctgagctgtaatgttatttcccaacccccagtgtaatcttggtgctatgggattagttcgtgctaagcagaacaaaaatgttgcatactacgcgtttttcagtcaaacg

SEQ ID NO: 27803 - DNA, 1027 bp, Zea mays
  Clone ID: LIB4740-014-B6_FLI
cctcgaggccggccgggaacccctcacactcccatccagccgccaccaggtgcagagtctttcgtcatctcttctccggcgaagaacccccagtcgcccaccagatcacttgttaaactttgttgaggggtgatggcggtttctttcgcaaacctcaactccgaggcagggcttaaaaagcttgatgagtaccttctcactcgcagctacatcactggctaccaagcttccaaggatgacttggctgtctacacttcgttttcggctgctccctcgtccaagtatatcaacgtagcaaggtggtttaaccacattgatgcgctcgtgaggctgagcggaattactgcagagggccaaggtgtgaaggttgaatcctcagcagttccttcagccccaactccagatgttgctgaagcacaggccccagttgctgaggaggacgacgacgatgatgttgacctttttggtgaggagaccgaagatgagaagaaggctgctgaagagcgtgctgcagctgccaaggcttctggcaagaagaaagaatctgggaagtcatcagttttacttgatgtgaagccatgggacgatgagactgacatggccaagctcgaggaagctgttaggagtgtccagatggaagggctgctctggggcgcatccaagcttgtcccagttggatatggtatcaagaagctgcaaatcatgatgaccatcgtcgacgaccttgtctctgtcgacactctcattgaggactatctgtgcgctgagccagtgaacgagtacgtgcagagctgcgacatagttgccttcaacaagatctaggcgtgacttccgatcagtccttcccctggggtgctggcgatggtggtggctgggcaatgcaccagcctaatttatccatagctatatgtctgctttgtgtggccagtgatattgccgtgagtatttttggatcctattcgagtcgaatgtaccagtaccagagttaatttgctttaattcgaaacaccgttccagttggaattcg

SEQ ID NO: 27804 - DNA, 386 bp, Zea mays
  Clone ID: LIB4740-014-C7_FLI
taccctcgaggccggccgggaggtgaaggtcagatcagagtatcaccacttggcaatttctcccccggcacaagcgcatggctaccgtcgggggcaatcgtgctctctatgcagtcgtcgcgctgccacttctcgcgacccttcttcacggaccaatgcggctgtcgcatgccttcccataccgttccctactccagacctgccagcccagcggctccatccagggccgttccggcaactgcaacacggagaacggctccgagtgctgcaagaacgggcggcgctacaccacatacggctgctccccgcccgtcacgggtagcacccgcgccgtactgactctcaacagcttcgccgagggcggggacggcggcggcgcggccctc

SEQ ID NO: 27805 - DNA, 1217 bp, Zea mays
  Clone ID: LIB4740-014-D12_FLI
ctcgaggccggccgggaccaacacgtagccaacccctccgctgagtcgctgaccgcctcgcacccgtcgttcccctccttccggcacaaccagcacgcgagcggcacgagaagactagggttccggcgaggcgacggcgagagccatggcagggattcgatggccgccgcgcccccaggagagatggcgtcggacgacgaccggtcggtggccgcggactcgtggtcgatcaagagcgactacggcagcaccctcgacgacgatcagcgttactccgacaccgccgaggtcctcctagcctcctcctccgcctcctctgttgccgcgccctccacgacggttgccgtccacccctcctccgacttcagcttcgacaaggatgtccatgactccagctacgttgagcctcccttgctgggcttgcagaattttcaggatggtgcttacgctgaggatcttgcaaatttccatgaacgcagccacgctgatgactggtttggcactgatatcatggatatccgcgtaggttggaccaaaaatttgtgctcaagtagagatttacccagctgcagcgtacttgacattgggactgggagtggcagactcttgcagcagcttgcgaagcaggggttttctgatctgactgggattgactatagtgaaagtgcaattgagcttgctcgtagccttgcaatcggtgatgggtttgaacacattaatttcttggttgatgatgttttggagtcgaagttggagagaagatttgaacttgtcatggatgaagggactcttgatgcgattgggctccatcctgatggacctgtgaagagaatgatgtattggcagtccgttgatagcttggtttcccgtggtggtatattggtcatcacatcatgcagcagaaccaaggatgagttggtgcaggaggtagagaacttcaaccaaaggaagcttggtgctgtgggctcaggctcagaaggattgccggccagtgaagctgcggtgttcagctacctggaccacgtccaaagttaccctagtgtggatagttcttgcataacgaccgttgctttccttcataagtgaaaaacataattgtattgtatgcttgattgcttggtttattggccctagaaagttaccgtatacctgctacgatattaactatgtacccagtcacttgtgtatctggacaatattctactagtattttaccc

SEQ ID NO: 27806 - DNA, 813 bp, Zea mays
  Clone ID: LIB4740-014-F3_FLI
agtccacacaacgacaccaactgtcctcaatccagcagccctcgagtctcgtccccgcacatcagcagagagacgccactaccaccaccgcaagcgacgacggggagatgtttctgcgacggatcctgaccggcggaggtggcctggcggcgctgagggcggccttgaggtggcgcccaacgcgcgggaggttctcatcgggctctacacgcgtacgctcaaggagatcgaggccgtccccaaagacgagggctaccgcaaggccgttgagtccttcaccaatcaccgcctccagatctgccaggaggaggacgactggaagcgcatcgaggaccgaatcggatgcgggcaagtcgaggagctcatcgaggaggccgaggacgagctcaagctcatcgccaaaatgattgaatgggatccgtggggtgtccctgatgactacgaatgtgaggtgattgaagacgacaccccaattcctaagcatgttcctcagcaccggcccgttgctcttcctgaggagttcttcaagacactagatgccgtcaaatcagatcccgccctccaaggcgatgctcctcctcaagtgaaggcgtaaagatgagtcttcccggttatgtcttatgtcatttcacactttgctgcgctgggtagggactagtttcttgtgtcatttgccatttgccagcaatgtgcttgttccgagcagaataaatttctggcgagtaccatcgaagagtgactttgaacgaagtgattcgacacagtaaatttgttgttgtccatgaatacttgctctgaacatcgcttgccgat

SEQ ID NO: 27807 - DNA, 1261 bp, Zea mays
  Clone ID: LIB4740-015-A1_FLI
aagagagcaaactagtgagtgagagagagagacagagagatcatcgatcgatcgacgaccatggcggggcaacgacaagttgcttccatgctgcttgcagctgctctgctcgttgcaacgtttgcgtccattcctacaaccgtgcactccatcggcgtctgctacggcacgctgggcaacaacctgccgtccagcagcgacgtggtgcagctctacgggtccaagggcatcaaaggcatgcgcatctactcccccgacgccaaagccctcgccgccctgcgcaactccggcatcgcgctcatcctcgacaccggcaacggcggcggcgtcctgggccagctcgccaggagcgcctcgttcgcggactcgtgggtgcagagcaacgtgcgcccctactaccccgccgtcggcatcaagtacgtcgcggtgggcaacgaggtgcagggcgacgacacgcgcagcctcctcccggcgatgcgcaacctggacgccgccctggcgcgcgccggcttcccgggcatcaagtgctccacgtcggtgcgcttcgacgtggtcgccaactcgttcccgccctccagcggctccttcgcgcagggctacatggcggacgtcgcgcgctacctggccggcaccggcgcgccgctgctcgccaacgtgtacccttacttcgcgtacagggacaacccgcgcgacatcagcctgggctacgccacgttccagcccggcaccaccgtcagggacaacggcaacggcctcaactacaacaacctgttcgacgccatggtggacgccgtcgtcgccgcgctcgagaaggccggcgcgcccaacgtcagggtcgtcgtgtccgagagcggctggccctcggccggcggcttcggggccagcgtcgacaacgcgcggaaatacaaccagggactcatcgaccacgtcggccgcggcacgcccaagaggaccggcccgctggagaccttcgtcttcgccatgttcaacgagaaccagaagggcggcgatcccacggagaagaacttcggcctcttctacggcaacaagcagcccgtgtacccgatccggttcaactaattaagagtggcggatcggaggaataatacatcttcatcaatcaattaacctaataatatgctacatgaataagctgctgcgtgcatgtggccggacttgtggaggagcggtgcaattaacttgtatgcacgtactctatctatatatgatgaataaaaagagagagaattctgatgcatac

SEQ ID NO: 27808 - DNA, 1323 bp, Zea mays
  Clone ID: LIB4740-015-H1_FLI
ctcgaggccggccgggtccggttccggatccgaatctcgccctcccctctctttcttgcctccaggtccggccgtccgggcggcgccgggaggagagaatggcctccacggcgtcgccgccggtgttcgagagggtggccgggatccgagccattgccgagtccggccgcttcaaggcatggttgctggaccagtttggcgttcttcatgacgggaagaagccgtaccccggcgccattctggcattggagaagctagcggagaatggggcaaagatggtgataatcagcaattcctctaggcggtcatctgtgacaatgaagaagctcaagagcctggggttcgacacgtcctgtttcctcgcgaccatcaccagtggggagctcacacatcagcaccttcagaagagagacgacccatggtttgctgctcttggaaggaagtgtatccatatcacttgggacgatcgaggggcaatttctctcgagggccttggtttgcaagttgtgaacaatgttgatgatgcagagttcatattagcccacggtactgaagctcttggctcaccttctggtgttcctcttcccaaaagtcttgaggagcttgagcaggttctaatgcttggcatagaaaagcgacttccaatggtggtagctaatccagattatgtcactgtcgaagctcgagatctccgtgtcatgcctggcactctggcagctaaatatgagagtcttggtggtgaagtgaaatggatggggaagcctgataaggtgatctatacatcagcgatgtccctagcgggcgttgatgcccgtgaatgtatcatggtgggtgattcgctgcaccacgacatcaaaggagccaatgcgtcggggatggcatccgcgttcgtcactggaggggttcatgtggacgaacttggactcggtgaatttggagaaactgctggggtggatgctgtcagttcgctttgcagcaagcacggatcgtacccttcttatgttctgccttcattcgtgtggtagagatgcggcctagaatctttttttttgttttttgttttaggtgcacgggaaagtgattttaggcagttattgttgttatggaaataagtgccacgcaatgatcaagccgctggaggtgtcattcttcttaataagtgacacgcaatgctcaagccgctggaggcagatttgtatttgcatttgtagtgtgtgtgtgtgtctatatatgctacctgtggtgtatataccgcctgtgctgcaatgttcggttgagactttagacaactatactttatgaatgatttacatggttctgcac

SEQ ID NO: 27809 - DNA, 676 bp, Zea mays
  Clone ID: LIB4740-016-B1_FLI
tcggctcctcgcgtgcgtgcttaccccggcgaatattcgaccacggaagccgcataacctccgtccatcccatccccgctcgcctctcctctcctcgccccgctctagacgatcgatggccgcgacggcggcggaggagatggagaggatggtggaggcggagtgggaggaggggaagcaggggatgaggaagaggaagcggtacgggctggtggagtaccgggcgctgccggcttacctgcgggacaacgagtacatccaccgccactaccgctgcgagtggccgctcccgcaggtgctgctctccgccttctccatccacaacgagaccctcaacgtctggaccaacacaagttccaaatgcagtagatatccggagcttgcagcatttgccagatgtactgagaaaggctgatattcataagattcaggcagagcttgtgtcatgtcttccatcgttacctcacctttcagatctacaaaagctgaaggatgagctgaagacctcttggaattctatggaggttcttccatctctgtcccgttggcatctcttggagttactcgcaaattgtctgccacacagatttacccatcccaatgaaacaagtttgtctgttcttgtaagtagtctacaactcgctgaattacttgattacattcttttacttttgtc

SEQ ID NO: 27810 - DNA, 636 bp, Zea mays
  Clone ID: LIB4740-016-C11_FLI
cacaccgcaatcttcaatctccccagcaatccctagcagaagccttccatcctcactcgctcgatggcccgcacgaagcagacggcgaggaagtccaccggcggcaaggcgccgaggaagcagctggcgactaaggcggcccgcaagtctgcccctgcgaccggcggagtgaagaagccccaccgcttccgccccggcaccgtcgcgctccgggagatccgcaagtaccagaagagcacggagctgctgatccgcaagctgccgttccagcgcctggtgcgggagatcgcgcaggacttcaagaccgacctacgcttccagagctccgctgtctccgcgctgcaggaggcggctgaggcctaccttgtcgggctcttcgaggacaccaacctctgcgccatccacgccaagcgcgtcaccatcatgcccaaggacatccagcttgcccgccgcatccgtggggagagggcctaagcatcatatattctgtcatcagtgcccgatcagaagatgtagagatgtgctgggttctgtagtttgggttactgtcgaatcatcgagtagttggttgttcactgctgtaacttattatcatgatgcatatgaaatggcaatgaactatgttatcagttctct

SEQ ID NO: 27811 - DNA, 995 bp, Zea mays
  Clone ID: LIB4740-016-G3_FLI
ctcgaggccggccgggattccctctataattcctataaataggggccctcccgctcccatcacaatcacccatcactcgctatattcccattccaagtccccgctcttggattcccgacgacgagctcggagcttcttcttccctgctcggtgctcgccgcaacagctgccgccatgtctgccgcgaaccagctcgccgctctggtcagcaacatgtacgccacgggtttgcttgacgatcagttccagcagctccagctgctccaggaccccagcgcccctgacttcgtctccgaggtcgtcacgctcttctgtcaggacggcgagcggatcatcgaagagctggccaaactgctggagaagcccaacgtggattttgacagggttgacgcctttgtgcatcagctcaagggaagcagtgcaaatattggtgctcagaaggttaagaacacttgcattcagttccgcgaattctgtcagcagaagagcagagatgggtgcctcaaggtactggagacaatgaggattaacttctatgagctgcgtggcaagtttcagaccatgcttcagctggagcgtcaggtcaatggctttccccccaacaagtaaaccagatggtggagtggaccttcatgttaggatgatgtttgcacctttcaagtttcagaacattctgaatgagctcctcaattggtttctgggaagtctgtaatagcttagcagcaagattagcgttggcaccaccgtagcagtagtcattgtcgtcaagtagttgtcctaaatgtctgtgctgggttatggatctcctgcaagcagttgcaggcttgcagctgttctgtttactctagtagtttattttggagtagtcgctctcaataaatctgtcctaggagtctattggtggattattagtcagtcagtttctgggattcctggtggtgaagcaaaacaatgttatggctatcggttaataataatagtttgctgtgtttgac

SEQ ID NO: 27812 - DNA, 886 bp, Zea mays
  Clone ID: LIB4740-016-H1_FLI
ccggccgggagagctgcacactggtcactggaaaacgaaggcaaaccctagtcgctactccaccgcagcgcccattacaccgatcgggctccgatggacttcgcggagctggaggccgtggagggcctccggtggccgtggcactcgtggccgccgactacccccgccgccgcgtccctcgtcgtgcccacctccgtcctctgctcgccgctgcagcaccccacggcgccggacctcctcccgctgctaccctacgcgccgctccgctgcgcctccccgggttgcggcgccgcgctcaacccgttcttgcgcgtgcaccacggctccgcgcgctggtcctgcgccttctgtggcgccgccgccaacccgttcccccgcctactggcccccgacgcgctccccgccgaactcttccccacccactccagcgtcgagtacttgctgcccccggaccccgctgagcccggggggccggggccacctgcgctcgtgttcgtgatcgatgcggccacggcggccgaggagctcgccgtgctcaaggacgaggtgcgcaggctcatgcaggggctgcccgaggggattagggtggcgctcgtcactttcgctgcgtcggtgtgggtgcacgatcttggatttgagggttgcgctcgggtggttgtgcttaatggcgagcgtgagctcgagtctgacaaggtttgtgaatttgtaatatgatccttaggacatcgaatttgtaatttggttctgcgccaatctatgtgacatgatcagcattctagtttcacgagtatccacaatctgttcctgccgcagtcagccttgaaatttgaatgtaagtatcttgttataatgctagttcaggggcatgtattaactttttgccatc

SEQ ID NO: 27813 - DNA, 953 bp, Zea mays
  Clone ID: LIB4740-016-H9_FLI
ccgggccccatttcgaagcccaccgaattccctgcgattcctctcccctcgcctcctcgtctccccctaggggatcgtcggagaggaatcgcaaagagggccgtctcatccgagttaaggaagccatggagcacaaggaggctgggtgccaggcccccgagggacccatcctctgcatcaataactgtggcttcttcggcagcgcggcgaccatgaacatgtgctccaagtgccacaaggagatgataacgaagcaggatcaggccaagctggctgcctcctctatcgacagcatcgtgaacggcagcgacgccgtcatggagccggttgttgctggcagcaacacggtagtagctgttgcccaagttgagttgcaaacaatgaacgtgcagcagcccgctgatgttgccggacccagcgagggggtggcggcgatctccaaaggggggaaggtagggccgaaccggtgcagcgcctgcaggaagagggttggacttacgggattcaactgccggtgtgggaacttgtactgcgcactccaccgctactccgacaagcacgactgcaagttcgactaccggactgctgccagggacgccattgccaaggctaatccggtggtgaaggcagacaagctcgacaagatctagggggggttccctacggttgggtatcaggaagattgtaaaccgcggtaactcgtcatgcggaactgctgccttgccccccgcgcctttctcttccatgtttgctgctacaatcttgttgttgggcattgcagtgcacggtgcacacttgtgtagcccgcctccgagaattctcctgcctctgcatctggtcagttcaaaaatgatttgcatgttggctatgttgtgtaagctctatttatggtggtctcgctgagacgggtatttggcttcgcagttatctagctatgtgatgtactgttgtcg

SEQ ID NO: 27814 - DNA, 647 bp, Zea mays
  Clone ID: LIB4740-017-C10_FLI
ctcgaggccggccgggagcagcagcagcacagtcatccacaaacgaactgaggtcgacgacgactgatcgagcagcgacgatggcggctgtgctgaacagcaggaagacggcgcaggtggttgccgtgctggtggcggcggcgctgctggcgtcgtccgcttcggcggcgatcacctgcgggcaggtggggtcgtcgctggctccgtgcatcccgtacgcgacggggagggccagcgcgctccccgcgtcgtgctgcagcggcgtcaagagcctcaacagcgcggcgcggaccagcgcggaccgccaggcggcgtgccgctgcctcaagagcctcgccaacagcgtcaagagcgtcaacatgggcaccgtcgccaccatccccggcaagtgcggcgtctccgtcggattccccatcagcatgtccaccgactgcaacaagatcagctaagttacgacgaccaagcttacgtcccgcgcgctgcacgagtgatgaagccagggaagaaataaaataaagctagctgtattgccaggagcagcatgcagtatcgatctatatatatactgtactgtagtactctattatatatgtatgtgtggcctgcagtgcgagttgcttcgatccacctacttgttcacacagttg

SEQ ID NO: 27815 - DNA, 873 bp, Zea mays
  Clone ID: LIB4740-018-E3_FLI
ccgggagctgagcacgccgaaaagctcatcagtgctcatcccctgctggcccgttctcagtcccagtgagaggctccatgaagatcctggtcgcggtgaagcgggtggtggactacgctgtcaaagtgcgcgtgaggccggacgggaggggcgtggagacggccaacgtgaagatgtccatgaatccattctgcgagatcgccgttgaggaggcgctgcggctccgggaggccggcgtcgccgctgaggtcgtcgccgccaccgtaggccctgcccagtccgccgacacgctccgcaccgcactcgccatgggcgccgatcgcgccgtccacgtgctccacgacccggaccctgcgcggcccctcctccctctcgccgttgccaagatccttcgcgccgtcgcgctccaggagaagcccggcctcgtcatcctcggcaagcaggcaattgatgatgattgcaaccaaactggacaaatgttagctggattgctcaagtggccacaaggaacctttgcctccaagcacggatttaagacttaaccagccaagatatgcaactttgcccaacataatgaaggcaaaatccaaagttattaagaaagtcgccgctgaagaccttggcgtagatattagatcagacatggaggtgattgaggtcaatgaaccaccaaaacgaaaagcaggggtgattctttcatgtgtcgacgagctccttgacaagttgaaaaatgaagcacgtgtcctttaaccatttgtatattattcctcgctgaatatggtctgacgttcatttatttaagttctctctccaaatgttcagacttcagaccatttacaaataaaataagtgttaacatgaaccaattaagac

SEQ ID NO: 27816 - DNA, 1432 bp, Zea mays
  Clone ID: LIB4740-019-A12_FLI
gtttcttctcgcagctcttaagtgcatagcttgctttgtgccaccaccgtaccgtaccaaacagatcaaatcagagatggcaagtcgtagtagctctgcagaaggtgcaggcaggacgttgcctgtcaatctcaagttgatcaccgtgctgagcatcgatggcggcggcatcagagggatcatcccggccaccatcctcgccttcctggaagcgaagctccaggaactggacgggccagacgctcgtatcgcggactacttcgacgtcgtcgccggcacgagcaccggcggtctcctgacggcgatgctcacggcccctgacacgaacgaacggccgctgttcgccgccaaggacttggcgcggttctacatccagcactcgcccaaaatcttccggcagaagaatgctatggggtccaagctcgtcggcaagctgaggatggcttgtgggcccaagtacgacggcaagtacctccatgcgcagctccgacggcttcttggtaatatgaggctggacaggacactgaccaatgttgtcattccgaccttcgacattgcctacatgcaacccatgattttctccagctttgagttgaagcaccggccgtcgacaaatgcgcttctgtcagacatatgcatgagcacctctgccgcgcctacctacttcccgccgcactacttccagaccagggacgagaatggcaggaggaaggccttcaacctcgtggacggcggaatcgctgcgaacaaccccaccctgtgcgccatgggccaggtgtctaaggacatcatccttgcggacgacgacttcttcccggtgatgccggcggactacggcaagttcatggtcatctcgctcggctgcgggtcgaaccggaaccggaggtactgcgccaaggccgccgccaggtggggcgtcttcagctggctcttcaaggacggcagcgctcccatcatcgacatgttcaactccgccagcgccgacatggtcgacatccacctctgcgtcctcttcagggccctgcgctccagcgaaaactacctgcgcattcagtacgatcagctgacgggcagcgcgggctccatagacgactcgtccaggaagaacatggatagactggtgaggatagggaacaagctcctggacatgaacgtctcccgggtggacctggagaccggccggaacgtggaggtgcccggtgcagggaccaacgccgagaggcttgccaagttcgccaggcagctctccgacgagcgacggcgccggcgccagaacgagcttattatgaattccgaacaagtgtttcaaattcaacatcaagcttggtactacggtggtgacgcttgagctgcatccggcctgctaaatgaggtttcagtactgttctagagccgtgtttcatgctttcggctatgtaccattattcctcat

SEQ ID NO: 27817 - DNA, 992 bp, Zea mays
  Clone ID: LIB4740-019-B10_FLI
ccgggaagccgcaaaggccaggccaccactccttacctttacctctcttttttttccttcattcacgaatcccttcttccgccttcttcgtcgggccatcctcaccgacgagaagagatctcctcttcggcacgaggaggacagcaggggagaaagatgggggggcgggtggatcacgagtactcttacctgttcaagatggtgctcatcggggacagcggcgtcggcaagtccaatatcctctctcgcttcacgcgcaaccacttctccctcgactccaagtccaccatcggcgtcgagttcgccaccaagtccctgcagattgacggcaaaacaataaaggctcagatctgggacacagctgggcaggaaaggtaccgtgcgattacaagcgcctactaccgtggcgccgtggccgccctgcttgtgtacgacatcacgaagaggcagagcttcgacaacgttcacaggtggcttcgtgagctccgcgaccacgctgactccagcatcgtgatcatgatggtgggcaacaaatccgacctgatccacttgagagctatctctgaggacgaaggcaaagcgttggctgagaaggaagggctgttcttcctcgagacgtcagctatggaggccatcaacgtggaggaagccttccagactattatcacggaggtgtatggcatcgtcaacaggaaagcgctggccgccaaggaagcagctgccacagctgccccattgccttcacagggcaaaaccatcagcattgacagcaatgcaggaaatacaaagaaggcatgctgctctacataaataaaaaagatgtaacctttttttaaaatatggtagaaaatggagcatatatagtcatcataaaatatggtgtggaggcgatatataactactgcttttcttttctttatttttttgtgtggacaaaatcgagtacatgcagtgtttctgaatcaaaagttagatattgtattaggattcat

SEQ ID NO: 27818 - DNA, 1006 bp, Zea mays
  Clone ID: LIB4740-019-B8_FLI
ctcgaggccggccgggacgtcaacctcgttctacccaccggccggcacaaattctcccttcgcacaagaacatcgcacggcgatagcaaaaccttccgtcggaggatggcttccgccggcactggagaaggcaaggagtcggctgccgggagcagcctccacagcaagactctcctcaagagccagccactgtaccagtacatactggaatccaccgtcttcccacgcgagccggactgcctgcgggaggtccgcgtcgccaccgccacccaccccatggcgggcatggctgcgtcgccggacgaggtgcagctgctgcagctcctgatcgagattcttggcgccaagaacgccatcgaggttggcgtcttcaccgggtactcgctgctcgccaccgccctcgccctccccgacgacggcaaggttgtggccatcgacgttacccgcgagagctacgaccagattgggtcgccggtgatcgagaaggccggcgtggcgcacaagatcgacttccgcgtcgggctcgcgctgcccgtgctggaccagatggtggccgaggaggggaacaagggcaagttcgacttcgcgttcgtggacgcggacaaggtgaacttcctcaactaccacgagcggctgctgcagctgctcagggtcgggggcctcatcgcctacgacaacacgctgtggggcggctccgtggccgcgtcccccgacgagccgctctccgagcgggaccgcgcgctcgctgcggccaccagggagttcaacgcggccgtggccgccgatccccgcgttcacgtctgccaggtcgccatcgccgacgggctcacgctgtgccgccgcgtcgcctgatccgtatccggttatccgcctcgaaatgcagcagagctgtgggctgtcgctgacactgctgtgagctctgtgcttgaaatggccatggtctgtaatagcgaactgggcttgagcgaaaataaatccaccagcgcgctagcgtgtgtcagcgatc

SEQ ID NO: 27819 - DNA, 1167 bp, Zea mays
  Clone ID: LIB4740-019-B9_FLI
ccgggaaaaaactggcacaggactggaccccgtcccgtacggcatcgcaccccgcagccgcaggccgcatcttcctcgcgtgctctgccctctgtgcctgcccatccgttgatcccatcggcttccccttcctcttcctcgatccccttcctcccccgatcccatccaattccacttccacaccccgggcctcgccgccgacgccgacgccgacgccgccggccatgtccaagtacggcaccattcccacctcctcctccgcgggcggagggcccgtgcccctcggcggcgcctccccgctcgatttcatctcccgcgccaaggctcggggcgcctcggcgctggcgacgcgccggccctggcgcgagctcgtggacgtccacgccgtcggcctgcccccgagcctcggcgacgcgtacctccgcgtgcgcgccaacctcgcccacttcgccatgaactacgccatcgtcgtcctagtcgtcgtcttcctctccctcctctggcaccccgtctccctcatcgtcttcctcgtctgcatgctcgcctggctcgtcctctacttcctccgcgacgagcccctcgtcctcttcggccgcgtcgtcgccgacggctacgtcctcgccgtgctcgccgtcgtcacgctcgtcctgctcctcctcaccgacgccaccgccaacatcctctcctcgctgctcatcggcctcgtcctcgtcctcgtccacgccgcgctgcacaaggcggaggacaacgccgccgacgaggctgaccgctggtacgcgccggtgtcacagcagccgtcgcactgaggatctgaatgtggccattccgcgccttggctgtgatcctattctgtactccctgtttccgagttcctccagctgcgcaagctgggccatccccatctcatctgcgatgaaaaacctgtccctgttggttgtgattcacctgctgccggttccatgggaagttttggatccagcgacgacgcagggctgttaaacttgttctccacgcccatttctgtgatacgtttaaagcgtctcgttcacgtgtatcaaatccggactgaagtctagtgtacattttgagttggagaaatgtgatgccagggacctgcgttcagattttatcgacgccatgcatgtaggcaagcgatgctgatattcc

SEQ ID NO: 27820 - DNA, 594 bp, Zea mays
  Clone ID: LIB4740-019-F1_FLI
aacaacagccctacaacttactgcttgctctagctagctagctgctcctggcccatatccactaggagtacacaagtaggctagcagcaatggcctcggtgacgaggttcccggccgtggccctcgtcctgctgctcgccgccagcgccttcctggccagcgaggtggctgcgtgcggcggctgcccgaaaccaactcctcctccatcgccaccgccgccgtcgcccaccagcacgccgtgccctccgccgccgtccagctccggcggcaagtgccccaagaacgcgctgaaactgggcgtgtgcgccaacgtgctgggcctcgtcaaggtgtccatcggcaaggtgcccaccgactcgtgctgcccactgctggacgggctcgccgacctggaggccgccgtctgcctctgcaccgcgctcaaggccaacgtgctcggcatcaatctcgacgtccccgtcaagctcaccctgctcctcaactactgcggcaagagcgtccctcagggcttcctgcgcgcctaatatatactagtggctagttcgtcactagcttctcagttgccatatgcatatttgtgattcttcttctttc

SEQ ID NO: 27821 - DNA, 711 bp, Zea mays
  Clone ID: LIB4740-020-B4_FLI
aggaagatggggctcgccaagaaggagatgcggatcctcatggtcggcctcgacgccgccggtaaaaccaccatcctctacaagctcaagctcggcgagatcgtcaccaccatccccaccatcggtttcaatgttgaaactgttgagtacaagaacattagcttcactgtctgggatgtcgggggtcaggacaagatcagacctctttggaggcattacttccagaacacccagggtcttatttttgttgtggacagcaatgaccgtgaccgtgttgttgaagccagagatgagctccacaggatgctgaacgaggatgagctacgtgatgctgtgctgcttgtttttgccaacaagcaagatcttcccaatgccatgaatgctgctgagattactgacaagcttggattacactccctgcgccagcgacactggtacatccagagcacttgtgccacaactggcgagggtctgtatgagggcctggactggctgtccagcaacattgcgagcaaggcttgaggcctaccttgaatatcaactgcgaactgactaggagctccggatgtatcatggaaactcaggacagaatcgcagttgcaatctgttagatgtcttctaccggcactatatatattttttgtttgatgtgtaatgatgttactgttcaacgcttattaccctactatactgttggatgttctttggacc

SEQ ID NO: 27822 - DNA, 1353 bp, Zea mays
  Clone ID: LIB4740-020-B5_FLI
acaggggcagccaggcacacacacacacagtgaccctgccccttttcccggccgtctcgctctccaccgatattccgctcctcctgtccagtcctcctcccccgagccggctcattatatcgtccgtcgcgcagcacaacgcaagtttgctagcggccggatcagcagccacagcgcgaagagagcaaccacgctgcacacagaggcgcccgtgtgtgagatagagcaagctcgatcgaaggaaggagggaagctagagatcgtacgtcgccatggggaggggacgagttgagctcaagcggatcgagaacaagatcaaccgccaggtcaccttctccaagcgccgcaacggcctgctcaagaaggcctacgagctctccgtgctctgcgacgccgaggtcgcgctcatcatcttctccagccgcggcaagctctacgagttcggcagcgccggcataacaaaaactttagaaaggtaccaacattgctgctacaatgctcaagattccaatggcgcactctctgaaactcagagctggtaccaggaaatgtcaaaactgagggcaaaattcgaggccttgcagcgcactcagaggcacttgcttggggaggaacttggcccactgagtgtgaaggagttgcagcagctagagaaacagctcgaatgtgctttgtcacaggcaagacagagaaagacacaacttatgatggagcaagtggaagagctccgcagaaaggagcgacacctgggagaaatgaacaggcaactcaaacacaagcttgaagctgaaggttgtagcaactacagaaccctgcagcatgcagcctggccagctcccggcagcaccatggtggagcatgacggcgccacctatcatgtgcatccaacaactgctcaatcggttgcaatggactgtgaacccactctgcaaatcgggtaccctcctcatcaccagtttctgccttccgaggcagccaataatatcccaaggagcccccctggaggcgagaacaacttcatgctgggatgggttctttgagttgctctgtttaatcatccatccatcagatggatgtccaaactaataaaaggcactcagtgctaccatatgcatatccatgcttaagtgcttgatttgccacgacgtgggatatcttttaaatttatcgttctggtgtgtaataactaattaagaacggcaccttcattctatggttgtggtgtggcacttctatctatggtttttgtatttggaccacgaatgttgtaatttgtaaaaaaatttaaagatttatctatgctgccggtgctgcggtgcatagcccggtgcatagaatccaaaattatctgcg

SEQ ID NO: 27823 - DNA, 1752 bp, Zea mays
  Clone ID: LIB4740-020-E5_FLI
ccaggagggcaccagaagcagccagcaagctcatgcccttcaaaagcctccggcagcccagcgccccagccagctagtggtgatctctcatctcagcagcgcgcctgaacgtgtgctccctgctaagctctgcgcctcgataggcaaaggaaaatcaaaccgatcgtcgtcagattaaatggccggtagcagcgcggagcagctcctctccaggatcgccgccggcgacggccacggcgagaactcgtcctacttcgacgggtggaaggcctacgacatgaaccctttcgacctgcgccacaaccgcgacggcgtcatccagatgggcctcgccgagaaccaactgtcgctggacctgatcgagcaatggagcgtggaccacccggaggcgtccatctgcacggcgcagggcgcgccgcagttccggaggatagccaacttccaggactaccacggcctgccggagttcagagaggcgatggccaagttcatggggcaggtgaggggcggcaaggtgacgttcgaccccgaccgcgtcgtcatgtgcgggggagccaccggcgcgcaggacactctcgccttctgcctcgctgacccgggcgacgcctacctcgtgccgacgccttattacccagctttcgaccgcgactgttgctggaggtcaggagtgaagctgctgcccatcgaatgccacagctcgaacaacttcaccctcaccagggaggcgctcgtgtcggcctacgacggcgcgcggaggcagggcgtccgcgtcaggggcatcctcatcaccaacccctccaacccgctgggcaccacaatggaccgcggcacgctggcgatgctcgccgcgttcgccacagagcgccgcgtccacctcatctgcgacgagatctacgcgggctccgtcttcgccaggccgggcttcgtgagcatcgccgaggtcatcgagcgcgacgccccgggctgcaacacggacctcgtccacatcgcgtacagcctctccaaggacttcggcctcccgggcttccgcgtcggcatcgtctactcctacaacgacgacgtggtggcctgcgcgcgcaagatgtccagcttcggcctcgtctcgtcgcagacgcagcacttcctggcgatgatgctcgccgacgcggagttcatggcacgcttcctcgcggagagcgcgcggcggctggcggcgcgccacgaccgcttcgtcgcgggcctccgcgaggtcggcatcgcgtgcctgccgggcaacgcgggcctcttctcgtggatggacctgcggggcatgctccgggagaggacgcacgacgcggagctggagctgtggcgggtcatcgtacacagggtgaagctcaacgtgtcgcccggcacgtcgttccactgcaacgagcccggctggttccgcgtctgctacgccaacatggacgacgacaccatggaggtcgcgctcgaccggatccgccgcttcgtgcgccagcaccagcacagcaaggccaaggccgagcgctgggcggccacgcggccccttcgcctcagcttgccgcgccggggagcaaccaccgcttcgcatctcgccatctccagccccttggcgttgctgtcgccgcagtccccgatggtccacgccagctaggtagtcaccgagcgttcggtaagactggctgtaggttgtgccctcacatgactgcaaacaagtggacaaaaaaaaagacaagactaataaagggcgtacgtagctagcttgacatt

SEQ ID NO: 27824 - DNA, 1350 bp, Zea mays
  Clone ID: LIB4740-020-G6_FLI
ctcgaggccggccgggtccaccgtccacctcagctcccatatcctttcccctacctctccagcatctcccgtctccgtcgtctcgtctccgctcctcacctcgccagccatgggcaagatcaagatcggaatcaacggtttcggaaggatcggcaggctcgtggccagggtcgccctgcagagcgaggatgtcgagctcgtcgccgtcaacgaccccttcatcaccacggattacatgacctacatgttcaagtacgacaccgtgcacggccaatggaagcacagcgacatcaccctcaaggactccaagacgcctctcttcggcgagaagccggtcaccgtctttggcatcaggaaccccgaggagatcccgtggggtgaggctggtgctgagtatgtcgtggagtccaccggtgtcttcactgacaaggacaaggctgctgcacatctgaagggtggtgccaagaaggttgttatctctgccccaagcaaagatgcacccatgtttgttgttggtgtcaatgaggacaagtacacctccgatgttaacattgtttccaatgctagctgcaccacaaactgccttgctccccttgctaaggtcattcatgacaactttggcattattgagggcttgatgacaactgttcatgccatcactgccacccagaagactgttgatggaccctcagccaaggactggagaggtggcagggctgccagctttaacatcattcccagcagcaccggtgctgccaaggctgtcggtaaggttcttcctgaattgaatggcaagctcactggcatgtccttccgggttcccaccgtggatgtgtcagttgtagacctcactgtcagaatcgagaagggggcctcctacgaggaaatcaagaaagctattaaggccgcttctgagggcccactcaagggtatcatgggctacgtggaggaggatctggtttccaccgacttcaccggtgacagcaggtcgagcatcttcgacgccaaggccgggattgccctgaacgaccacttcatcaagctcgtctcgtggtacgacaacgagtggggctacagcaaccgcgtcgtcgacctgatccgccacatgttcaagacccagtaggctagtagagagatagatttctgcctccctatcgtgggtcgtccccaatggcctttggtcgcagaccatctttgctgcttgtctatgctgagaataaatgtgaacggtgcccctggacgctggatccatgctggttttggacacgctgtctttttgtgtttaacttatctgctgccgtcctgtaacgaattcgcaagttttagttcttttgtgctttgttaaagaat

SEQ ID NO: 27825 - DNA, 986 bp, Zea mays
  Clone ID: LIB4740-021-A7_FLI
ctcgaggccggccgggagggtttccacccccagccggcgtcaccctcatgagccagccgccagccccaggcttctagcctctgtccaagccggcagcccgccacccgcgaggccgcgaccggcgaccgcccgcccctgacgtggtgactgcgtcctcctccgctctccgtgcgccaccctgaagcggtgaggcgaggacctccaggcaccgccctccctggttcggcggctccctcgaggccttcctccccaccggttcagcagctcccgatccgcacggccaaaggccgattcgcgctcctccagccttcctccgcgtccaacagcaagtgaaaaacttcaacccaagaatggcgatgtcttggacaagagggttaaagcatggtgttgttccgaggcatgccgctcaattggtagagagcagaagccttgcaattgcaagcaaggcgaagaagggtggaaaggctgatgctggcaaaactcctgctctcagccaagagctcaagagtacaacagtgttcggggcaaacatcttcaaggagggttctgatccgaaaatccaaccagactctgagtatcctgactggctgtggcacttgctcgacaagcgtcctgtactaagtgagctgcggaggaaagatcccaagacactctcttatgaagacctgaagcgttttgtcaagttggacaaccgatccaggatcaagataaggaatgacctcaatgctaagaactgacctggagtcttggacgaaacaggacctgctctactgttctttttattattaatataatactagacgacatgaataatttttctggagtttttggcaaaacatagcgacttgggatgttaaaatgttaagatgtgcttggtttgttactcttttaggcagcttacgacactggcatgctttttgttcttccatcttgggaaagatgcagctttgtgcccagtacttagcaaattatcaagttccatggtt

SEQ ID NO: 27826 - DNA, 793 bp, Zea mays
  Clone ID: LIB4740-021-B7_FLI
ccggccgggaggccacttaccagcagtcaccactcccaagccagtaccgagtcctacgagcagtcgcacgcaagtgtcaagagacgaaacggtcgacatggctcgcacgcaatctgccgtagcggtcgccgtggtggccgcggtgctgctgctggcagcggcggcgacgacctcggaggccgccatcacctgcgggcaggtgagctccgccatcgcgccctgcctctcctacgcccgcggcacggggtccgccccctccgcgtcctgctgtagcggcgtcaggaacctcaagagcgccgccagcaccgccgccgacaggcgcgccgcctgcaactgcctcaagaacgccgccaggggcgtcagcggcctcaacgccggcaacgccgccagcatcccctccaagtgcggcgtcagcatcccctacaccatcagcacctccaccgactgctccagggtgaactaaaacctagaccacgcgcgacgacggccgcctgatcgatcgaccaaccattccgccgtcgccgccggccggatcatcgatcgtcgtcatgatgatatctatcaatctacgcgtgatgatcgatgactacttgtctactgctatgtactactaaataaaatctctccgtgtgtacacgtacgcttgcatgtgcatggtagcatgtacgtacgacgtcgtccatgtatgtgtgtgtgacgtgtgagacggacagagagagagagacaggatcgatcgagagacggtcatgtccttttggctgtttggtttattcatatcacaacttttgagtgg

SEQ ID NO: 27827 - DNA, 1465 bp, Zea mays
  Clone ID: LIB4740-022-B11_FLI
ctcgaggccggccgggccagatctccggatcgctgatccgactagtcgagaatccagatctctcgcctgctcgctaccaaataccaaccacgaagaacaggaagaatgcccaaactgtcgtgtcgggtgctctttgcggctcttctcatcgcttcgctagccgctctgctcgtccggttcccgatccacaggctcctcaatccccacgccgccatggaccccgactccgagctcgagttcgagatgcccggcgtcttgcgtgtgtacaagaccggccgcgtcgagcgcttcgacggcaccgagaccgtcccgccctgccccgatggcgatcccgccaacggcgtcgcgtccaaggacatcgtcctggaccccgccgcaggcatctccgcccgcctctacctacccgcgggagtggatgccgggaagaagctccccgtcgttgtgttcttccacggcggtgcgttcatggtccacaccgccgcctccccgctgtaccacatctacgccgcctccctcgctgccgcggtgcccgccgtcgtcgtctccgttgactaccgcctagcgcccgagcaccgcatccccgccgcctacgacgacgcattcgcggccttgaaggcggtcatcgccgcgtgccgcgcggatggcgccgaggcggaagctgagccctggctcgccgctcacggcgacgcctcccgcatcgtccttgcgggggacagcgccggcggtaacatggcgcacaacgtggcgataaggctgcgcaaggaaggcggcatcgagggttacggcgacatggtcagcggcgtcgtcctcctgtacccttatttctgggggaaggagccgccgggcgcggagcccacggatcccggctaccgcgcaatgttcgatcccacttgggaattcatctgcggcggaaagttcggcctcgaccacccctacgtcaacccaatggcatcgccggaggagtggaggcagcttggttcccgccgcgtgctggtgaccacggcggaccagtgctggttcgtggagagggcaagggcttacgcagagggaatcaagaagtgcggctgggagggggagctcgagttctacgagaccaagggtgaggcgcacgtcttcttcttgcctaaacacggcagcgaaaaagccgtgaaggagctcgccctcgtggccgaattcgtccggcgctgttgaggtgcctttcgctttgtttgcccggacctggtgagtagttcagcgagagaaaaaaaatcgcacaattagtgacttttattcatattgcaagttaagcacagaggttcagtctcgattcagaatcctgatcttgaatttctgttgtgcatcgaaatttatcctgaacagtacatactgtaatttcgaagtgcaggctagcgagtggctaaatgtattgtatacttgaaaactgtccgatgtattgtatacttgaaaattgcccctgtttctttcg

SEQ ID NO: 27828 - DNA, 1643 bp, Zea mays
  Clone ID: LIB4740-023-A11_FLI
ctcgaggccggccgggctttttttctccgggcacaccatactgttcttgctacttctagatagaggaacaagagagagaaggccaccgacatcgcctcttaacccgacaagccccattgcccaggagaaccccgtgccggggagcgagccgcgcgcattccccgtcccgtgccaccggaccaggggaaggaggacacacatgtcgtcgtctctctctccagcggcggcagccgcgcccctggatctggacggcaactccgtcgcgcccctcaccatctgcatgattggtgccggcggcttcatcggctcccacctctgcgagaagctcatggccgagacgcgccatgtcgtcctcgccgtcgacgtatactgcgataagatccgccacctcgtcgaccccgcgccgccgcacctcgcggggcgcatctccttccaccgcctcaacatcaagaatgactccaggctcgagggcctcatcaagatggccgatctgaccatcaacctggcggctatctgcacgccggcggactacaacacgcgccccctcgacaccatctacagcaacttcatcgatgcactcccagtggtcaagtactgctccgagaacagcaagcgtctcatccacttctccacgtgcgaggtctatggcaagaccatcggcagcttcctccccaaagaccacccgctccgcaaggaacctgaattttatgttctgaaagaagatgagtcaccctgtatttttggtccaatcgtgaaacaacgatggtcctatgcttgcgcgaagcaacttattgagagacttatatttgctgagggtgcagaaaatggccttgaattcacaatcgtgagaccttttaattggattgggccaaggatggatttcattcctggtgtcgatggtcctagtgagggtgtaccccgggtgctggcttgcttcagtaacaatctgctccgccgagagcctttgaagcttgtcgatgggggccagtctcagagaacctttgtatacatcaaggatgccatcgaagctgttgtgctgatgattgaaaatcctgctcgagccaatggtcacatcttcaatgttgggaatcctgacaatgaggttacggttagggagttggcccaaatgatgacagaggtctatgcaaacgtctcaggagaggcgccgctggatgagcctatgatcgacgtgagttcgagtcagttctacggtgaaggatacgatgacagtgataagagaattcctgacatgactataatcaacaagcagctaggttggaacccaaagacacctctcaaggatctgctggagacaacattgacgtaccagcacaagacatacaaagaagctgtgaagaggcaaatgtcgcaggcttcagcaacaagttaagttggcgctggctggggacggctcctcgtttagagccctagtcgcagcagctgtttcgcaagtcagaatacatatacgccggtaatcgttctgtttgaggccctagacgcgcccatgttttgtctgctaccaagggatgttatcctattgtgatataactactacctgtgtttggttgctcctagttttttttcttgcaattatatgtatttatattgaaaaactatatattatttaaaatacaattaaaaag

SEQ ID NO: 27829 - DNA, 1459 bp, Zea mays
  Clone ID: LIB4740-024-B3_FLI
ctcgaggccggccggacagtgcctgctcacaattagcagtgtacgtagttgagaccacacagctgcgccattaacatatagcaggcctagcagtgccgttctggcaagggcgggagaggggatgaggacgagcggagccggcctgcaggtggcgtgcgtcgtcgcagccctgtgcctgctcctgccgacggcgagccgcgcccaactgcaggtggggttctacaacacctcctgccccaacgccgaggcgctcgtgcgtcaggtcgtcacggctgctttcgccaacaactccggcgtcgcacccgggctcatccgcctccatttccatgactgcttcgtcaggggctgcgatgcctccgtgctcctgtccgtgaaccccgccggcggcaaaacggagcgtgagtccccggccaacgacccgagcctgcgcggcttcgacgtgatcgacgccgccaaggccgccgtggagcggagctgcccacgcacggtgtcgtgcgccgacgtcctcgcgttcgcggcccgcgacagcgtcaccctgacgggcaacctcttctacgacgtgccagcggggcggcgggacggccgcgtgtccaacgagacggaggccaacgacaacctgctggggccggacagcacggcggagatcctcatcgacggcttcgggaagaagaacctgagcatcgaggacatggtggtcctgtccggctcccacaccatcggccgctcccactgcttctccttcctgtccaccaaccggcagcggctggccaacgggaccataagccccgcgtaccaggcgctgctggaggcgctgtgcccgcccaacccgggccagttcacccccaacaccacggagatcgacgtcagcacgcccaccgtgctggacaacaactactacaagctgctgccgctcaacctgggtctgcacttctccgacgaccagctcatccgcaacggcacgctcgcgccgttcgccagcgcattcgccgccaacgagacgctctggaaggacaagttcgccgccgccatgatcaagatgggcaacatcgaggtcaagaccggcaccacggatgagatccgcctcaactgcagcgtcgtcaacccgtcgtcgtcgtcgtccaccgccggggtgatcgagatgcggttccctgcagccgacgaggttgccacgagctgatgactgatcgaaaaaatatatccacacgtgttaataacgcgcgtgcggcctgcatgagtacgtacatatcttcgcctttgtacgtacgtggacctcgcttgtttgctgcgcgcacagtcgtactgaactgggtttgatttctgggtgtggtgaaagcatgaataaaagttgcttacatggcgtgcgaaattaaattgacgatgtagctagtacttcctctgcagtcctccaaagaaaataatataagttacgcgtgcccgttaaaatgggttcatattagct

SEQ ID NO: 27830 - DNA, 482 bp, Zea mays
  Clone ID: LIB4740-026-C4_FLI
taccctcgaggccggccgggccaggagcaagaaacactcagaagctgcccagagctaccaccgtacccctcttatccccacccctcctcctcctaccttttctccttcagacctcaaaatctgtgtgtctcctgccgcggctagctgataggaacaagagcatgcacatccgagaagaggaggctacaccatccacagtaacaggcatcatgtcgaccctgacttcggcggggcagcagaagctgaaggagcccatatcccctggtggcggctccgcgtcggtcgctgggtccgctgcggagaggaacaacggcggcaggggcaagggcaagactgagatcaagcgcatcgagaacacgaccaacaggcaggtcaccttctgcaagcgccgcaacggcctcctcaagaaggcgtacgagctctccgtgctctgcgacgccgaggtcgcgctcatcgtcttctccagccgcggccctcgagct

SEQ ID NO: 27831 - DNA, 655 bp, Zea mays
  Clone ID: LIB4740-027-D5_FLI
ccggaaaaaaaaaaaaaaacagttcatccctctcgacgcgccgccgccgtctcgccgctgccacccagattgacggctccaattggcgcccatggcggaagaaaccaacatagaaaaggaggaagaggagttcagcaccggtcctctctcggtgctcatgatgagcgtcaagaataatacccaggttcttatcaactgccggaacaacaagaagttgcttggtcgcgtgcgagccttcgatcggcactgcaacatggttcttgagaacgttagggagatgtggaccgaggtaccgaagaccggtaaaggcaagaagaaggctctcccggtgaacaaggacaggttcataagcaagatgttcctccgtggggattcggtcatcattgtcctcaggaacccgaaatgagtagcctgtacacgtagagagtctatttgctagcagtacgttgtgctattgggtgtaaggtgtatgccaaatgctcaaagcatgggagtgtaagtcgcggcagaattcgccatgggattcagcttaagacaggatgctagggctgggttttgcttcttgtagcagacttgaacacgatgctcggcaatctcttgtacctcctcagctcggcaatctcttgtacctcctcggctcggcaatctctccacg

SEQ ID NO: 27832 - DNA, 853 bp, Zea mays
  Clone ID: LIB4740-027-E9_FLI
ccgggtttccccttatattacttttccccctcagatcagatcggcaaggccaatccgaaatctcgagcgctcgcgccggcgaccacagcaaagaggaggccgcagcacgacagcgccccagggttcctactctcgtcgcagcggcagcactggtagcggcagcagtgaggggaagatgtcgtcggtgttcagcggcgatgagaccgcccccttcttcggcttccttggcgccgccgccgcgctcgtcttctcatgcatgggggcggcgtacgggacggccaagagtggcgtcggcgtggcgtccatgggtgtcatgcgcccagagctcgtcatgaagtccatcgtgcccgtggtcatggctggtgtgctcggtatctacggcctcatcatcgccgtcatcatcagcactgggatcaaccccaaggccaagccatactacctctttgacggctatgcccacctgtcgtccggccttgcctgtggtcttgctgggcttgctgcaggcatggccattggcatcgttggtgatgctggtgtcagggcgaacgctcagcagccaaagctgtttgtgggcatgatcctcatcctcatcttcgctgaagcgctcgccctatacggtctcatcgtcggcatcatcctttcatcccgcgccggccagtctcgtgcggactaggcacgttccacatgtctccgccacctggtcgtaaccgggtcgtgttttgtatcggtgatgagccgacaagctggagcacttaattttttttatgctgtctagttttttgaacttgcgttgagtcgagaaaacaaaatagaacttgggtagccgagggggtgaccttttttcccttgtgcc

SEQ ID NO: 27833 - DNA, 818 bp, Zea mays
  Clone ID: LIB4740-028-A1_FLI
ccgggacgcaggcagaggcagcatagcagcagccagctccatccatcctctttcccctcctcgcttcgcttcctcggcggattcctcctccctcgaccgtccccgtccccgtccccttccggcgcgcaagctcgcccgagatggcaaacgctagatcgggtgtcgctgtgaatgacgagtgcatgctcaagttcggcgagctgcagtcgaagaggctgcaccgcttcctaactttcaagatggacgacaagttcaaggagatcgttgtggaccaggtcggggatcgcgctaccagctacgaggacttcacaaacagcctccccgagaatgactgccgatacgcgatctatgatttcgactttgtcactgcagaagatgtccagaagagcaggatcttctatatcctatggtccccatcctccgccaaggtgaagagcaagatgctttatgcaagctcaaaccaaaaattcaagagtgggctcaatggcattcaggtggaactgcaggctactgatgcaagtgaaatcagccttgatgagatcaaggatcgggctcgctaggcatcatgatcatgcatcatggactcggcctactactgtggatttgtatgccattatagacttggtgctgtgaaagactgcttgatgatttgcgggtttgttgctgtgtaaaaaaaggtcccatggctcccagaagaccatgaaggttcggatctatcatgtaattccttgttatctgccaattatgtatggactatggacatgtgttgcgctgttcaacttactactacaaataagtaatcgataatgttcccttac

SEQ ID NO: 27834 - DNA, 1157 bp, Zea mays
  Clone ID: LIB4740-028-B12_FLI
ctcgaggccggccggggacgtggcgctcctcctccgacgattcgctccctccctcgagtttcaccactccctcctctcgcggccacgcactcccccgcctccgcaacctctcaccgccggtccccgccctccgaccctccacgcgcaaacagcccgcctccatccaccaggatccccgatgagctaggagaagtgttgatttggatattcgtggagtgtgcaatggtggactttgttcgacggctcgcctctgccctgctcaagtgctgcgaccttgacatacccaatcggccaaagggcctcgaggaccccgaacgcctggctagagaaactgtttttaatgtgaatgaaatcgaggctctgtatgagctgttcaagaagattagcagtgctgtggttgatgatggcttgattaacaaggatgaattccaattagccttgtttaagaccaacagaaaggatagcatgtttgctgaccgggtatttgacttgtttgacacgaaacacaatggaattctcgagtttgaggaatttgctcaagccctttctgtgttccatccgagtgcaccaatcgatgacaaaattgattttgctttcaaattgtatgatctcaagcaacaaggtttcattgaaaagcaggaggtcaagcaaatggtggtcgcaacacttgctgaatcaggaatgaatctttcagatgatattattgaaggcattattgataaaacatttgaggaagcagatacaaagcacgacggcaaaattgataaggaggaatggcgcagccttgtcttgaggcatccatctctgttaaaaaatatgaccctcccatatctccgggatatcaccacaacatttccaagctttgtgttcaactctcaagtagaggatgcgtgaggtcccagcgtctacggcaccattgaagcccctggggcacagcagatcaggttctgtgggggcacttagttgtttttgtttccttgaaaatgtaaattttatgtggtggcatgtcctcctgtatagtgagtattgctattgtgcacagaattggggcatgaagcgtttcttgtcgctgtttataaaatattcttcaaacatattgctcataaaaaactactcaaagtaagaatcaaattgagtacaaaactactcaaagtaag

SEQ ID NO: 27835 - DNA, 943 bp, Zea mays
  Clone ID: LIB4740-032-F8_FLI
accagatcacgacattattaattttaaaaaaaatgcttgcaagcaactacggtacaacgggatactccacagtgaacccagcacctctgtcagtcagtttggacgcttgtctgtgccattatcgttcttgcaaatccagctaacataaagaaaaagcgagaaaacaggcaaacagctcctgcaaagcaagttgcttgtagaacggcactacaaaaggaactctccatagagcagagcagccggagccatatgcagcagggagaacccagccggtgctaggcagccaagcacgacatggcagaagaaagcgtcgtaaaagcttccgctggcgatgcagtgaagggtgggaaagtggaggagagtggcgagaagatggtgacaatggctaaggttccgttccacagcatgtttaagtgtgccgacagaacggacgttctgctgatgctggccggcatggttggggcgctgggcaacggcatgtcgatggtggtcatgacgatcatcttcgggcagatggtcgatgcctttgggggcgccaccccggacaccattgttccccgagtcagcaaggtactgccccctatgcaagctatatatagtctgcaagtccagagatatcatgttggacaatgactggggagaggcaggctactcgtattcgatcattgtatctcaagtcggtcctcagacaggatatgccattctttgatgtagaaatgactactggacaagtagtctccagcatatctgccgacatgaccctaatccagggtgctattggtgaaaaggtaagcacatgaaccttgcatcttcttcaatgattttatatcgcaggtagcgtacttgcgctcccggaaggagacgaggaggtgtacaggtcggccattccggatgcgcggtacaggcaggaccgaggggaagggaagagccttgccgaaagcgc

SEQ ID NO: 27836 - DNA, 970 bp, Zea mays
  Clone ID: LIB4740-034-E12_FLI
ccgggcccagtccacccagcccacagcccaggccactcgcaaatcgcaacccacagcacgtctcctcctttgctcgtccaccctgccatctccgcaacccctacctacaggcagcagcccagcacgtccctttctacgcctccacctccctcgattcgttccgagcccatcgcctccgcctcttcgtcaccgtcgaggtcgcaccacatggcggcgctcctagcccggcaggcagcgcaggcgctccgcgcgagacagtcggcgcagctcgggccgacaacgtcggcgatgcaggggcacctccgtacctacatgaacgcggggattcccaagcggttcaaagaggaagaggagaaagaacagcttgcaaaagatatcgcaaaagattggaatgctgtgtttgaaaggagcatcaatacattgtttttgactgaagtggtccgtggcttgatgctaactctcaagtacttcttcgagagaaacgttacaattaactatccgtttgagaagggtcctctgagtccccgcttccgtggtgagcacgctctcagacgttacgaatctggggaagagcgttgcattgcttgtaaactatgcgaagctatatgcccagctcaggcaattacaattgaggctgaagaacgtgaagacggcagtcgccgaaccacaaggtatgatattgacatgaccaaatgcatttactgtgggttctgccaagaggcttgcccagtcgatgctattgttgaggggcctaactttgagtttgctactgagacacacgaggaactactgtacgacaaggagaaattgctcgagaatggtgaccgctgggaaactgagattgctgagaacttgagatctgagagcctttatcgctgaatctgtctttcattgtggttgatatactgtgttctcccattttccatattttgctcaactacctgatgaataagtataaacgatatatcac

SEQ ID NO: 27837 - DNA, 638 bp, Zea mays
  Clone ID: LIB4740-035-A12_FLI
ccggggattgcagccgatttcgtgtccctgcagccacggccaccgcccatctccacttctttatcttctccgaggtcgaggatgccccgcagcggcttctcggggtccttcaggtcgcccaagatcgacgtcgtcatcgacatgggaaaccccttcctcaaccgcaccgtcgacggcttcctcaagatcggcgccgtcggcgcctgcaaggtggctgccgaggagaccttcgagtgcctccacaggggggatgtttcgaagcacaaggttgagcatgccctgaggaagatgtgcaaggagggcgcatattggggcactgttgctggagtttatgtgggcatggtgtacggcgtggaaagggtccgtggccgcagtgactggaagaacgcgatgatcgggggcgccttgtccggcgccctgatctccggcgccagcaacagcgacagaggcaaggtcgtcaaggacgccatcacggccggcgcggtcgccacagccgtcgagttcatcaactgcattacctagccgagcaaggagcaactgcatttgcagtgccattgtcgtgcaaaatatgaataaagtacttcgccatgtccagtccagttcataaaccaccccacaccttcagtcttcgtttcaag

SEQ ID NO: 27838 - DNA, 831 bp, Zea mays
  Clone ID: LIB4740-035-A9_FLI
gaggccggccgggaccgagcagcaacaagccaacaactaaaggcaggcgcggcacaccgcgacaccgtaccggcctagacacttggagaaaggagaagcagcgcagcggcatgggcaccagtcccgtcatccctgcgacgatgctcgtcgtcgctctccttgtcgctagtagtactgtctgcttcggcgccaccgccaccgacaccgacaccgacggcgccattcgtctccccagcagctctggtgctgttggtcgaccgtgggagtgctgtgactatgtcaccaaggagccgtttatcaggccgccccggtggcgctgcaacgacgtggtggacaagtgctccgccgactgccaagagtgcgaggagtcgccggccggcgacggcttcgtctgccgtgactggatcttcagcctgctcgagcccccggtctgcacacccaggccgtgggactgctgcgacttcgccgtctgcacaagggactacatcccctactgccagtgcggcgacgtggtggagtcgtgccccagcaactgcaaagcgtgcaagcttgtggagtcggaccctcctcgctaccgatgcctagacgtcttccacggctatcctggtcccaagtgcacgccatggatcagttagagcaattagctcagctcagctacttgctaaataaataaataaaagtagcgcagctcagctacttgctagtacgtagtacgtccacaataaataaataaaagcggctagcgaacaaagctaacacctgtttgttcgtcccgagtcccgacactctttcgcgcaatcgcgcgtcattaaatataaataataactagct

SEQ ID NO: 27839 - DNA, 721 bp, Zea mays
  Clone ID: LIB4740-035-H6_FLI
ccgggctaactccaacctacccagcctcggccagccacctccccgtcgctctcacgctcttcgtgcccgccgcctcccctcttcccctccacctcactcctcccgtctgacgcacatggcctccatcgccggatcttccgctctctccttcgccatgcctgtcaaggcaatcaactcaaattctctagccttctccccggtgaggaagggtaacacattcctccgcctgcaaccagtgcctatgagatctgtttcctgcgctgccaagaaggatacggtggacaaggtttgtgaaattgtgaagaagcagcttgctcttcctgaccacactgaagtttgtggtgaatcgaaattctctgaacttggtgcggattcgctggacacggttgagattgtgatgggccttgaggagcacttcgacattagcgtggaggagtccagcgcgcagacaattgccaccgttgaagacgccgctgacctcattgacaagcttgttgctgtgaaggcataggccgcatctcttctatcattgtcttaccactctaggtttctatggtctgaagacttttctccgcactgctgttgctattcccgtgtcgtaataatacgagatgttttaagcggctgaacacacggtggtgtaatctgttactggtaaggtgcattgttgtatgaattgtttctcacccagaagaaccagaccatcggggattctagcatc

SEQ ID NO: 27840 - DNA, 802 bp, Zea mays
  Clone ID: LIB4740-037-H7_FLI
ctcgaggccggccggcacaacaccagaatccgcgaatcacagacgcgcctatctcagcttgctgcactgccctgccatcatatcgtacgtgagcccggccgagagcgagggagaggcatggctgctccgaagctcgcgacgctggcgctggctgtgctcctggcggcgaccgtggtggctcccccggccgcggtgcgcgcggcgatgtcgtgctccaccgtgtacagcacgctgatgccgtgcctgccgttcgtccagatgggcggggccatgccgccccagccgtgctgcggcggcatccgcagcctgctgcagcaggccaacaacacccccgaccgccgcaccatctgcggctgcctcaagaacgtcgccaacggcgccaacgggagcggcacctacatcagccgcgccgccgcgctgcccagcaagtgcggcgtcgccctgccgtacaagatcagcaccaacgttaactgcaacacgattaattaagtgaggcgtcctgtgcgcgtcccgggcgaggaatgcatgcatggcgctggcggagagtaataaaataatgctactggtattttaagctagatcgaggtgtgcctgtctctagtcatttattatggtgtttaggaatcgtcgtctacacagttcgtaacggtgtatcgtggatgcatgttgccgcgagcagagtacgtaggcatgaaccgatgtgtgcgcttctgtctgtgtactctctctatgtagtaatgtgtgggtgctttgatccaaatgtattcgctcgtgagtcgtggaagtagatcgtttcagtacc

SEQ ID NO: 27841 - DNA, 684 bp, Zea mays
  Clone ID: LIB4740-040-D8_FLI
ctcgaggccggccgggagaaactggaaagaggcctcactgctgccgcctgggccaagtcgtcgtcttgcttgccaatccgtcgctccacctgaacacaccggcgaagaggaggcgaagaagcgatgggcgtgaccaaggaggacgtcgaggcggccatcacctccgctctcagcccttccaatctcgtggtgacggacacgtccggagggtgtggcgcgagctacgagatcgaggtggtgtcggagaagttcgaggggaagcggctgctggagaggcaccggatggtgaacaccgcgctggcgtctcacatggcggagatccacgccgtctccatcaagaaggcgctcaccccggctcaggcccagccccagccccagccccagccggagccggccgccgataagccccaggcttaagtgcttaacaccccccaaaacggttcgatcccatatgccgatgcacgattacattggctatctgcttgaataatgcggcggatgcacttgctaaattgcaggatgttatccttgactgattagaaacttctgcaccgtgcatttaacttctgtgtcactgtgtgtgttctggatgcttctgccctggtcgtttgctggagactctgtgttgcagttcatgctattaatgttctgccagggttgggttttcagtcctggaattgttat

SEQ ID NO: 27842 - DNA, 995 bp, Zea mays
  Clone ID: LIB4740-040-D9_FLI
ccgggataccggcagtgccactgtgccaaccagccagccgctctgcttgtcctccagacagtccaggattgaccgccagcccctgcactgcacacacgccctccctcattcacccaccccccaatcgcctccgaatctctctgcctcattctctctccaccggcgagtccgaccgcactgcccctctccgtgcggagatctctcgcgtgctggcaggcgcgtcctggtgactgggacacgggagaagagaccttggtgggtggcagcggcaggccatggaggcgctgctggtgacgaatggtgcgtgtgcaggcaggacgcgtcgcaggccgcgctgcagaagaccatcgactacgcgtgcggctccggggcggactgcaactccatccatgagagcggggcgtgctacaaccccaacaccgtcccggcgcactgctcctgggccgccaacagctactaccagaacaacaaggccaagggcgccacctgcgacttcgccggcaccgccaccctcaccaccagcgacccgagctcttcgggctgctcttaccccaccaccagtgcaagcgccgcgggaaccgtgaccccgaccaccggcggcacaatgggaggagcgggaggcccagggaccttgacgcccgccgggacaggcgcaggcacagccggcactaccggcatggggactgcaggcactacgggtaccgggttcggcggcctaggaccagcaggcatggacacagcggcggcggcggcggggggcttgctcctcctcccagaggctgggctgtgcgctgccctcgtcgcgctcctcctctccgccatcgtgctcgcgtgacgccttcacatgacctcggaaacaacaacctactgcctgcatgctagtagtagtagaaagcgctgcccttttgggaggtgtatgtagttcaggagtactctgattatctatggagaaagggtgggaattattggggaaaaaaactaatgcatcccactag

SEQ ID NO: 27843 - DNA, 833 bp, Zea mays
  Clone ID: LIB4740-042-A5_FLI
ctcgaggccggccggggctttcagagtttcagttcagttggtcagcatcgaacaaccgcgagcagagatggcgccggtgagggtgttcgggacggcggacttcgtgaacgctgcgagggttatggcttgcctggaggaagttggcgtggagtacgaggtcgtcgaggtcgactacgcggccatggagcacaagggcgcccagcacctcgcaagaaacccgttcggccaaatcccagcgtttcaggacggggacacgatgctctttgaatcccgagcaatcgccaagtacgtgctccgcaaatactccaagtcagctcaagtcgacctgctccgtgagggcaacccggaggaagccgccatggtagacgtgtggacggaggtcgaggcgcacacctacctacccgccatcgcgcccatcttctacgagtacgtggtgtaccccgccgagcatggcaccacgcccaaccaggaggtggtggacgagagtgtggagaggctcaggaaggtcctcgacgtctacgaggcgcacctgtacaagaccaagcagctctatctcgccggggactacttcagcctcgccgatctcaaccacgtcccgtacaccttccacctcatgaggacaccgcacgcgtcgctcttcgaggcgtatcctcacgttaaggcctggtgggagagagttatagcacgcccgtcgctgcagaagctcgccccggatatggtgatcaaagcctgattgcacgtacctttgtatcatcagattcttccttggggtgtatatatgcaaggggtacctttcttgcaaaataaataaagaaataaataaatccgatcac

SEQ ID NO: 27844 - DNA, 1019 bp, Zea mays
  Clone ID: LIB4740-042-D9_FLI
ccgggaaaaccctccgcctccaccggcggctcgccaaactccgtttcgaattctagggttttgctgctctccgaccccgagctccgaaggccgcagcatcaggcgcggcccccctcgcgtgtgaccgagatggcgctgccgaatcaggggaccgttgattaccccagcttcaagctcgtcatcgtcggcgatggtggaactggtaaaactacatttgtgaagaggcatctcactggagagtttgagaagaaatatgaaccaaccattggtgtggaagttcatccgttggatttcaccactaactgtggtaagatcaggttctactgctgggataccgcagggcaagagaagtttggtggcctcagggatggatactatatccatggccagtgtgcgatcatcatgtttgatgtaacctcaaggcttacttacaagaatgttcctacatggcatagggacctgtgcagggtctgtgaaaacatccccattgtcctctgcggtaataaggttgatgtgaagaacaggcaggtcaaagccaagcaggttactttccacaggaagaagaatctgcagtactatgaaatttctgccaagagcaactacaactttgagaaacctttcctgtaccttgcaaggaagctggctggtgatccgaaccttcactttgttgaagctgttgctcttaagcctccggaagttaccatcgacatggctatgcagcagcagcatgaagctgagcttgctgcagcagctgcacaacctcttcctgatgatgatgatgatctgattgagtagaaaggatcatgagtcttggacttgagcaggagttgtgccttgcacgatttaagttgttctagggtggactctctcttgagttatcattgtctggatcatctttttctccttggacttgttgcaacttttgagtgtggaaatggattggaatagtcgccatgaatttgctggctactttatacatgtctttgttcataaactttgttttaagatgaagttgtggg

SEQ ID NO: 27845 - DNA, 1205 bp, Zea mays
  Clone ID: LIB4740-043-D11_FLI
ctcgaggccggccgggaaaaaaaaaaaaaagaggaacagagcagtagcatcaagagaccaagctggtggttgaggttagaagaggagctagagcgagagagtcccatcgcaacacacaaaaggaagaggaagaggaagaggaaggcgagaacgatgggcttgctcctgctgctcctcgtcgcggcggcggcgacagctcctgcggccgacgcatggggcaaggaggggcactacatggtgtgcaagatcgctgaggtaatagccgagagctttctgacgaaagaggcctcgacggcggtgaaggagctgctgccggggtgggccggcggcgagctcgcggagacgtgctcttgggcggacacgcagaggttccggtaccgctggtccagcccgctgcacttcgccgacacgccaggggactgcgagttcgactacgcctgggactgccacaacaccaaaggggagaagaacatgtgcgtggtcggagccatcaacaactacacggcggcgctgaaagactcatcaagtccatttgatccgacggagagcttgatgttcctggcgcacttcgtcggcgacgtccaccagcctctccactgcggccacaccgacgacctcggcggcaacaccatcgtcgtccactggtaccgaaggaagaccaacctgcaccacgtctgggacgtgaacgtcatcgagacggccatgaaggacttctacggcaacgatcagagcaccatgatacaggccatccagcagaacatcacggaggagtgggctgatgaggagaagaagtgggaggcctgccgtagccggacaaagacctgtgctgacaagtacgctgcagagagcgcgaagctggcctgcacggcgtacgagggtgtcgaccaagactccaccttggaagatgactacttcttcgccgcgctgccggtggttcagaagaggatcgcgcaagggggcgtcaggctggccgcgatcctcaacaggatatttggtgggaacagcagatcaggcttcagagcagttgattgatcgatccatatccataccagtagtagatatcaaacgattggacatgtggaggagtgggtggggaggggcagacgtgatctgccatctgaattagaataataagaggtatcttgttgccgtctggcaatattgtaacttcagtcttcagtaaccactagctcacgaattttatt

SEQ ID NO: 27846 - DNA, 847 bp, Zea mays
  Clone ID: LIB4740-043-H5_FLI
ctcgaggccggccgggaatggtcattgcttcgttggttaaaccttgagagcaccggttcaggcgttcagcaatcgcagagcggcgatggacggcagcggggtcgatacggccacgacggcggcctggatggagaagcaccggcagatgtacgagcgggccacccggcacccgttcaccgtctccatccgcgacggtaccgtcgacatgtctgccttcaagcgctggctgagccaggactatctgtttgtaagggaatttgttgcattcatagcaagtgtactgctcaaatgctgcaagcaagaagacagctcggacatggaaatcatcctgggtggagtagcgtctatcagcgacgagatctcttggttcaagaacgaagctaccgtatggggcgtcgatctagcaagtgtttcccccttaaaagccaatctagagtaccacaggtttctccggagccttactgagccagagattagctatgctgttgctgtaactaccttctggacgatcgaaaccgtgtaccaggacagctttggtttctgcatacaagacggcaacaagacgccgccggagctcatgggcacctgccagagatggggcagcgccgggttcagacagtactgccagtctctgcagagcatcgtggatcgctgcttggctaacgcaccggctgatgctgtccagagtgctgaagaggccttcgtccgggtactcgagctggaaattggtttctgggatatgagctcttctcggtcctaattaccagcgtgttctctgagtccaaacatctacgcaaataatcgaacgaaataaatggtgcttcgggctcagacccaggttttcccc

SEQ ID NO: 27847 - DNA, 1119 bp, Zea mays
  Clone ID: LIB4740-045-F3_FLI
ctcgaggccggccgggctcaccaccgcatcccacaccccccgagctgagcttagctccactccagctccaatcacagtcgtgaccagagcgcgagagctagctagagggccgtgaaaatgccgatcaataggatcgccctggggagccaccaggaggtgtaccacccgggcgccctcaaggcggcgttcgctgagttcatctccaccctcatcttcgtcttcgccggccagggctccggcatggccttcagcaagctgaccggcggcggcccgacgaccccggcgggcctgatcgcggcggcggtggcgcacgcgttcgcgctgttcgtggcggtgtcggtgggcgcgaacatctccggcgggcacgtgaacccggccgtgaccttcggcgccttcgtgggcggcaacatcaccctgttccgggggctcctgtactgggtggcgcagctgctggggtccaccgtggcgtgcttcctgctccgcttctcgacgggcgggcaggccacgggcaccttcgggctgacgggggtgtcggtgtgggaggcgctggtgctggagatcgtgatgaccttcgggctggtgtacacggtgtacgcgacggcggtggacccgaagaagggcagcctgggcaccatcgcccccatcgccatcggcttcatcgtgggcgccaacatcctggtgggcggcgtcttcgacggcgcgtccatgaaccccgccgtgtccttcggccccgccctcgtcagctgggagtggggctaccagtgggtgtactgggtcggccccctcatcggcggcggcctcgccggcgtcatctacgagctgctcttcatctcccacacccacgagcagctcccctccaccgactactaaaagccgaagccgaccgacctaggggtgcgcagcgcagctagcgcatccagctctctctccccgctcgccgccgtttagtttctctcgtgcacgtgcatgcatcgtcgactgtctcaggccgccgctgcgccggcgccgctcgcatcgtttgcttccttggaccagcagtcgtcgccgtcaggctgaactgcttgtaaccgtgaattccggacccgtttgcttctgtaagatttgtgcatttgcctgagt

SEQ ID NO: 27848 - DNA, 1207 bp, Zea mays
  Clone ID: LIB4740-046-G9_FLI
ccgggaccgtccaaatccacgcgataacaaccaggccgccccccttccttccttcccgtatatagctggcgaggggcgtggcaatggttcttccgctccgcctgatcccgcgcctggctgccgcagccaggttgacgcccgcgacttcctgcgctccccggctgctcctgcggcgcgcgccgttaccaccggccctcgcgatggcgtcggcgtacagcgccggttacggcgcgggcaggaggctgctattcaggcagctgttcgagaaggagagctccacgtacacctacctcctcgccgacgtcgccgaccccgacaggcccgccgtgctgattgaccctgtcgacagaacagttgacagagatcttaatcttatcaaggaattgggcttaaagctcgtgtatgctatgaatactcatgtacatgctgatcacgtcactggaacaggactaataaaaactaagctacctggagttaagtctgttatttcaaaagctagtggagcaaaagctgatcattttgttgatcatggggacaaaatacactttggtaaccttttccttgaggtgcgagctactccaggccatacctctggctgtgtgacttatgttacaggtgatgctgatgggcaaccttcaccaaggatggcttttactggtgatgccttaattatccgggcatgtggaaggactgacttccagggaggaagttctgaacagttgtatcagtcagtgcattcacagattttcacattgccaaatgatacactactttatcctgctcatgactataaaggtttcacggtaagtactgttgaagaggaggctgcctataatgctcgactcacgaaagataaggaaactttcaagacgatcatgaataacttgaatttgtcatatccaaagatgatggatgtagctgtacctgccaatttggtctgcggtatccaggatccaccaccgaagacctgagctgttcccgtggaagcctgcaactgcacttctggttgtttatgaactctggatcgccaccagaggcttgcagctgagttgttcattaaataatttgtttgctgcatcctgtgatatcgcgagaaaataatctaaccaatggccggtgtagcctctggttgtatgtggcaaggcactattgtttagagagatcaaaaggaacaatgctgatagtcaatgaagtttgattgcctgac

SEQ ID NO: 27849 - DNA, 1332 bp, Zea mays
  Clone ID: LIB4740-047-A12_FLI
ccgggagttaaggggtaaagggtcgtattcgctagcgtttgagaaggagcatcatccccagccgaacgcacagcaatctggtccaacatccctgcctattcctcaaagcgtgcaggccatggtggccgctggtcgtcatgcaccagtgccaccaaggtatctccgtccagatctggccgcggatgtcgtcgttgccgacgacgcgacgaccatccccatcatcgacttccagcgactgctgctggtcgacccagaggaatctgcgcgcctccatgcggcctgccaggactggggcttcttccagctgataaaccacggtgttccggacgatgtgatggaggcgatgaaggccagcatccagtcattcttcgcgcttcctgcggaggccaagcagcagtaccgtcagcaggcaggccagctggaggggtacggccagctgttcgtcgtctccgaggaccagaagctggactgggccgacgtcctctacctcaacacgcagccgcccgagcaccggaacctcagcttctggcctgctggtgagagcttcaggcagacgctggacacctactccgccgccgtcaagcacgtcgccgaccgcctgctgggagccatgtacatgaacctgggcctccagctgagcatcatggacatggacccggagcggggtgccgggatacagtcggtgaggatgaactactaccctccctgcgctgaagcggcggacaaggtcctgggcttctctccgcactccgactcggaccttctcaccctcgtcctccaggtcaaccagctccagggcctgcagatcaagaggccgcccgacggcggcggtgcctgggcctggctacccgtcacgccgctgcagggcgccttcgtcgtcaacgtcggggacgtcctcgagatcttcaccaacgggaggtacaggagcgtcgagcaccgggctctagtcaacgcccacacggagcgcttgtccatcgcggcgttccactctcccagcatccatgccaccatagggccgctgccggagctcctcggggaccaggaggtgcccaagtataagacgctggaccaccaaagcttcattacgctcttcttctccgccaagctccagggcaagagcttcttggaacggatgaagaagctttcgtagagccaatcggacggaccggaaagttaagcaggccgacgtaaagtcggattacatgttatcggttcggccatagcaatatagcacgcatgtatgtccggattaatttggtgaccgacgagactagttttgtctaccaattcacttttacatcgatttttaaatataaaaaacttacaaaaaag

SEQ ID NO: 27850 - DNA, 1314 bp, Zea mays
  Clone ID: LIB4740-047-C1_FLI
tcttcccgtttatcggcaaagagactttagggttttagcggcttccatttctgagcgagggtttatccgccacgggcggcgcgacgcggcggcagttgagctgggatttccctcccatcccgttcccttccaggcgaggcgatggacgaggcggcggtcgacgacctcatccggcggctcctcgaggcccgcggcgggcgcaccccgcgcaacgcgcaggtgaccgacgctgagatccggcgcctctgcgccgccgccaaggatgtcttcctctcccagcccaacctcctggagctcgaggcccccatcaagatatgcggggatgtccatggtcagtattcagaccttcttcgattatttgagtatggtggctatccaccagatgcaaattatctgttcctcggtgactatgttgatagggggaaacagagcatagaaacaatatgccttctcttggcatacaagataaagtacccagaaaacttctttcttctcaggggaaaccatgaatgcgcctcaatcaaccgaatatatgggttttttgatgagtgtaagaggagattcaatgttcgtatctggaagatattcaccgagtgttttaactgcctcccagtggctgcgcttattgatgacaagatcttttgcatgcatggagggttgtctcctgatctaaagagcatggaccaaatacgtaacattcctcgtcctgtggatgttcctgatgttggtctcctatgtgatctgttatggtcggaccctgataaggagattgataggtggggtgagaatgacaggggtgtttcctacacctttggagctgacgtagttgccgagtttcttcagaaacatgatctagatttgatctgcagggcccaccaggtcgtagaggatggttatgaatttttcgcaaaacgccagcttgtaacaatattctcagcaccgaactactgtggagagttcgacaatgctggtgcactgatgagtattgacaactccctagtatgctcgttccagatactcaagccttctgagaagaaaggaaaagcaggaaatgggaacatgccaaagcccggtacacctcccaggaagataaaaataagtgttacccatatttagccaggttctcgctatcaatctgcatttgcgaagttgtgattaagtgctcccccaaacttgtggtaggtttttttttggtgagcttaacacgattttaaactgtggaccatcgtgcctcatgtctttctgatctgaagtctgatgcaaatgtatcctgacattttgccaaccaagagagatcatgctaacataaactcg

SEQ ID NO: 27851 - DNA, 1086 bp, Zea mays
  Clone ID: LIB4740-049-F2_FLI
cacaagcgcacgcactcctcgccgtgtcccaactcccagctcgcaagccccatcccgtcccaactcccaagagccgaacgcgagcggcggtcgccatggcgcggtgcagcaacggcctcctgggcctcctcaacgcgggcgtgctggtcctcgccatcgtcgcgctggggggcggcgcctggctcagccaccgcgcgtccaccaccgactgcgagcggttcctcgagcggcccgtcatcgcgctgggcgtgctcctcctcgcgctctccctcgcgggcctggccggcgcgctctgccgcgcctcctgcctcctctggctctacctcctcgcgctcttcctcctcatcctgctcctcttcgcattcaccgtcttcgcgttcgtcgtcaccaaccgcggcgccgggtgggtcgtctccggcagggggtacaaggagtaccgcctcggggactactccacctggctgcagaggagggtggagaactcgcagaactgggccaagatccgcagctgcctccaggacggcaaggtctgccagaagcttgcgtccagaaaggagacggccgcccagttcgtcaacagcaacctctccccgatccagtctggatgctgcaagccaccaacgggttgcaacttcacgtaccagagcgagactgtctggaccaagcccgctggcttcaacaccacaactgacgactgcatggcctgcaaggcaggcgtgctggccaacctgaagaacgactggaagaagatcgccaccgtcaacatcgtcttcctgatcttcctcgtcgtcgtctactccgtcgggtgctgcgcgttcaggaacaaccggcaggacaactcgtacccggcctggaaatgaggtgcgcgtggcaatgtataggttgtttatgctatcatgctatgtgagtgactgcgtttcggtgaggaaggggttcgctccttggtgtctagcaacctaccgtatgtattaactattaatgtgtccggttcatgtcactggtcgatgctgttttgccctcgaacgcatgatgatagtgtcccaaggctattatccagatatatgccgaaaaaaaatatgcgttttc

SEQ ID NO: 27852 - DNA, 1304 bp, Zea mays
  Clone ID: LIB4740-049-H3_FLI
cggggccttaaccattcctcccaacaccacctcgcctgcgatctccgtagcctccgtcgcgtcgagcatcgatcatgtcggcctactgcggaaagtacaaggatgagctcatcaagaatgctgcctacattggcacccctggcaagggtatccttgttgctgatgagtccactggcaccattggcaagcgcctttccagcatcaatgtcgagaacgttgaggagaaccgccgtgccctccgtgagctcctattctgctgccctggtgctctccagtacatcagcggtgtgatcctcttcgaggagaccctgtaccagaagaccaaggatggcaagccttttgttgatgtcctcaaggagggaggcgtcctccctggcatcaaggttgacaagggcaccattgaggttgttggcactgataaggagaccaccacccaaggccatgacgaccttggcaagcgctgcgccaagtactacgaggccggtgcccgctttgccaagtggcgcgctgttctcaagattggccccaatgagccatcacagcttgccatcgacctgaacgctcagggtctggctcgctatgccatcatctgccaggagaatggtctggtgccaattgttgagcctgagatccttgttgatggccctcatgacattgatcgctgcgcttacgtcactgagaccgtccttgctgcctgctacaaggcgctcaacgagcaccatgtcctcctggagggtaccctcctgaagcccaacatggtgactccaggctccgactccaagaaggtgactcctgaggtgattgctgagtacaccgtccgtaccctccagaggaccgtccctgctgctgtgcctgctgttgtcttcctctctggtggacagagcgaggaggaggccacccgcaacctcaatgccatgaacaagctcagcaccaagaagccgtggtccctgtctttctccttcggccgtgccctccaggcgagcaccctcaaggcctgggctggcaaggtggagaacttggagaaggctagagctgccttcctcgccaggtgcaaggccaactctgaggctaccctcggcacctacaagggtgatgctgccgccgacaccgagagcctccacgtcaaggactacaagtactgagttgcttctctttgcgtgcccgttttggaactcctgcctacgagctaggttgcggagtgtggtttgctcgttagagctttttttcggacatccaaaaaacatgcttcctatgtgggatgatggttatctttatatttgtatgttaattagtctctttgctgc

SEQ ID NO: 27853 - DNA, 1328 bp, Zea mays
  Clone ID: LIB4740-050-H8_FLI
ccgggattgcggggccagcctttgggggaagtcatatccgtgaaggagaaacgcgttttaggaaacaaaaaaaaaatacagaaaagaagaattataaaaaccagaattaattatctgacggtgcatgccatgcccatgacacccctcgagtgcgacatggcccctgcagcttctcgccagtcgtggcctcttcctcgctgcggcctgctggtcttggcccttgcactggcgacgaccgccgcggtgggcagcgcgcagctgtcgtcggagagctactacgacgcgtcctgccccgccgcccttctcaccatcaggaccgccgtctcgacggccgtgctgctggagccccgcatgggggcctcccttctccgcctccacttccacgactgtttcgtgcagggttgcgacgcgtcggtgctgctagacgacacggcgagcttcaccggcgagaagggggcggggccgaacgcggggtcgctccggggcttcgacgtgatcgacaacatcaagatgctgctggagctgctgtgcccgcagaccgtctcctgcgccgacatcctcgccgtcgccgcccgcgactcggttgcacaactgggaggaccatcgtgggcggttccgctgggcaggagggacgcgaccacggcgagcgcgtccctggccaacagtgacctccctgggcctaccagcagcctcaacggcctgctcaacgctttctccaacaagggtttgagcagcaccgacatggttgccctctcaggtgcccacaccgtcggccgggcgcagtgcaagaactgccgggcccggatctacaacgacaccgacatcgacgcctccttcgcggcgtcgctgcgggccagctgccccgcgcaggccggcgccggcgacggcgcgctcgagccgctcgacggctccacgccggacgccttcgacaacgcctacttcggcgacctgctctcccagcgcggcctgctccactccgaccaggcgctcttcggcggcggcggcggcgcgacggacggcctggtcagcgcctacgcgtccaacgccggccagtggggggccgacttcgcggcggccatggtcaagatgggcagcatcagcccgctcaccggcacggacggcgagatcagggtcaactgccggagagtgaattaattatttattacagccacgttgattgcatttgctcttggggtagtggactagcgtgcatattttgcaaagaggcagagaagaattgaaatggagcctaagctcatatgtatacaaatgttgtttattattccatattatttcgtgcatatataatatatatatagcatacatat

SEQ ID NO: 27854 - DNA, 829 bp, Zea mays
  Clone ID: LIB4740-052-E8_FLI
tcatcctcgcttcaggtctgcagcccccaactacccccagcctcggaaggaaccttccagaagcgcaagactctaaggccgtcaccttcccattcttcctcgccgcgggggtcgcctgagatcacataaacaatggtgaaggctgttgctgtgcttggtagcagcgatggtgtcaagggcaccatctttttcacccaagagggagatggccctaccgctgtcaccggaagtgtctctggcctcaagcctggcctccatgggttccatgtacatgcacttggtgacaccaccaatggatgcatgtcaactggaccacactacaatcctgcgagcaaggagcatggggcaccagaagatgagaaccgccatgctggtgatcttggaaacgtgacagctggagcagatggtgttgctaatatcaatgtcactgacagccagatcccactgactgggccaaactcaatcattggcagagctgttgttgttcacactgatcctgatgatcttggaaagggtgggcacgagctgagcaagagcactggaaacgccggtggccgtgttgcttgtgggatcattggactccagggctgaaaacgatcgccggacttgggggtgcctgagaggtccgtctcctgccgtccccagcagacgagcctgaacattcggagacatcgtgaaataagagcgtcgctgatctgtgatcatcgtatttgtcattatgcacctgtagccaccgatggactaaactgtgctggattatgctgttggatcacctgagtatgtgttacatgtcggttttgatgtgacatcctatcgtttcgatgtgttg

SEQ ID NO: 27855 - DNA, 1114 bp, Zea mays
  Clone ID: LIB4740-053-E7_FLI
ctcgaggccggccgaccaccgcatcccacaccccccgagctgagcttagctccactccagctccaatcacagtcgtgaccagagcgcgagagctagctagagggccgtgaaaatgccgatcaataggatcgccctggggagccaccaggaggtgtaccacccgggcgccctcaaggcggcgttcgctgagttcatctccaccctcatcttcgtcttcgccggccagggctccggcatggccttcagcaagctgaccggcggcggcccgacgaccccggcgggcctgatcgcggcggcggtggcgcacgcgttcgcgctgttcgtggcggtgtcggtgggcgcgaacatctccggcgggcacgtgaacccggccgtgaccttcggcgccttcgtgggcggcaacatcaccctgttccgggggctcctgtactgggtggcgcagctgctggggtccaccgtggcgtgcttcctgctccgcttctcgacgggcgggcaggccacgggcaccttcgggctgacgggggtgtcggtgtgggaggcgctggtgctggagatcgtgatgaccttcgggctggtgtacacggtgtacgcgacggcggtggacccgaagaagggcagcctgggcaccatcgcccccatcgccatcggcttcatcgtgggcgccaacatcctggtgggcggcgccttcgacggcgcgtccatgaaccccgccgtgtccttcggccccgccctcgtcagctgggagtggggctaccagtgggtgtactgggtcggccccctcatcggcggcggcctcgccggcgtcatctacgagctgctcttcatctcccacacccacgagcagctcccctccaccgactactaaaagccgaagccgaccgacctaggggtgcgcagcgcagctagcgcatccagctctctctccccgctcgccgccgtttagtttctctcgtgcacgtgcatgcatcgtcgactgtctcaggccgccgctgcgccggcgccgctcgcatcgtttgcttccttggaccagcagtcgtcgccgtcaggctgaactgcttgtaaccgtgaattccggacccgtttgcttctgtaagatttgtgcatttgcctgaat

SEQ ID NO: 27856 - DNA, 872 bp, Zea mays
  Clone ID: LIB4740-053-H5_FLI
ctcgaggccggccggatttcgaagcccaccgaattccctgcgattcctctcccctcgcctcctcgtctccccctaggggatcgtcggagaggaatcgcaaagagggccgtctcatccgagttaaggaagccatggagcacaaggaggctgggtgccaggcccccgagggacccatcctctgcatcaataactgtggcttcttcggcagcgcggcgaccatgaacatgtgctccaagtgccacaaggagatgataacgaagcaggatcaggccaagctggctgcctcctctatcgacagcatcgtgaacggcagcgacgccgtcatggagccggttgttgctggcagcaacacggtagtagctgttgcccaagttgagttgcaaacaatgaacgtgcagcagcccgctgatgttgccggacccagcgagggggtggcggcgatctccaaaggggggaaggtagggccgaaccggtgcagcgcctgcaggaagagggttggacttacgggattcaactgccggtgtgggaacttgtactgcgcactccaccgctactccgacaagcacgactgcaagttcgactaccggactgctgccagggacgccattgccaaggctaatccggtggtgaaggcagacaagctcgacaagatctagggggggttcctacggttgggtatcaggaagattgtaaaccgcggtaactcgtcatgcggaactgctgccttgccccccgcgcctttctcttccatgtttgctgctacaatcttgttgttgggcattgcagtgcacggtgcacacttgtgtagcccgcctccgagaattctcctgcctctgcatctggtcagttcaaaaatgatttgcatgttggct

SEQ ID NO: 27857 - DNA, 952 bp, Zea mays
  Clone ID: LIB4740-064-H11_FLI
ccgggagcgcccgtcgcctccctttccccttccctccctccctctccccgcgggccgccagaggcaatttcgccctcgattcgaccccgattcgtccgcccgcgaccgggattccctccgccaagcgcggatctgaacgctgcgctccgtgtcgccgctcgaatccgccatgaagggggccaaatccaagggcgccgccaaggccgatgccaagctggcggtgaagagcaagggggcggagaagcccgccaagggcaggaaagggaaggccggcaaggaccccaacaagcctaagagggctcccagcgctttcttcgtgttcatggaggaatttcgcaaggagttcaaggagaagaaccctaagaacaagtctgtcgctgcggtggggaaagctgctggcgacaggtggaaatccctgagcgagtcggacaaggctccctatgtagccaaggctaacaagctcaagctcgagtacaacaaggccatcgctgcctacaacaagggcgagagcactgcagctaagaaggctcctgccaaggaggaagaggaggaagatgaagaggagtctgacaagtccaagtcggaggtcaatgacgaggatgatgaagagggtagtgaggaggatgaagatgatgacgagtgatggagctcctcgagacaatggaccgtgcttcatccaacaatggagcggctacacaaggccccgtggcgatcacaaaaaaggagcctatatccatgtactagaattattcagtttcactccacatcgtgatgttttatttttacttttgtcgtgctataacggatagcgctcctcgttggcgccactggcgggtggttctgcctctggtctggtgtgtttgtgtgtggtcacacttgccagccagcagaggcgcctgcttgtacctagattactgtttccattgtcgtcatcatcggctaacattgtcat

SEQ ID NO: 27858 - DNA, 632 bp, Zea mays
  Clone ID: LIB4740-068-C2_FLI
gagcagcagcagcacagtcatccacaaacgaactgaggtcgacgacgactgatcgagcagcgacgatggcggctgtgctgaacagcaggaagacggcgcaggtggttgccgtgctggtggcggcggcgctgctggcgtcgtccgcttcggcggcgatcacctgcgggcaggtggggtcgtcgctggctccgtgcatcccgtacgcgacggggagggccagcgcgctccccgcgtcgtgctgcagcggcgtcaagagcctcaacagcgcggcgcggaccagcgcggaccgccaggcggcgtgccgctgcctcaagagcctcgccaacagcgtcaagagcgtcaacatgggcaccgtcgccaccatccccggcaagtgcggcgtctccgtcggattccccatcagcatgtccaccgactgcaacaagatcagctaagttacgacgaccaagcttacgtcccgcgcgctgcacgagtgatgaagccagggaagaaataaaataaagctagctgtattgccaggagcagcatgcagtatcgatctatatatatactgtactgtagtactctattatatatgtatgtgtggcctgcagtgcgagttgcttcgatccacctacttgttcacacagtat

SEQ ID NO: 27859 - DNA, 1310 bp, Zea mays
  Clone ID: LIB4740-073-C12_FLI
atatccgcatccgctgcctccgcctctcgagtctcgtccacccgtcgtcctcctagctcctctactcgccagtcgccatgggcaagattaagatcggaatcaacggcttcggaaggatcggcaggctcgtggccagggtcgccctccagagcgaggatgtcgagctcgtcgccgtcaacgaccccttcatcaccacggactacatgacctacatgttcaagtacgacaccgtccacggccactggaagcacagcgacatcacactcaaggactccaagacccttctcttcggtgacaagccggtcaccgtctttggcatcaggaaccctgaggaaatcccgtggggtgaggctggcgctgagtacgtcgtggagtccaccggcgtcttcactgacaaggacaaggctgctgcacatctcaagggtggtgccaagaaggttgttatctctgccccaagcaaagatgcacccatgtttgttgttggtgtcaatgaggacaagtacacctcggatgttaacattgtttccaatgctagctgcaccacaaactgccttgctccccttgctaaggtcattcatgacaacttcggcattgttgagggtttgatgacaactgttcatgccatcactgccacacagaaaactgttgacggaccctcagccaaggactggagaggtggcagggctgccagctttaacatcattcctagcagcaccggtgctgccaaggctgttggtaaagttcttcctgatctgaatggcaagctcactggtatgtccttccgtgttcctactgtggatgtctcggttgttgacctcaccgtcagaatcgagaagggggcctcctatgaggatatcaagaaagctattaaggctgcttccgagggtccactcaagggtatcatgggttatgcggaggaggatctggtttctaccgacttccttggtgacagcaggtcgagcatcttcgacgccaaggccgggatcgctctgaacgaccacttcgtcaagctcgtctcgtggtacgacaacgagtggggctacagcaaccgcgtcgtcgacctgatccgccacatgttcaagacccagtagaggggttttttccccctgcttctcatggatggttgctgcttgtgtatgccgagaataaatgtggatggcgcgtgcctctgggtcgccaggttcatgctgagtctggacatgttttgcacttttgcttcccttcctgctaccatctgtgacagaaccgctcgctaatatgggacctgagattagctttttgctgcttgtggtgaggttgcagttttgtac

SEQ ID NO: 27860 - DNA, 1190 bp, Zea mays
  Clone ID: LIB4740-073-G12_FLI
ggtcattttgtagaccaaacgcatgggagactacgcgtgattgcattttcagaaacggctgcttggattccagacccccataggctgccaatgctcatccgtaggttcatctccactttctccgggcaatttgtagctttcttcatccctgtcttgctggttgatttctattctggcacacgcccgacgcagcggcaagcagaggtagcaaagaggaggatcagatcttgatagctgacgagtggcgaccatgcatctggtggctggggctatcggcaacctggcccccaagctcctccggcttctgcgagacgagtacagcctgcagaagggtgtgaggaagcaagtccagttcctttcagaggagctggagagcatccacgccgccctccgcaaggtggctgctgtgccgccggaccagttggacgagcaggtcaagatctgggcgcgccaggtcagggatgcgtcctacgacatggaggacgccctcgacaccttcctggttcgcgtggagggccgccccgagcccaattgcggccatggcaggctcaagggcgccgcgaagaggatgggcaggctgttcaaaaaggctaatgcccaccgccacgtcgcaagcgtcattgccggcatcaagatgcagctgcaagaggtggccgagcggcgcgcacggtacagagtggacgaggtcgtggcgaccaggcctgctgcagcttcggcgatcgatcctcgtcttgaggccatgtacaaacaggcgacacagcttgttggcgtcgacggggccatgggtgacctggtgctattgctgtccctggaggtttcgattcttggagttggaggattgggcaagactactcttgccaaagcggtgtacgataacctgaaatcacagtttgattgcggggcttttgtttcggttggtcgaaatcctgacctgaagaaggtctttagggacatccttatagatcttgacaagcacaaatacacggccgaggtaaacctgtcgatattcggcgaaacacaactcatcgacgaaatccgagagctcctggagagcaagaggtatgatttggctagctataaaaatgctcactctattcatcagtgtaacttgtcgtgtcattctcgctattcacaatttcggtgaaattgactgaaattcatgaaatatcacatttaccccttgggtttag

SEQ ID NO: 27861 - DNA, 873 bp, Zea mays
  Clone ID: LIB4740-074-B6_FLI
tcgaggccggccgggccatttcgaagcccaccgaattccctgcgattcctctcccctcgcctcctcgtctccccctaggggatcgtcggagaggaatcgcaaagagggccgtctcatccgagttaaggaagccatggagcacaaggaggctgggtgccaggcccccgagggacccatcctctgcatcaataactgtggcttcttcggcagcgcggcgaccatgaacatgtgctctaagtgccacaaggagatgataacgaagcaggatcaggccaagctggctgcctcctctatcgacagcatcgtgaacggcagcgacgccgtcatggagccggttgttgctggcagcaacacggtagtagctgttgcccaagtcgagttgcaaacaatgaacgtgcagcagcccgctgatgttgccggacccagcgagggggtggcggcgatctccaaaggggggaaggtagggccgaaccggtgcagcgcctgcaggaagagggttgggctcacgggattcaactgccggtgtgggaacttgtactgcgcgctccaccgctactccgacaagcacgactgcaagttcgactaccggactgctgccagggacgccattgccaaggctaatccggtggtgaaggcagacaagctcgacaagatctagggggggttcctacggttggtgtcaggaagattgtaaaccgcggtaactcgtcatgcggaactgctgccttgccccccgcgcctttctcttccatgtttgctgctacaatcttgttgttgggcattgcagtgcacggtgcacacttgtgtagcccgcctccgagaattctcctgcctctgcatctggtcagttcaaaaatgatttgcatgttggct

SEQ ID NO: 27862 - DNA, 1410 bp, Zea mays
  Clone ID: LIB4740-074-G7_FLI
tatcactcctatgggcgaatgggaccctcgaggccggccgggacaagctcgaccaccaacccagctcgctcgtcccagctgatcaggtcgagcacctagtagcgacctgctcgatcatcagtgtagagtgtcggtaggtgtctgtctctcttggtggctggttgcaacggtcatggcgacgtcgtctcgtcgggtgcccttgctgctgctgtgcctgggcgtgctggtgtcctgctccttcgcggcgggcagcttggaccaggagctggacatcacgtggggcgacgggcggggcaaggtccttgacaacgggcggctgctgacgctgtcgctggaccgcacgtccggctccgggttccagtcccggcacgagtacctgttcggcaagatcgacatgcagctgcggctggtgccgggcaactccgccggcaccgtcaccgcctactacctgtcgtcgcagggcggcgcgcacgacgagatcgacttcgagttcctgggcaacgtgtccggcgagccctacacgctgcacaccaacgtgttcacgcgggggcaggggcagcgggagcagcagttccgcctctggttcgaccccaccgccgacttccacacctactccatcctctggaaccccaagcacgtcatcttcatggtggacgacatgcccatcagggacttccgcaacctggagagcaagggggtggcgttccccaagagccagccgatgcggctctactccagcctgtggaacgcggacgactgggcgacgcagggcgggcgcgtcaagacggactggtcccacgcccccttctccgcctcctaccgcgggttcaaggccgacgcttgcgtcgccgtcgcgggcggccggacccgctgcggcgccaccgtcggcaccgagggcaccggcgcccccgcctccgccgccggcgccggggactggtacaaccaggagctggacctcaccctgcagcagcggatgcgctgggtgcagcgcaagtacatgatctacaactactgcaccgaccccaagcgctaccagcagggcctccccgccgagtgctccatgcagtagcgcccggttattcctcgcccgtccaacaatggcgcgcgcgcgcgtgtgtgtgcatgtggtccgctctactgctaccgctacgacgatcggtgtcgatcaccggatcaaggcaagacgaaaggcatcgaaacatggtagataaataaaggacttgacgatttgtaacgcagtagctggtgcgtgcgtggtgtggtggtaagaaattcttctgctgcctgtgttcttgtagcctcctcgtcctcgcccaccctgttggtacgtgtacggtgtacgtagtctgccgccgcgcgctgttcgtgttcgtcgtgtctcgtgtctgtattatactcgtcctccccatc

SEQ ID NO: 27863 - DNA, 1177 bp, Zea mays
  Clone ID: LIB4740-076-G5_FLI
atcgaggccggccgggccccccacacaataggctggcagagaggcaggcaaccagctcgggcgtgtccttcctcctccgtctccatcttggcccaaccgagcccaaacctctccccttttctccgtcctctcctagtccacacggcagacgccgccgccgggggagaggagaggaggggaggggatcggctccaagggaacaggtgagatggcaatcctgtacgcgctggtggcgcgcggcacggtggtgctggcggagcacagcgcggcagccaccaacgcgggcgctatcgcgcgccaggtcctcgagcgcctccccgacggcggcgccgacagccacgtctcctacacgcaggaccgctacgtcttccacgccaagcgcaccgacggcatcaccgcgctctgcatggccgacgacgccgccggaagacggattcccttcgcatttttggaggatattcatggaaggtttgtcaagacatatggccgggctgcgctaaccgctcttgcatatgcaatgaatgatgaattctcaagggtcttgagccagcaaatggactactattcaaatgaccctagtgcagatagaataaaccgcatgagaggtgaaatcaatcaggtccgtagtgttatgattgataacattgataaggttcttgaaagaggtgatcgtttagaactgctggttgacaagactgcaaatatgcaaggaaatacagttcgattcaagagacaagctcggcggttcagaaacactgtttggtggagaaatgtcaaactcacggccgcattgatacttctcctcctggtaataatatatgtcgttctagtcttcgtgtgccatggtttcaccctaccaacttgcataaggtaaggcatgatgtgcacatagtgttttttgctgtgcatgtttgtgcctgtcaccggggtccggggggcagcagccattgcaattgtttcttgtgtagaggaaagctacatattatgaagtgattgtgagaactcaattaaagatgtgaacttaacataaaaagtgcttcttgtgggtttggctatgaccttgtaggtctatgagaattcggtgtttggattggtgtttatttgtggctattcttgtgtctgtacatgaattcagttacgacgagtattttatggctatgctaatgtaatattcttg

SEQ ID NO: 27864 - DNA, 802 bp, Zea mays
  Clone ID: LIB4740-077-H12_FLI
tcgaggccggccgggaagaattgcgtgctgtgtttatctctgtggccctgcgcccctgcgtgcctgcgttgtgtgctctcgctctctcggcggaagttggcgacgactgggcgaccgccgccgccgtacgccaggtgctcaggtctccgtcagacccttcgccaggtcttcttccgcggcgagcaccgccaggtgtgcatccaatcttcttcactgggtcctccgctgcttctagtcacgcatctaaatccggagttgccagcattcgcttgaggtgcctgacaaagcacaccatcatgcaggctagcgataggttcaacataaactctcagcttgagcatcttcaagccaaatatgttggtacagggcatgctgatttgtctagatttgaatgggctgtaaacatccagagagacagctatgcctcttatattgggcactatccaatgctagcatattttgccattgctgagaacgaatcgatcggaagagaacgttacaatttcatgcagaaaatgctgcttccttgtggccttcctcccgagagagatgaagattgaagagctagctggtgctgcatagtttctgtgtttccagtggttcctgtagtgtttgcttttagctaccatcgtactatgtgcgagcatgcctttcacgtttcttccattagtctcttttgtgatacatagaacccgtatgtattgttaaccaaatgctggcctgccccattgttgtgtttttgtggtgtgttcagccaatgtgaaagaaaaaaaaaaatagcccaagagattgatgactgcct

SEQ ID NO: 27865 - DNA, 676 bp, Zea mays
  Clone ID: LIB4740-078-F2_FLI
atcgaggccggccgggaccccttctacctgctgtgcgaaaccgagcacccaaaccctaacttaaactttttttgttcggatctggtctaataacaaatatatgtacattcatactgacctttttgcaaaaaaaaaattcggatgtactcccgtgtcctccactgcttctaggcacgcttctgaattcggagttgccagcattcgctcgaggtgccggaccagatctcaccatcatgcaggctagcgatagattcaacataaactctcagcttgagcatcttcaagccaaatatgttggtacagggcatgctgatttgtctagatttgaatgggctgtaaacatccagagagacagctatgcctcttatattgggcactatccaatgctagcatattttgccattgctgagaatgaatcgatcggaagagaacgttacaatttcatgcagaaaatgctgcttccttgtggcctccctcctgagagagatgaagattgaggagctgttgcatagtttcagtgtttccaatgaccatttatgagattgtaacctctatggtactatgtgccatttgtgttaaagctcgtatgcctttgacttgtcttgcatcggtctctatcgtgatacataaacattcgtaacttgtatgcattgtaaacgaaatgctggttatgccc

SEQ ID NO: 27866 - DNA, 1115 bp, Zea mays
  Clone ID: LIB4740-079-F1_FLI
attccgtcgtcgtcatcagcagcttctgcttgctctggggggaaggagagagagagagagcgagagagagatctagtagagaggctagtaggtggtcctcgaacgaagatgttggcggtgttcagcgggcaggtggtggaggtgccggcggagctggtggcggcgggcagccggacgccgtcgcccaagacgaaggcgtcgcagctggtggggcgcttcctggccgcgtccgagccggccgtgtccgtgcagctcggcgaccacggccacctcgcctactcccacaccaaccaggcgctcctccgccccaggtcgttcgcggccaaggacgaggtgttctgcctgttcgagggggtgctggacaacctgggtcgtctgagccagcagcacgggctgtcaagcaagggcgccaacgaggtgctcctcgtcatcgaggcctacaagacgctgcgcgaccgcgcgccctacccggccagcttcatgctcgcccagctcaccggctcctacgccttcgtcctcttcgacaagtccaccaactccctgctagtcgcatctgaccccgagggcagggtgccgctcttctgggggatcaccgccgacggctgcgtcgccttctccgacgacatcgacatgctcaaaggctcatgcggcaagtcgctcgcgccgttcccgcaaggctgcttctactccaacgccctcggagggctcaagtgctacgagaaccccaagcacaaggtcaccgctgtccccgccgacgaagaagagatctgcggtgccactttcaaggtggtggaagggtctactgtcctgacggcgctgcactgatcgatcatcagctggcggaggcgatgcgacgatgatgcagaactttgtacatgcgtggtgggtgtgtaacatagtgtggctggcaacaagccatgctcatgcaaaccgatgaatctatctctgtatcatgcatcgatctcggttgcttgctagtcccgactccagactccagacatggctatatatagctggtgctaataaataggagtataatcgtcatatcgatcgattgcgtgtggaatgccaatcaagtgtgtaatctgttccaaataacaaacctctgttcctcc

SEQ ID NO: 27867 - DNA, 850 bp, Zea mays
  Clone ID: LIB4740-081-C6_FLI
ggccggccggagaaagcctagaagggtaaaatgtcctccctttccctttccaatccccacgccgccacaacaatatcgcattgacacatcgttcatcggatccagtcctctcccgggatcacctccggctataaatttccgtccccaattcacccaatccagatgcgcaaacatcgaatcgtctcgctagtggctgccctactcgtgctgcttgcccttgccgccgtttcctccacgcgcagcacacaaaaggagtccgtggctgacaacgccgggatgttggcaggcggcatcaaggacgtgccggcgaacgagaacgacctccagctccaggagctcgcgcgcttcgccgtcaatgagcacaaccaaaaggccaatgctcttctggggttcgagaagcttgtgaaggccaagacacaagtggttgctggcacgatgtactatctcactattgaagtgaaggatggcgaagtcaataagctctatgaagctaaggtctgggagaagccatgggagaacttcaagcagctgcaggaattcaagcctgttgaagagggtgctagcgcctaaggatctgtcgtctccctgtgcaatttgctgcctgaagcgcaaaactaagttgcagaataaggagctgcttcggaacatgccagagcatgcaccctcgcgtattttcataaaatcagtgctcttaatgtaatatcttgaattgccgtgccatgtgtaataagtaatatcatgaataacagttgctattatgggttctaaatgtgtattaacagccatccatggcagagttctcatattactttgctgaagtctttgttggaatatacatgacagaattctc

SEQ ID NO: 27868 - DNA, 1798 bp, Zea mays
  Clone ID: LIB4740-083-D5_FLI
ggccggccgggagtacacgctacgacctcgcttccggcgccatggagacgaagcgggtggccatcatcggcgccggcgtgagcgggctggcggcgtgcaagcacctgctggagcgcggctgccggcccgtggtgttcgaggccggcaccgtcgtgggcggcgtgtgggcgcgcgtgccagacagcacggcgctgcagacgccgcggcccatgtaccagtactccgacttcccgtggccggacaccgtcaccgaggtgttccccgaccaccggcaggtcatgtcctacctggacgcctacgcgcgccacttcggcgtgttggactgcgtccgcttcggccgccgcgtgctcgggatggagtaccacggcgtcgccgaggacgacgtggcggcgtgggaggagtggggcggaaacggccaggcgttcggctgcgccggcgctggcgagtggcgcctcaaggtggccgacgccgagggacgcattgagacacacaaggcagacttcgtagttctctgcatcgggaggttcagcggcgttcccaacacgcctacattccctccaggcgaaggtccagaagcgttcgacgggcaggtgatccactccatggactacgccaagatgggcaccaagaaagccagggagatgatcaaaggcaagcgcgtcactgtcgtcggctacctgaaatcagcggtcgacattgccgccgaatgcgcagaagtgaacggcgctgatcatccatgcacaatggtggtccggacgaagcactggatcataccagactacttcgcttggggagtccacatatcgctgctattcctaaaccgcttcgcagagctcctgatccacaagccgggcgaaggcttcctcctttggctcctcgccaccctgctggcgcctttgagatggctgttctcgaagttcgccgagagctactacgccatcccgatgaggaagcacagcatggtgccggaccacagcctgttccaggcgctggccacgtgcctgatcgcgatccagccgaaggggttctacgagaggctggaagaaggcagcatcgttctcaagaggtcgaagacgttcagcttctgcagggaaggcgtcgtcgtggaaggcgaggtgtcgtcgtcgtcgctggtggagagcgacgtggtgatctacgcgaccgggttcagaggcgacctcaagatcaaggacatgttcgcgtcggagtacttccggagcgtcgcagttgggtcagcatgcactactgtgcctctctacagggagtgcatccaccctaagataccgcagctcgcagtgctcggttactcggagagcatcgcgaatctgtacacctcggagatccgggccaagtggctggcccatttcatggacggcggcttcaggatgccgagcgtcgctgcgatgcagaagaatgtcctcgagtgggagaagtgcatgaagaggtacgccggcggcaggtacttccgcaggtcctgtatagggctccttcacatctggtacaatgatcagctgtgccgggacatggggtgtgatccgaggaggaagaagggctttcttgaggaactgttcggagtctatggccctgctgattatgctgaccttcaccccgaccgcaagaaagacgactagaccttctgtggcggcactcgtaatctagaccttcattataaagtgggtatgtccatatggatgctgttaatgtccatatggatgctgaatatataaagtgggtattattgtgcctattaattaatatcgcaaaccgaataataaaaatggtcgaacaggtcgattag

SEQ ID NO: 27869 - DNA, 1023 bp, Zea mays
  Clone ID: LIB4740-084-C7_FLI
ggccggccgggaaccctcacactcccatccagccgccaccaggtgcagagtctttcgtcatctcttctccggcgaagaacccccagtcgcccaccaggtcacttgttaaactttgttgaggggtgatggcggtttctttcgcaaacctcaactccgaggcagggcttaaaaagcttgatgagtaccttctcactcgcagctacatcactggctaccaagcttccaaggatgacttggctgtctacacttcgttttcggctgctccctcgtccaagtatatcaacgtagcaaggtggtttaaccacattgatgcgctcgtgaggctgagcggaattactgcagagggccaaggtgtgaaggttgaatcctcagcagttccttcagccccaactccagatgttgctgaagcacaggccccagttgctgaggaggacgacgacgatgatgttgacctttttggtgaggagaccgaagatgagaagaaggctgctgaagagcgtgctgcagctgccaaggcttctggcaagaagaaagaatctgggaagtcatcagttttacttgatgtgaagccatgggacgatgagactgacatggccaagctcgaggaagctgttaggagtgtccagatggaagggctgctctggggcgcatccaagcttgtcccagttggatatggtatcaagaagctgcaaatcatgatgaccatcgtcgacgaccttgtctctgtcgacactctcattgaggactatctgtgcgctgagccagtgaacgagtacgtgcagagctgcgacatagttgccttcaacaagatctaggcgtgacttccgatcagtccttctcctggggtgctggcgatggtggtggctgggcaatgcaccagcctaatttatccatagctatatgtctgctttgtgtggccagtgatattgccgtgagtatttttggatcctattcgagtcgaatgtaccagtaccagagttaatttgctttaattcgaaacaccgttccagttggaattctggt

SEQ ID NO: 27870 - DNA, 1661 bp, Zea mays
  Clone ID: LIB4741-001-E9_FLI
tcaggccggccgggacatacttccccgagtcgccgtcgtctgctccgggctgctgttctgcgcctccacaaggctttggcctctgttgtaagatttaagcttaacctccaaccatgggtaaggagaagtcccacatcaacattgtggttattggccatgtcgactctggcaagtcaaccaccaccggccacctgatctacaagcttggaggcattgacaagcgtgtgattgagaggttcgagaaggaagccgctgaaatgaacaaacggtccttcaagtacgcttgggtgcttgacaagctcaaggctgagcgtgagagaggtatcaccattgatatcgctctgtggaagtttgagaccacaaagtactactgcactgtcattgatgcccctggacatcgcgatttcatcaagaacatgatcacgggtacctcccaggctgactgtgctgttcttatcattgactccaccactggtggttttgaggccggtatctctaaggatggccagacccgtgagcatgctctccttgctttcacccttggggtcaagcagatgatttgctgctgcaacaagatggatgcgactactcccaagtattccaaggcccgttatgatgagattgtgaaggaagtttcatcctacctcaagaaggttggatacaaccctgacaagattgcctttgtccctatctctggttttgagggtgacaacatgattgagaggtccaccaaccttgactggtacaagggtccaaccctgcttgaggctcttgaccagatcacggagcccaagaggccttcagacaagcccctgcgtctgcccctccaggatgtgtacaagattggtggtattggaactgttccggttggtcgtgtggagactggtgtcatcaagcctggaatggttgtcaccttcggtccaactggcctgaccactgaggtgaagtctgttgagatgcaccacgaggctctccaggaggcccttcctggtgacaatgttggcttcaatgtgaagaacgttgctgtgaaggatctcaaacgtgggtacgtggcctccaactctaaggatgaccctgccaaggaggctgctagcttcacctcccaagtcatcatcatgaaccaccctgggcagattggcaatggctatgccccagtgctggactgccacacctcccacattgctgtcaagtttgctgagctcataaccaagatcgataggcggtctggcaaggagcttgagaaggagcccaagttcctgaagaatggtgatgccggtatggtgaagatgattcccactaagcccatggtggttgagaccttctctcagtatcctcctctgggtcgttttgctgtccgtgacatgaggcagacggttgctgttggagtcatcaagagcgtggagaagaaggacccaactggtgccaaggtgaccaaggctgcaataaagaagaaatgatgcgtcctcccatgtgccctcgtttattttgtacttgtgcccgtatacttcgatctgttaaaatctattggttgtgtgccctgtgtctgttgtttgggtatctatactgttattttgagacatggttgatttgcatggtcatctggattgggttcgcatttctgagtcatttgtcttgacatgaaaatcttgctttttttttat

SEQ ID NO: 27871 - DNA, 1869 bp, Zea mays
  Clone ID: LIB4741-001-H8_FLI
gcctttagttattcccttcccctcggctcgcgtgttaatccacggattaaactcgcacctgccctcctcgtccttgacacactgaacgagtgcccgcctgcccggagcagaaccattctcgccctctccctctgcctccgcctccgcggacgaaccgccggctgggtccaagtttagcgcgtcggaccctcgctccccaatctcagagcaatggaggtggaggcggcggggccggataagctggcgcctccctcgccggtggagggtcccggcgagaatggcgcggccaccaaggtgcagaaggtgtaccgcagctaccggacccgccgcaagctcgccgactccgccgtcgtcgtcgaggagctctggtggcaggcgctggactacgcgcgcctggagcacagcaccgtctccttcttcgacgagcccaagccagagaccgccgcctcgcgctggaaccgcgtcagcctcaacgcatccaaggtgggccagggtttatccagagacggcaaggccctcaagctggctttccagcactggatcgaagccatcgacccgcggcataggtatgggcacaacctgcacttctactacgatgaatggtgcaaaagccaagcaggccagccattcttctactggcttggtatcggcgagggaaaggatctggaccttcctgaatgtccaagagctttgctgaagcagcaatgcattaggtatcttggtccgcaagagcgtgagcactacgaatacatcattagcgagggaaaggttatccacaaacagtctggggaaccacttgatacaaggcgtcctaaggggactaaatggatatttgttatgagtacagcaaaaaagctttatgctggcaagaaacagagaggcgtgttccagcactccagctttctggcaggaggtgcaactatagctgctgggagattcactgcagaaagtggagtgatcaagtccatctgggcgtacagcggccactacaaacctagcgcagagaacctccacaacttcatgaacttcctcgaagagaacggagtggacctcaaagaagtcgaggtacgctcatctaccaaagaagactacaacgaggacccagtgccagtgccggtacttaacgacacacggagttccacttcagctaccatggaagaagaggcagaccttccacaggcggcggttcccgtccccgctctaaacaccacagagggcgacggaggagacagccctccggaagacgaaggacgaggcagggcgaggtaccagaggaccttgtcaggcgggctgcagagccccagagccacccaagtgccccagagggcgatcctcgagaggatgaagtccaagggcgagttgtccaagtcgtaccagctcgggcacaggctgtccctcaaatggagcaccggggctggcccgaggatcgggtgcgtcaaggactacccgatggagctccggatgcaggcgctggagatggtggacctttcgcccagagggttgtcgtcgactccgtcgccgtcgaggagactgcctcctccgtgcttttcccccactaaagtcgcctcgccgacgtctccgctcgcgccagttcaggcgtccctgccgcagccaagctaggagctcgagagcagcagcattatgcatggccacgcgcaaatagcacaagaccggttccattcgagagtagcagcacaactcaatgttgtccaagtgaaacagggtgtgggcagaatctgtcacgtttcagacaccggtagctttgaagcagatatgtgctagtgtagtgttttttttttactaccatggttgaggaacctgctttgtactgtatcatctgcaaacggaataatgggcaaagcattacag

SEQ ID NO: 27872 - DNA, 1749 bp, Zea mays
  Clone ID: LIB4741-002-D1_FLI
ctcgaggccggccggggctctttctctctctccgtgcgtctgcggcctgccatcggcatcgcccccaccaccacacgtccacctctcccgcaattgggaatttctcctcaccgcctcgtctctgccgggctcgctcgtacgtcgctccccacccgcaatggcggccactttcgccctcctccttctcctgatcctgtcctcgtcggtccgcgccgcccccgacgccgtggtgtcgaggatcgccttcggatcctgcgccaaccagagcgagccccagcccatttgggacgccgtcgcggggttcgacccgcaggtgttcgtctggctcggggacaacgtctacggcgacaacaagcgcccattccgggtcttcgggagggagcgcaccgtggggccctggaagaacgtgccgcgcttctacccttccaccgaggaggagctgcggaggcggtaccagctcgccagggcgcagcccgggtacgccaggctcagggagagggctcaggttcttggaacatgggatgaccatgattatggattgaatgatgcaggaaaagaacttagtgggaaagtgattgctcaaaggcttatgttagatttcttggatgaacctgaagacagtaaacggaggaaacaagctggtgtttatgcctcatacatgtttggccctgaaggaaaacgtgtgaaggtaatcttgctggataccagatatcacagagacccgctattaagtgatggaactattctgggagatccccagtggcagtggctagagagggagcttcatggtccacaattagagatcaccatcattggatcttcgatccaggtagtgtctaatctttcagccactactgggcctttgttctatgtggagtcctgggcacgcttcccgagggagagagaaaggctgttcagattgattgatagtagtaagagacctggagtgctatttattagtggggatgtccatttcggagaaatcaccagattcgattgtggagctgaatacccatcatatgatgttacttcgagtggtcttacccaatctgtcgagaactctgtgccagaagtgtttcaacctcttatgagacttctggcaatactaacaccaactaccatgcgagttttgagcccaaattgccaatataaatcatgtacaataggccaaccaaattttggagcgattgaaattgattggaacgctgtacctccgcggattaaacttgaactaagagatgttgagggtcattctgttcacagcgtagagttccctatatctgaactgcagccctcggaagcgcatgcaatcaaaagacaaacccatactttccaacgtcactgtactctcgaaacagagctcccatggctaacacgataccggcttgctctgatgctgtttgtcatcatagctgtttttgcggtggttgtggtgatgctagcgatcgcctgcttgtcaaactttaccaagtccagtaagaaaagcaagaaggaatagctgtgagctgcagaggagaaacgaagattcggtccagctataagctggatttcacactgaccagggatcacatatctcaaaccatgcctttgagcaggcaagagccagattgcaccacagtatcaagcagtacactgcgttgtgcaatttgcaaagcgcagattggataaatagatatgatagctaacaaataacttacaaccatgtgcctgcctcgtacagcttcgccttttgttttccgtcttcatgcg

SEQ ID NO: 27873 - DNA, 1308 bp, Zea mays
  Clone ID: LIB4741-002-F12_FLI
ctcgaggccggccgggaccgccttctccgcgagcgctaggagcaataaacggcaggcaccattctcggactcggaggcaacgcccagacgcgcaagcggaaggaagggggagcgcaacacgcgcggtcgccgggagagagagagagaaagggcgagctagcgagcgagatccccctctcccgctgccggatccgatctgacctgacctcgtcgccgcctgccgtgggagggagaagaggaagaggaggcggaggcggcggagatggcaccggtgtcagcgctcgccaagtacaagctcgtcttcctgggggaccagtccgtcggcaagacgagcatcatcacccgcttcatgtacgacaagttcgataacacctaccaggctacgattggtattgatttcctgtcaaagacaatgtaccttgaagatagaactgtgagactccaactctgggatactgctggtcgggaaagattcaggagtttaattccaagctatattagagactcttcagttgctgtcattgtattcgatgttgcaagcaggcagtccttcttaaatacatctaagtggatagaggaagttcgcactgagaggggcagtgatgttatcattgtgcttgttgggaacaaaactgaccttgttgacaagaggcaagtctcaatagaggaaggggagggcaaggcgaaggaccttggagtcatgtttattgaaaccagtgctaaggctgggtttaacattaaggcgctgttccgtaaaattgctgctgcacttcctggaatggagacgctctcatcagcgaaacaggaagacatggttgatgtgaacttgaggtccggcaatgcaaactcgtcccagtctcaggctcaggctgggggatgcagttgttagttgcagtctctgacacttgcttgctcatgatctttgggactctgagcatcagaaggcgttatcactgatgcttctctcgggaagaagagttgattgcctctcgccagtgaacacaccatagtctttacccggtgaatggaccgtttgcattggaacgatacgttttatgagttttctgttatttcctcagtggcctaagctagcaacagtgtatagttgggttgacacttcaaacttctaccattcgagttgggtattagaactagttattattggttcatgttgaacttatatatatttccatccttttgcagttagtttgagtcgtatttgctgtgtaccaaacatgtattgcaaatttggaatttttgtaagctataataaggccagcacggcaatatccccacatgataaccctg

SEQ ID NO: 27874 - DNA, 2021 bp, Zea mays
  Clone ID: LIB4741-003-E8_FLI
taggtccacaatactgcagaaccaaacacctctcggctctcgcgcccgcctgccctggccgctcgcccggtcccactcccgcataggcgccgccgccgctacccgctacccccggcatccggcgctcggcagtcggcaggttcttcccctggcatccggcactcggcttcttcttgccccggttctcggcgcggcggcgcccgctcctcctccccccggtcgcccgctgcaggtcctccccccgcagcacgcgcccgctgctgcagcctgcagctcctccggtcctccccctgccggcgcccgctgcgagctgcagctcctcccccctggctggcacagctgcagcttcaactctcttgaaggcaaaagaattgaatcgcgctctgttgatgggcagcttgcatgctctgcgggcgccgacgccgctcgttgggagcaccaggattggcttcagttcggggctccgcttttgctccgacagagtcctcagagggttaactcccattggcgcgatgaagtcgtataggctatcggagctcagcgacaccgaagttagcagcctcaaagctcgtccccgcatcaatttctcgtctatttttggcacggtgaatccaatcgttgaagatgtccgtgtgggaggtgatgcagcagtgaagcactacacagaaaagtttgacaaggtcatgcttgatgatgttgtcgtctgtgttagcgatcttccagatgcagagcttgatccagctgtgaaggaagccttcgatgttgcatatgacaatatatatgccttccatgtttcacaaaaaatacctgagaagacagttgaaaatatgaaaggcgtaagatgtaagagaataactagatgcattggttctgttgggctgtatgtcccaggtagcactgcagtcttgccttcaactgcattgatgcttgctgtgcctgcacagattgctggatgcaaaactattgttcttgccacaccacctagccgtgatggcagcatatgcaaggaggttctttactgtgcaaagaaagctggtgtgacacacatattgaaagctggaggagctcaggcaatctcagcaatggcatggggaactgcatcgtgcccaaaggctgagaagatttttggacctggtaaccagtatgtaacagctgccaaaatgattcttcagaacagtgaagctatggtatctatagacatgcctgctggcccttctgaagttttagtcattgctgataaatacgcgaacccagttcatgttgctgctgatctgctatcccaggcagaacatggtccagatagtcaggttgttctagttgttgctggagatggtgttgatctgggtgccattgaggcagaagttagcaagcagtgcaacgcgcttccaagaggtgaattcgcttcaaaagcacttagccacagcttcactgtgttcgcgaaagatatggttgaggcgatatcattctcaaatctgtatgcccctgagcatttgatcatcaacgtaaaggatgctgagcagtgggaagagttcatcgaaaacgcagggtcagttttcttgggccaatggaccccagagagcgtgggcgattatgcgagcgggacgaaccatgtccttccgacctatggttacgcaaggatgtacagcggtgtatcgctgaactctttcctcaaatacatcactgtccagtccctaacagaggaagggctgagaaagctggggccgtacgtcgcgaagatggccgaagtggaggggctagaggcgcacaagagagccgttacccttaggctgcaagaggttgaggccaatgttactgtctagctgctgtccatggtctattgtaatgttcagactcgatgtgggatgctggagttcttccctaggaacctaggggaactggactattgatgccttccaaacatgctctggaatgttagaaagaggcgtttcaactggtgcagctaataatgttcattggaccctgatttgtttcacgaataaacttgagcagaacttactgtg

SEQ ID NO: 27875 - DNA, 1922 bp, Zea mays
  Clone ID: LIB4741-005-D6_FLI
ctcgaggccggccggggtattctccttgctgccaaatgaccctgtacagactacagtgtacaagcctgccactttttaaaactcacaacccccgacctgctcagatcaggtaaaccagtcactctactactcgatggaacaagctacatgggccgcgttcctcggcattgtcctttgcgcagcgctcttccacaggaccttccttgcgcgcggccggcgccgggccaacaaccccccgcccggccccaagccatggccgatcatcggcaacctaaacctcgtgggcgagctcccccaccgctccatgaacgagctctccaagcggtacggtccgctcatgcagctccggttcgggtcgttgcctgttgtcgtcggcgcgtcggttgagatggcaaagctcttcctcaagaccaatgacgcggcgttctccgaccggccgaggttcgcagtcggcaagtacatcgcgtatgacttctccgaccttctatgggctccttccggaccgtgcctgcgccaggcacgcaggatctgcgccaccgagctcttcagcgccacgcggctcgagtcattcgagcacatccgcgacgaggaggtgcgcgtgatgctgcgacagctgcgccaagcggctgggcgcactgtgcggctcagggactacctgcagatgttgacgctcggcgtgatctcgcgcatagttctgggcaagaagtacgtccaggaggaggcggcggacggtgagggggactcagcgtcggcgatgacgcctgccgagttcggggagatggtggacgagttcttggtgcttcacggtgtgtttaacattggtgattacatcccgtggctagattggctggacctgcagggctacgttgctaggatgaagagaatgaaggcgaggtttggtcgattcctggaacgactcctggacgtgcacaacgagcggcggctacgcgagggagggaacttcgtggcaaaggatatgttggacgtgctgctgcagctggccgatgatactagtcttgaagtccagctcaacagggacaatgttaaggctatcacacaggacctaatcattggaggcacggatactagtgcaaaggccctggagtgggctgtctcggagctgctcaagaaccccaaggtcttagccaaggccacagaagagctggaccacgtcatagggccggaccgactggtgacagaaagcgacctccctcgcctcccctacatcgaggctgtgctcaaggagaccctgcgcctgcaccctgccgcgccgatgctggcaccccacgtggcccgcgaggacacatccgtggacggctacgacgtgctcgctggcacggtcgtgttcatcaacgtgtgggcaatcggccgcgaccctgcgctgtgggacgcgccggaggagttccggccggagcggttcttcgagagcaagatcggcgtgaggggccaggacttccagctgctgccgttcggctctggccggcgaatgtgccccgggatcaacctcgcgctaaaggtgatggctttgagccttgccaatctgcttcacggcttcaagtggaggcttccggacggcgtgacggcagaggagctgagcatggaggaggccttccagctcacggtaccgcgtaagttcccgctcgaggccgtggtcgagcccaggttgccagaccgcctgtatacgggcgcttgatcgatgcccgtacctgtgttggacacttggactgttggcatgtgtggagcacagcacgtgattgttcagctcttggaaaattaatgttgtgtctcgtatacaaattaattatggtagtgcatatataatgcacggtttgtgagagtttgatgtttcagatctatacgttgaattaggcctttatgccttgttcggttattcctaatacacatggattgaatgagattag

SEQ ID NO: 27876 - DNA, 737 bp, Zea mays
  Clone ID: LIB4741-005-E5_FLI
ctcgaggccggccggagtatccagagccagtctctactcgcctctctctcgcgcaagccacagtagagcaaccaaccataccaccggcccgtgtcgatctctggcctctctcgtgcaaggaattaagcaggcaagaggccaaccttcttccagcatggccaaggcgagcagcaggctgctcttctcgctctcgctcgtcgtcctgctgctcctcgtggagaccactacttctccccatggacaggctgacgccatcgactgcggcgcgagctgctcgtaccggtgcagcaagtcgggacggcccaagatgtgcctgagggcgtgcggcacctgctgccagcgctgcggctgcgtcccgccgggcacctccggcaacgaggacgtctgcccctgctacgccaacatgaagacccacgacggccagcacaagtgcccgtgatccatccaccgtggttcccagcatcagcagctttgccaaaaagacatgatacctacatatatataagagtacctagctgccgctgctctactaccttgttggttcattatattgtgcgcgtgcatgcatgaataaataaatgaacatattagggcatgtacaacccagatacggctgcacggtactccaagtacaagatacaactaaaacacaacaatacagtggtcatgtctaaaacatgtgtcttacgatattcattgtaccaatcagagtattcaataaattaaagtgaccaatc

SEQ ID NO: 27877 - DNA, 1965 bp, Zea mays
  Clone ID: LIB4741-006-B8_FLI
ggccggccgggacacttcacaagcagctcaaagctctagctatagctagctagcaaaggggggaaaaaatggctccgcttctcgctgctgccatgaaccacgctgcagcccatcctggccttaggagccatctagtaggacccaacaatgagagtttctcacggcaccacctgccttcttcttctccacagagcagcaagcgaaggtgtaacctgagctttactccacgatctgcaagagtaggcagccaaaatggagtccaaatgttgagcccctcggaaatcccacaaagggactggttcccctctgacttcaccttcggtgccgccacttcagcgtaccaaattgaaggtgcttggaatgaagatggaaagggggaaagcaactgggatcacttctgccacaatcatccggaaaggatactggacgggagcaattcagacattggagcgaattcgtaccatatgtacaaaacggacgtcagattgctcaaggaaatgggcatggacgcatataggttctctatctcttggcccagaatactgccgaagggaaccaaagaaggaggtattaacccggatggcatcaagtactacagaaacctcatcaacttgttgctggaaaacggcatagagccatatgtaacaattttccactgggatgtacctcaagcactagaagagaagtacggcggcttcctagataagagtcataagagcattgtagaagattacacctacttcgctaaggtgtgctttgataacttcggcgacaaggtgaagaattggttgacctttaatgagccccagacatttacttccttttcctacggaactggggtctttgccccagggcggtgctcacctggactagactgtgcctacccaactgggaattcactcgtcgagccttacactgctggccataacattctcctagcccacgctgaggctgttgatctttataacaagcattacaagcgcgacgacacccgcatagggcttgcgtttgacgtaatgggtcgtgtgccatacggaacatcgtttctggataaacaggccgaagaaaggtcctgggacatcaacctaggatggttcttagagccagtggttcgtggtgactaccccttctccatgagatcattggctagggaacgactacccttcttcaaggacgagcagaaggagaagctcgccggttcctataacatgttggggttaaactactacacctcacggttctccaaaaacatcgatatctcaccaaactactcacctgtgctcaacactgacgacgcctacgccagtcaagaagttaacgggcctgacgggaagcccattggtcctcctatgggaaatccatggatctacatgtaccctgagggcttgaaggatctccttatgatcatgaagaacaaatacggaaacccacctatctacatcacggagaacggaatcggggatgttgataccaaggagacacctctacccatggaggatgccttaaatgactacaaaaggctagattacatccagcgccacatcgctactcttaaggaatcaatagacttgggatcaaatgtgcaaggctacttcgcttggtctctgctggacaactttgaatggttcgccggcttcaccgaacgttatggcattgtctacgtcgaccgcaacaataactgcacgcgctacatgaaggagtctgccaagtggttgaaacagttcaacgccgcgaagaagcccagcaagaagattcttacgccagcttagaaatcgggggcctcatgatgtgggtgcagcccataaaaaactggtgtgtggtttggaaccgaaaattttctgtttttttccgccacgagaggttctggaggcatactctccagcaccgtggctaataacgcattgttccaattcagtctggccttgtcatgcatgcaataaataaagtgatgggtttccctgttcc

SEQ ID NO: 27878 - DNA, 1741 bp, Zea mays
  Clone ID: LIB4741-008-H11_FLI
ctcgaggccggccggggggttatccccgtttctacgcgctcgctcctgtacctctccccagtgcccaagaatccaagatctggaagggccaggtgggaggaccaagcttcgtcgacgtcgactcctcgtcctccctcacctcgctcgcttctctgcaattctccgcagccctcctctttcggtctttcccgctggcctcctcttttcaaaaccctcgctaatctcgtgccccgtcccacccacctctagcttcgaatcctagcgcctcgcctccgcattctagggtttccccgcctccggcgccggccatggaggcggtggtcgtcgacgcgggctctaagctgctcaaggccggcatcgcggcgcccgaccaggcacccccactggtaatgccgtcgaagatgaagctggatgttgaggaccaggagctggctgacggcgcggtggtagaggaggtggtgcaccctgtggtgcgcggcttcgtcaaggactgggacgccatggaggacctactcagctacgtcctgtacagggacattgggtgggagattggggacgagggccagattctcttcaccgaacccctcttcacgccaaagactcttcgggagcaattggtgcagcttatgtttgaaaagttcaatgtttcaggcttttatgcctctgaacaggctgtattgtcactctatgctgttggacgcatttcaggatgtaccgttgacattggtcacgggaaaatagatattgctccagtttgtgaaggagctgttcaacacatagcttctaagagattagagattgggggagttgacttgacaaacctgtttgcacaagaactgaaaaaatccaacccatcagtaaaccttgatgttgctgatgttgagctgctgaaagagcagtatgcgtgttgcacagaagattatttgacttttgaaggtatagaaagctcttgtcaaccagaaaagcacactcttcccgatgggcaggttataacaattgaaaaagaggggtacattgttggtgaagctttatttcaaccacgtatattgggcttggaagattatggtatcgttcaccagctagttactagtgtctcaaatgtttcatcagagtaccatcgccagctgcttgaaaataccatgttatgtggtggcacctcatcaatgactggctttgaggacaggttccagagagaagcaaatctgtctgcttcagcaatctgtccatcacttgtgaagcctcctgaatacatgcccgagaacctagcaaggtactcggcctggttgggtggtgcgatattggctaaggtcgttttccctcaaaaccagcatgtgaccaagggcgagtatgatgagacggggccgtccattgtgcataagaagtgcttttagagacaaatgccttgaactagcacggttggtgcaccatttgctgctgttcatgtcgcaggtgtgctcgtacctgaacgttgcgcccttgcgggggctgatgcagcgatgcttgtgtctacaccttactccagccacagttcatacctgacggttgctaagtgttgatgcatctagctagctcggttaggatggattggccctaaggtttatttttatttagagtggaatggagtgtagcctcggcatgtattccttaggagttttttagccaattgctcatttgtacctgtagtaccagagaatttcctgagattttcttttaaatttacattatgacccattacctgtcg

SEQ ID NO: 27879 - DNA, 2295 bp, Zea mays
  Clone ID: LIB4741-009-D4_FLI
ccgggagtcaccagtccaccgcgcccgcgcccccgatccagcgatatggctggctccgtagctccccacgctgtggtcctcggtcttctcctgctcgcggggctcgcggcggcgcagagggcgacgacgccggctgcggcggcccccgcgcccgaccccggctgcaacggcatccagctgacctacaacttcgtggaccgcaccaagatccggcccttcgtcagcgacaagaacaagcagccctacgccttccgcgccaacgtcaccgtgctcaactccggcacccgcccgctcaagtcctgggcggcactcgtcacattcggctacggcgagatcctcgtcggcgtcgacggcgccgtgctcacgggcggcggcgacctgccgtacaacaccacggaggacgccggcaacgccacctcgttctccgggtacccgcatacagacctcctcacgcccatcgccaccgccggggacctgtcgcagatccaggcctccgtcggcatcgtcggcacgctcttcgccgggcccggcccgttcgtgccgctccccaccgcgctgtcgctggacgacccggcctacgcgtgcccggcggcgaccaacgtcactgctcgggtgctgtccacgtgctgcgtcctcacgccggaggccgaggccaacgccactgccatcgacgccaacaccaccgacccgaccaaggatttcctgccgcgcggcaccggcgacctcgtcatcacctacgatgtgctccaggcctacccctccagctaccttgcgctcgtcacgctcgagaacaacgccaagctcggccgcctcgacaactggcggctgtcgtgggagtggcggcgtggggagttcatctactcaatgaaaggagctcacccatcagaggtggacacctcgggctgtatctatggggcgcctgggcagtactaccagagccttgatttttcgcaggtgctcaattgtgaccgcaagccggtgatccttgacctgcccctgtcccggtacaacgacactcagattgggaagattgacaattgctgcaggaatgggacaatcttgcccaagtccatggacgaggcacagtcgaaatctgcgttccagatgcaagttttcaagatgccaccagacctgaaccggactaagctgttcccccctgctaatttcaagatcgtgggtgcatcatcgctgaacccggactatgcctgtggccagccggtgcctgtcagcccaaccgcgttcccagacccgagcgggcttgactcgacgacgcttgctgtggcaacatggcaggtggtgtgcaacattaccacgacaaagggggccaagcccaagtgttgtgtgaccttctcggcgtactacaacgactcagtgatcccctgcagcacctgcgcttgtgggtgccctgcaaacaggcgagggccaacgtgcagcaccaccgcacaatccatgctgctgccaccggaggcgctgcttgtgccattcgacaaccggtcacagaaggcgttggcgtgggctgagctgaagcattacaatgtgccccggccgatgccttgcggtgacttttgtggcgtgagcatcaattggcatgtctcaacggactacaacaagggctggagcgctcgggtgacattgttcaactgggaggatgtcgacatggccaattggtttgctgccatcgtcatggacaaggcgtatgacggctttgagaaggcttactcgttcaacggcaccgcagtgggcaagaacacgatctttatgcagggtctggaggggcttaattacctggtgaagcagaccaacatgagtgggtccgactaccttgttcctggcaagcaacagtcagtcctctcattcaccaagaagctgaccccggggttaaatgttgttgctggagatggcttcccaacaaaggtcttcttcaatggcgacgaatgcgctatgccacagagaattccgatcagcactggattcagcacccgtctcagcagtggccttgctctggttccgttccttgttgcttcggctttcctattgctccagcaatgatccacgggactccaattctttgattctttcaggtggtttggtcgatgccatttgtaagaaagcctcttttttttgtttctgtgattgctttagtagattctacttagctgctgtatgttagtcagatgaagcagcagctgtgaaacagtatgaatacttggatagtgagagaaaaagtgaggaagcatttgttgcgggtttgcaacattggttcctcgttctaatggcatttacgaattgtctcag

SEQ ID NO: 27880 - DNA, 669 bp, Zea mays
  Clone ID: LIB4741-012-H8_FLI
cggccggggcaaaagcacttcaccagttcacccactcggactaggagcaggagaggggagagaaaacctcgccgtcaatgtccgcgttcgctcccaagggcgctagggtttaaccccccaactgttcggtctctctctccccgaatccaattcagcgtcatctagtccgggagccggcgacatggggtacctccaggaggcccgggagaatcacgtcaagaagaaggtcgaggaagctttgcggagcaaaatgaaacaaaaggctcttcaggaatgcgatttctattgttcaaaatatgctgagtgtgcacggggaagaacattttctgtggtatggcaatgccgcaaacaagcaaaagagttgaatgagtgccttcatcaatacacaaatgatgcaatcctggaagaaatgaagaaggcttatatgatcgagcaaaagagcaaggagataaatcaatgagcaaaaatacgttgcacaatgtgcatcacgatcaccctgcttgtatgtatactgttgcctttgatagatactattcatgggtagtgttgcaaacattgttcttccacatgcataacctgatactagtattgggtggcaaactggcaatcttgctgtttctgtcgaacatgcgatataagttgttttcttctgttgcaattttcatccct

SEQ ID NO: 27881 - DNA, 1666 bp, Zea mays
  Clone ID: LIB4741-013-C3_FLI
aaccgcagagacaggcgtcttcgtactcgcctatctccgcgacccaaagcgttcccccttctcccattcttctctcatttctcaccaccgccgccgctaccccctttcgacaacaccatgagggagtgcatctcgatccacatcggccaggccggtatccaggtcggaaacgcgtgctgggagctgtactgcctcgagcatggcattcaggctgatggtcagatgcccggtgacaagaccattgggggaggtgatgatgctttcaacaccttcttcagtgagactggcgctgggaagcacgtcccccgtgctgtttttgttgaccttgagcccactgtcatcgatgaggtgaggactggcacctatcgccagctcttccatcctgagcagctcatcagtggcaaggaggatgcagccaacaacttcgctcgtggtcactacaccattggcaaggagattgttgacctgtgccttgaccgcatcaggaagcttgcagataattgcactggtctccagggcttcctcgtcttcaacgctgttggtggaggaacgggctctgggcttggttctctcctcctggagcgcctgtctgttgactatggcaagaagtccaagctcggtttcaccgtgtacccatccccccaggtgtccacatccgtggttgagccatacaacagtgtcctgtccacccactctctcctcgagcacactgatgttgctgtcctgctcgacaatgaggccatctatgacatctgccgccgctcccttgacattgagcgcccaacctacaccaacctcaacaggcttgtgtcccaggtcatctcatccctgactgcttccctgaggttcgatggtgctctgaacgttgatgtgaacgagttccagaccaacctggtgccctaccctaggatccacttcatgctttcgtcctacgctccagtcatttctgctgagaaggcctaccacgagcagctgtccgtggccgaaatcaccaacagcgccttcgagccatcctccatgatggccaagtgcgacccccgccatggcaagtacatggcatgctgcctcatgtaccgtggtgatgtggttcccaaggacgtgaacgctgctgtggccacaatcaagaccaagcgcaccatccagttcgtggactggtgcccgactggcttcaagtgcggaatcaactaccagcctcccagcgtcgtccccggcggtgacctggccaaggtgcagcgtgccgtgtgcatgatctccaactccaccagtgttgtggaggtcttctcccgcattgaccacaagttcgacctcatgtacgccaagcgcgccttcgtgcactggtacgtcggtgagggtatggaggagggcgagttctccgaggctcgtgaggatctggctgcgctcgagaaggactacgaggaggtcggtgctgagtttgacgagggtgaggacggcgacgagggtgacgagtactagacgctctactggcgcggcgtcgtcgggcttgtgtgccactgctatcctgtgatctgccctgagtggctcctatcgtgttatgtttctgtcggttcttatctatctgtcgttgtgtggtttacaacttacgttgtaagactttattcccccgctttgctactgggttattaagtttggcgttattgttttcttg

SEQ ID NO: 27882 - DNA, 980 bp, Zea mays
  Clone ID: LIB4741-014-A7_FLI
gcctatccgttgaaaaaaatccggcacctccatcaaatcagatctcacgcccctgcagccaaaacaaaatcagcatccggatctccacattccccaccaaaaatcatcctccggacgaaatcagcggcggcggagatgggagcggagtgccggtacgaggtggcgcaggcggcgtacatcaagctggcgctgcacgcactgaagcacccggcgaccgccgtcaacggcctcctcgtcggtcgcctcgtcgagccttcgtcctcaccggccgtcgtctcggtcatcgacgccgtgccgctttctcaccacccgcaccatctgccgctgctccccacgctcgagctcgcgctcaccctcgtcgaggaccacttcgcaacccagggcgaaggcctcgccgtcgtcgggtactatcacgccaacccgcgctgcgacgacaccgaactcccgccagtcgccaagcgcgtcggagaccacatcttccgatacttcccccgctccgcggtgttgttggtcgataacaagaagcttgaggaggccgtcaaggggaagttttctgatgcggtgattcagttacacaccagggattcatcaaaaagttggcgtcaggctggatcagatggaagcagtcagctggttctaaaagaaccttctaccaatgttgtcctagctgatcatgttacaacaaagaaatgggagaaaattgttgatttcgatgaccaccttgatgatattagcaaggattggtcgaacccaggcctccttgactgagttttcatgattgatctcgctatactgttttggaacttcgctagaaatgaggtggtgaagctcgtcctgctgtgctatggatttctctcagtcgcaacgagttgtaagcactaagcacggatttcattttaatgtaaacgagtgattttgtaacaattacagttcaaaatgctaaaattgacgttgtgatgatatttaagtagattcatccg

SEQ ID NO: 27883 - DNA, 1183 bp, Zea mays
  Clone ID: LIB4741-014-G6_FLI
ccggggccagtcgccacgttatatttcgtccgccttcctccgcctccggcgcaccattttcgtcagctcctggcgcccggtggctcgccggcgcaaattaagtaattaacccgaactccctggcattctccgcgggcctgtagtcttgtagcctctcgcttgcttcgccgtagcacttgcttaattagggcggtgttcgagaggtgggtgtggtggtgtactggtgtactagtactactcgcctcgcctcgcctcgcctcgagggtttgtttgactggcggaggcaggagctgcggcggtccgggagcgcatggggaacgcgaacgccaaggagggggagaacggccacatggcggcgtctcctgagccggcggctcccaacggcggcggaggaagcagcagctcggcgggaggcgctgccgcgcgacctccaccgttgtcgccgccagacgacgtgatgctggagcgtccaccgcccgtgccctatctcttcgtgccgcaggttccagagactccactgcacagacctactgagctctctcctcttctcaaccattcaccggtaaacgactccaccgaccagcactcccaggagcagggtattccaactttgattacatggagccaaggaggagatgaggtgttcctggaaggatcgtgggataactggacatcgaggagggcacttgagagatctggaaaagatcacgccgtcttgttggttctgccatccggagtctaccattaccggatcatcgtggacggggagctgaggactacgtgcccgaaagcctcgacagcgtagccgagttcgaagcgcccccgtctcccgtgcacagctacgacctgcattgcccgggcgacgaggagttcgccaaggagccgcccacgctcccgccccagcttctcatgtccgtcctcgggggggacgtcgatagcgctggcagtcaagctttgaagccacagcacgtcgtcctcgaccacctgttcatcgagaaagggtgggggtcgcagtcgctgctcgccctcggcgtcacccaccggtttgagtccaagtacgtgagctttgtgctctacaagccgctggagaggtgatggtggtactgttgtctaccgtgtgtgagtggaagaacagagtggtctggtggaggtgattaatgtaataaatctgaatgtttcgatg

SEQ ID NO: 27884 - DNA, 2091 bp, Zea mays
  Clone ID: LIB4741-015-D1_FLI
ccggggaacggcagtcccccgcattcccctaacgttcaatcgcgtaccgtcgctcgccgtattcccctgccgcgcacagttcactcgcgcacctctcgccccctcgctctacgacgactagtgggccgccggcgctggcgccgccttacgccaggtgccgaggtcttcgttgatctcttcgccggcgacgagcacccaccagctgggaaaaaatctatagccaaacataataatggctatgattgatgaacctctctacccgattgctgtactgattgatgaactgaaaaatgaagatattcagttgcgccttaactccatcaaaaagctttctacaattgcccgggcattgggtgaagaaagaacaaggaaagagctgattccattccttagtgaaaacaacgatgatgaagatgaggtgcttcttgcaatggcagaagagttgggcgtttttattccttatgttggaggagtagagcatgcacatgttttgcttccaccactggaaacattgtgtactgtggaggagacctgcgtcagagacaaggctgtggaatcactttgtcagataggagcacagatgaaggaaaatgatattgtggactggtttgcccatgtcgtaaagaggttggcggtaggtgagtggtttacagctcgagtttcttcgtgtggcctttttcatatcgcctatcctagtgcacctgaacaactgaaggcagaactgaggacaatttatggccagttatgtcaagacgacatgcctatggtacggagagctgctgcatccaatcttgggaagttcgctgcaacagtggaacaaagtcatttgaagacagaaatcatgtcaatgtttgatgatctaactcaagatgaccaagattcagtgcgactattggcagttgagggttgtgctgctcttgggaagttgttggagccccaagattgtgcagcacatattctcccagttattgtaaatttctctcaggataaatcttggcgtgtgcgctatatggtggcaaatcaactgtatgaactatgtgaagctgttggtactgaacccacaaggggtgatctggtgtcagcgtatgttcgccttctctgtgacaatgaggctgaagtgcggattgcagctgctggaaaagttacaaaattctgcaaaatattaaacccacaaattgcaattgaacatattcttccgtgtatcaaggaattatcatcagattcatctcagcatgttcgttcagctttggcatcggttattatgggaatggctcctgtattgggaaaggacgccactcttgaacaactgcttcccatttttctttctttgctgaaggatgagttccctgatgttcgactcaacattataagcaaacttgatcaagttaaccaggttattggaattgacttgttgtcgcaatcacttctgccagccattgtagagctctctgaagataggcactggagagttcggcttgccataattgagtacatacctttgttggccagccagttaggtgttggtttttttgatgacaagttaggggcactttgcatgcagtggttggaagataaggttttctcgatcagagatgctggtgccaataatttaaagcgtttgacagaggaatttggccctgagtgggcgatgcaacatataattcctcaggttttggagaagataaacaacccacattatctgtatcggatgaccactttgcaagctatttctttgctagctcctgtcatgggtcctgatatcacatgccaacagttgctccctgtcgtcattgcttcttcaaaggacagggttccgaacatgaaattcaatgttgctaaagtcctgcaatcacttgtaccaatccttgaccaatctgttgtggagaagacagtgaaaccatgcctagttgagctcagtgaggacccagatgtagatgtaagatactacgcacaccaagcccttcgggcgtgtgaccaaatggtgatatctagttgactagcctgtccaggaattagcaaatgagatacatattggtctattctttttgaacattttaaagtgttatgtagtcttaaaaattattgtaccac

SEQ ID NO: 27885 - DNA, 2040 bp, Zea mays
  Clone ID: LIB4741-015-D12_FLI
cgggggcctgggctctgggctcgggcgtagtccagttgccaccaaccgagccagagagagaacaaagaacgggtgaaagaaatctcggaaaggttccagatttcctcgaggtggaggcctccttttcctcggccgaatcgctcgttcgctttctctctctctttcctcccatcgagcatgcattcttttctgctgctgcgaccgtaggatcggcgtccagcagcctcgccgcgtcggtatggttttcccttggcccacacatcctagctcttccgcattcttgaatttcgtggtcgaggattagggggtttctcgtgcgctggtccaatttcgcgctaatcgtcctgttcctgcctcggattactcgccttctcgtggtccccatctgttcttggcgttcgcacgcttgccgtgcggcgggcagggctgcagcagcagccggcagcgcgtgcatcttgcgaccccctttccaagaaccagctgcaagctttggccttttccgcctgccgtacccgaaatcccgcaagaaactccacccaagaaaaaagcggcgcccttttggctggctggctgccattcctcacgccccacgagtttggtgaggctttgaaacgagcacagttcacaagacagtgaggctgcggtgggtgtttcctcgtcggagatggagggaaatttgccgccgcaaaccatggtcccaggcggaggccccttcgatctggggcagccgttccacttcgccgtccaaccccaggcgctccaggtttaccaggatgtcttcgctgcccccgccgcgagccagatgccggagctcggcaatgtggtgaaggcctcgctgagcgacgaggaggagggcggcgacggccacctcgaccgcggcaaggcggcagccgccgcccagtggcaccgggtcaagtggaccagcggcatggtcaagctgctggtgtcggccgtgtcctacatcgacgaggacgtggacgcggaccacgggaccagcagcgggaggaggaagcacgccgtgctcaagaggatgggcaagtggaagctggtctcctcggccatgaccgagaggggtttcgctgtgtcgccgcagcagtgcgaggacaagttcaacgacctcaacaagaggtacaagaggctcactgagatcctcggccggggaagggcttgccagatcgtcgagaagccagagctccttgaacagttgagcctatctgggaagctcagggaggaggccaagaagcatctcaactccaagcatctgcactacgaggagatgtgctcctaccacaacaggaaccgctactgcctgcttgatgatcctgtccttcagaggtccctgcggatggcgcttagggctccagctgaacagggaaagcaatgcttgtttggctatgatgacgaggatgatcagatgttgctttctgatgatgatgatgattatgaggatgacgagttgaatgacgatctggaggccggtgctgaggatcatggtcctcacagagttcatgccaccgagaaactgaaacatgatcatgagggacattgtgggtctcatctgtcagaagttgcagccattgacatgaacagaatgaacttcgaaggatctggtggtccatcctctgagaagaatttaagttatatgcgtgttcaaatcgagaggcagcgtctgaaaataaaatctcagatgctgagaattgagcagaggcatttcaagtggctgaagttcagcaaggagaaggacagggagctgcagaaaatgaagctggagaatgaaaggatggcgctggaaaatgagcgattggagttggagctgaagcttaaggaaattgagataggcatcaaaccaaagaggatttagagattgcaggatgcaagtggcagagctagggaacttttagagtttctggtaaccattttatctattgtagtaccttacaaattaggatatgttacatagtttcatcttcgctaactgcatatcagttaagttaataactctgttggtttcaagcatttgcaataagtacagtttaccac

SEQ ID NO: 27886 - DNA, 2074 bp, Zea mays
  Clone ID: LIB4741-015-D2_FLI
gttttcgcttgactattattcttcgtccctgatttttatccccaaactcaccgccggggcacaacaggccagttctcctttcgccggaatctgtccctcctccccgcctatgtgggtactggaccaccgtggagcgggcattcatccaggctaggtccattccttcctttgctcgttctcttctccatcgcggaagctccacccgagttgacgccagaagagaatcggtgccctagggtgttctcgcagaattattttccagaagatttgcagatcgagtcgaaccctatgccccacgttaagcctgccgccggcctgcccccttaccaccaccgggcgctccctggccccgggcagggtccagttcccacgggacatgggatgatgcaccgggaggtccgtgatcagtacgggccgccggggccgaggatgcacctaccaccgctggggcacgggcccgctccgttcccctacgacatgctgcctccgctgcccccaccggaggtcctggagcagaagcttgtggcacagcacggggaaatgcagaagctggttatagagaacggccggcttgctgcaagccacgcctcgctgaggaaagagctagccgcggcgcagcaggagctgcagaggctgcaggcgcagggggaggccgcgaaagccgctgaggaggaggagatgaggggcctccttgacaaggttgggaagatggaggccgacctgaaggcccgtgagtccgtgaaggtggagctgcagcaggctcatgctgaggcgcagagccttgtggccatgaggcagaacatggtggcagacgtgcagaagctgagcaaggacctgcagaggaacctcggtgaggcacaccagctccccgcgctcttggctgaacgggatgttgcaaggcaagaaaatcagcatctcaggagtacttatgattacgaaaggaaactcagggtggatcactccgaatctttgcagacgatgaagaggaattatgactccatggttacggagcttgaaaaacttcgtgctgagttgagggacacatctaatcttgacaaaagtggttttttctacaatagcaccacccaaaaggccgatggtatatctagccatctttctgttggacaaattgcttatgatactggctatggaagtacacaggcaagggcaactcctaccggtctggcagacttaagtggagtccctggaggcgctggccttcgttctggatttgacccatcaagaggcaatgcatatgatggttctcatgttgccaatctcagctcttcaaaaactgggacccatgatgcatcaaggggtgccactggctttgactctctgaagggttctgggtatgatgcttcaaaggcgcatgtaactggacaggcgtcagctacagcggctcatgggggcattgctggttactacgggtccaatcaggcagcacatgcgtggggacaatctgcatcgccctacggatctgtacaggtgccaccatcctacgcatctgggtcaaacacatcctatggcgcagcagcagcagcagcagtgcgtccctatggttcagctcaggcgcaaccatcatatggacaaacgcaggcaccatctgcgtatgggcacacacagctaccatcatcctacagtctagcacaggcgcagtctcccttcaccgctgcgcaggggtcctcgccctatgggttggctgcgcagcctccagcctatggatctgggcgagcaggctccaatgctggcagttacgaagctcctcagggacgtaaataagttcgcgccaaatttgcatacttggccacttgcgaaagagagctttgttacaccgagtccaaatcctttctgttgctacttaaaccttgtttaactgtgatgacagaggaacctgttacagccgataaaacgattctctgtaaacgtatatcgtgatcgatgatgccgatgcattttttttttgttcagtagagtaggccatttgggaacgcagatttgagttgtgcgctattggttctgtatctggcttcactggttggttcataaccttaaattatgtttgtttaagttg

SEQ ID NO: 27887 - DNA, 943 bp, Zea mays
  Clone ID: LIB4741-016-A2_FLI
ctcgaggccggccgggaccgtcgcatccaatccaacggcattctggttctagggagcccgcaggaaggcacctctgcggcgaccagcgtgaagaaaggggatcggaacgcctccatctcaaaccccacgaaggcacgaaccctctcttcctaggttcatcgttcctcctccgcgtccttccttccctccgcagcgcggcgcggcgcggcgcgatgatacagctgctcttcacgctgctagcggcggagggcgccgtggcggcggtgctactcttcaagacgccgctgcggaggctggccgtgctcgcgctcgaccacctcaagcggggccgcgggcccgtcatggtgcgcaccatcgcggccaccgtgcttgtcgtgctcgcatccagtctccacagcatggccaagatccgcggccacgccgagggggagctcgacggctccggggtcgtggggctcacccccaccgaccaggtccttcttgcgcgacacctcctcgaggcgtcactcatgggatactccttattccttgctttagtcattgaccggctgcacaactatgtcaaagaaaatcgaaggctcaggaagaaattggaagaggtgttgaaacagaataaggcactagaagaagcaacaaatggaaagctagaagagagcaggcctgaccagaaagacctttcccatgccaaggataattaacaatgacatgcgctcaagaaactccctgccgtcactgcctatgcctgaataggatgccggtcactgatgttctccctgttgagaattagcattggtaaatgaatgctcggttacaacgtgctaaatcctttgcatctggccaaatttgtaaataagcactgggtgatgcccatcagtaaacacatgatgctactgctgttaaactaaatgtggcaaatttcataatgctaggtattgttctcggt

SEQ ID NO: 27888 - DNA, 1724 bp, Zea mays
  Clone ID: LIB4741-016-C6_FLI
aataccttgattgtccagttctgcttactagctccagtttccaaataaagcgctgctctttgtctccagatttcagacccaaaatcgatgggcaaaagcggaaagaaaccgagggaatcgcaccggcagggccgcggccggcgggcgtcgcacttctgcgacgaggacggctacgacttaccttcgtcagcctacgatgcgacgccgcgccaaaacgaggaatcctctgaagacaacgacgacaccagcgaagcaacagcggaggacgaaccagagagggatacggaagcaggcgagcaggaccaatggcaaggatcaatgccttccaagtttcacctataccagctctccgtgcagtcgccgaagggggacatcagctacttgcagaagttcttcctgatgtatgtcggcgggcgcgcccctctccacctgcaggaggatttctgtggcacggccctcctcagcaccgagtggatccgtactgatgcaagaaggacagcaattggcttagacttggatcttgagtcacttgagtggtgccttgaaaacaacctaagcaagattggagctgatgggtattcaagaatgttgcttttccatggaaatgttctacaaccaatggaatcccgtcttgtcaagcaaaagtttactaatcttgtgcatggtctagatttgaacagcaacaatggcacaggaagtaacagttgcaagcagatgggtcttgctgactcgaagtgcttagccaatctgaccatgtcagaggcagattttcctgcaagggatattatctgtgcattcaactacagctgctgttgcctgcatagtagaaaggacttggttttatatttcaggcatgtacgcagtgtgctctcggaaagaggtggtatatttgtaatggatgtatatggtggcatatcatctgaacgcaagttacgtctccagcggaaattccccagcttcacgtatttctgggagcaagatgagtttgatatcatcagtcgccaaacaaggatcagtctccactttcaaggcggaaagaaacagatgctgcgatatgctttcacataccattggcgcctatggtcgattccggagatcaaggactgcttggaggagtctggattcaagtgggtccacgtttggatgagggagatgccaaatacccagtcaggtggaaacgccaaggaatataacgccaaccgggacgtgaagtacgaagaatcgcagcatttcaaccaaggagatgcttggaacgcctatgtcgttggagtagcaaatgtctagccggtacgtgctgaattctgctacgaaaatgtgatggtgactctcagtttcccaagccaattaatgtttcgtggacgcttccgctttgatcacgacttctgcatcgcgttgctgcggaggaagtatgcagggtggctattaccggacccagagaacttttactccagaacacggcctcagtgatgtttctgttttcaaaatgaaatgctggcaacgtgccatgcctttgaatgtatttcctacgtatacggtgtgtaggatatgatgggtgcttcgacggataccgatactacctttcatgatagcttcgtatgcattaggggttggtatgcgattcgtgtttgggcgattgatcgtccggttggctaaccgatcggtcatacatctttctaccaaacggagctttcccgctataaaaagcctttcagcctattgtaccg

SEQ ID NO: 27889 - DNA, 1088 bp, Zea mays
  Clone ID: LIB4741-017-D2_FLI
ccaccctcgcccgccgcctctcgccctccaccgcgctcccgcgccgcttcctcctcggcgcccccacgaggccttccccgccaccgcctctgctgcggcgctgcctcccgttccacttctaccatatggcgcaatattggactcaaccatcactggacaggaacaaagctatggttgagtacctaaagcagtatggtgctgttagaactgataaagtgaaggaagtaatggaaacgattgatagagcactatttgtaccagagggtaccccttacattgacagtcctatgcctattggtttcaacgcgacaatatctgctcctcacatgcatgcgacctgcttagagctattgaaggatcatttgcaaccaggaatgcatgctctggatgtcggatctggtagtggctacctgacagcttgttttgccatgatggttggaccagaaggccgtgcagtgggaattgaacacgttcccgaaatcgttgcttcttctgttgaaaatgtgcaaagaagcgctgctgctccactattgagggatggatcgctctcttttcatgttacagatggcaggcttggctttccagacgcggcaccctacgacgctatccatgttggtgcagcggcacccgagatccctcagcctctgcttgatcagctaaagcctggcggccggatggtgataccggttggcacctactcccaggacctgcaggtggtggacaagaacacggatggatcattcagcgtccggagcgacgcggctgtgcgctacgtcccactgaccagccgcgccgcgcagttgcagggcccctaaataaggttctctatgttctgtacctcgaaatgcctgtacatatatatatatatggtggtcgctacgttcttacctgttcgtgtttcttcttctgagtagctaggtggtcttagtccgttcgtgtttcacgaacgacgacggtgaaaaaagagtggttttactgtaataagaaggatcgctagcatgtttctggtcggtggatgatgttttgaacgaacttccatctgtccgccgctgaggtgtgcatgtacaagtacaaactagccttgcacc

SEQ ID NO: 27890 - DNA, 1981 bp, Zea mays
  Clone ID: LIB4741-018-F2_FLI
ttctctgtgctctcggtctctccagcataccagccgccggcgccggcctactccgcccgacgcccctcctcccccaccggcgacctccacccgacgtaccttcttcccgcgccgccgcccaacgtccgggtcgcccccacgtatccatgccttaggtgccggctagcccctaggcaaggcggtacccctccgcccagaggcgcgcccaggcgagcgcagaagagcgccttgttgaacactgaccaggacacccgcctcaatcgcgcctcatccctctccctgattcccggtacacagctgcgcgaccgaggaccgaatccgtgaaccatgtcgaccagcaagggcagcgcagccaagggcggcggagggaagaagaaggaggtgaagaaagaaacaaagctcgggatggcgtataggaaggacgacaactttggggagtggtactctgaggttgttgttaacagtgaaatgattgagtactatgacatctctggttgttatatattgaggccatgggcaatggaaatctgggagctaatgaaagaattctttgatgcagaaattaaaaagctgaagctcaaaccatattatttccccttgtttgttaccgagaatgttctacagaaggaaaaagaccacattgagggctttgcacctgaggtagcttgggttactaagtcagggaaatctgacctggaagcacctattgcaattcgccccacaagtgagactgtcatgtatccatacttctccaaatggataagaagccacagagacttacccttgaggtgtaatcaatggtgtaatgttgttagatgggagtttagcaatcctactccattcataaggagccgtgaatttctgtggcaagaggggcatactgcttttgcgaataaagaagaggcagatgaagaggttctccaaatactggaactgtacagaaggatatatgaagaatttttagcagttccagtgtccaaagggaggaaaagtgagatggaaaaatttgcaggtggactttataccaccagtgttgaggccttcatcccaaacactggtcgtggcatccaaggcgcaacttcacactgtcttggtcaaaatttcgccaagatgtttgatatcacttttgagaatgagaagggtgttagggaaatggtttggcaaaactcttgggcctacacaacccgatcgattggagtgatggtgatgacacatggtgatgacaaaggcttagtattaccgccaaaggtggcaccaatccaggtaatcgtgattccagtgccttataaggacgctgacacaactgccataaagggagcctgcgaatcaactgtttacacactcaatcaatctgggattcgagcggatcaggacacccgtgaaaattactctccaggttggaagtattctcactgggaaatgaaaggtgttccattgagaattgagattggtccaaaagatctggcaaacaaacaggtacgcattgtccgccgggacaacggtgcaaaggttgacattccggtgaccaatttggttgaagatgttaaagtgttattggatgagattcaaaaaaatctgttcaaaacagcccaagaaaggagagatgcatgtgttcaggttgtcaactcttgggatgaattcacaactgctctgaataacaaaaggttgatcttggctccatggtgcgatgaggaggaagttgagaaagatgtgaaagctcggacaaaaggggaactcggagctgcgaaaacattgtgtactccatttgagcagccagaacttccagaaggtaccctgtgctttgcatctggaaagccagcaaagaagtggtcgttttggggccgcagctactgattgcccttgctgggagcccttttggattcagtagtgaaccatgtaacttcgagattttggatacaaatcggaaaatccatttacattgtttttacatcgacttgcagttctgatgtcatcacagttg

SEQ ID NO: 27891 - DNA, 732 bp, Zea mays
  Clone ID: LIB4741-027-A3_FLI
ggccggccgggaacccttcgctgcgccgccgcctccgacatcgtctcttcgtccccacgagcaaccgataatccgccggcgctgagatgttggtttatcaagacctcctatctggcgacgagctcctgtcggattcattcacctacaaggagctcgagaacggcgtcctgtgggaggtcgagggaaagtgggtcacccaaggtcctgttgatgtagacattggtgccaatccatccgccgagggtggtgaggatgaaagcgttgatgacacagccgtgaaggtggttgatattgttgacacattccgtctacaggagcaacctccttttgacaagaaatcatttgtctcttacataaaaaaatacatcaagaatctcactgctgtgttggagccagagaaagcggatgagttcaaaaagggtgtcgagggtgcaaccaagtttctccttagcaagctgaaggaccttcaattttttgttggtgagagcatgaaggacgaagcgtccgtggtattcgcctattacaaggatggtgccactaatccgacattcctctatttctctcatggtcttaaggagatcaagtgctagattagttacccatgttgggtactatatatgttctattgttatagccacaactatagctgccctgcctgaactgaactcaggttttttttaagaaaaaactgtccaagattggattgcttgttaaagctaaatattgttatcg

SEQ ID NO: 27892 - DNA, 1959 bp, Zea mays
  Clone ID: LIB4741-040-G12_FLI
aacacttcacaagcagctcaaagctctagctatagctagctagcaaaggggggaaaaaatggctccgcttctcgctgctgccatgaaccacgctgcagcccatcctggccttaggagccatctagtaggacccaacaatgagagtttctcacggcaccacctgccgtcttcttctccacagagcagcaagcgaaggtgtaacctgagctttactccacgatctgcaagagtaggcagccaaaatggagtccaaatgttgagcccctcggaaatcccacaaagggactggttcccctctgacttcaccttcggtgccgccacttcagcgtaccaaattgaaggtgcttggaatgaagatggaaagggggaaagcaactgggatcacttctgccacaatcatccggaaaggatactggacgggagcaattcagacattggagcgaattcgtaccatatgtacaaaacggacgtcagattgctcaaggaaatgggcatggacgcatataggttctctatctcttggcccagaatactgccgaatggaaccaaagaaggaggtattaacccggatggcatcaagtactacagaaacctcatcaacttgttgctggaaaacggcatagagccatatgtaacaattttccactgggatgtacctcaagcactagaagagaagtacggcggcttcctagataagagtcataagagcattgtagaagattacacatacttcgctaaggtgtgctttgataacttcggcgacaaggtgaagaattggttgacctttaatgagtcccagacatttacttccttttcctacggaactggggtctttgccccagggcggtgctcacctggactagactgtgcctacccaactgggaattcactcgtcgagccttacactgctggccataacattctcctagcccacgctgaggctgttgatctttacaacaagcattacaagcgcgacgacacccgcatagggcttgcgtttgacgtaatgggtcgtgtgccatacggaacatcgtttctggataaacaggccgaagaaaggtcctgggacatcaacctaggatggttcttagagccagtggttcgtggtgactaccccttctccatgagatcattggctagggaacgactacccttcttcaaggacgaacagaaggagaagctcgccggttcctataacatgttggggttaaactactacacctcacggttctccaaaaacatcgacatctcaccaaactactcacctgtgctcaacactgacgacgcctacgccagtcaagaagttaacgggcctgacgggaagcccattggtcctcctatgggaaatccatggatctacatgtaccctgagggcttgaaggatctccttatgatcatgaagaacaaatatggaaacccacctatctacatcaccgagaacggaatcggggatgttgataccaaggagacacctctacccatggaggatgccttaaatgactacaaaaggctagattacatccagcgccacatcgcaactcttaaggaatcaatagacttgggatcaaatgtgcaaggctacttcgcttggtctctgctggacaactttgaatggttcgccggcttcaccgaacgttatggcattgtctacgtcgaccgcaacaataactgcacgcgctacatgaaggagtctgccaagtggttgaaacagttcaacgccgcgaagaagcccagcaagaagattcttacgccagcttagaaatcgggggcctcatgatgtgggtgcagcccataaaaaactggtgtgtagtttggaaccgaaaattttctctgtttttgcgccacgagaggttctggaggcatactctccagcaccgtggctaataacgcattgttccaattcagtctggccttgtcatgcatgcaataaataaagtgatgggtttccctgtttcaatg

SEQ ID NO: 27893 - DNA, 1935 bp, Zea mays
  Clone ID: LIB4741-043-G8_FLI
acactgcacacgcctcatccttcgtccagacgcgcccacgcctccgctgagagaagaggttctgtgcgctccctcgcactccgcaagcacgccaacctcagtcgccagccagccagccatggcgtctgattccggccccgcctcctcggacccgctcctccacggccgccgcgcgccgtccacgggcggctggaaatccgccctcttcataatttgggtagaggtggcggagcggttcgcgtactacggcatctcgtcgaacctgatcagctacctgaccgggccgctcggccagaccacggcggcggcagccgcggcggtgaacgcgtggtcgggcgccgcgtccatgctgccgctcctcggcgccgccgtcgccgactcctggctcgggcgctaccgcaccatcgtcgcctcctccgtgctctacatcacgggccttgggatgctgacgctgtcatcagttttctcatcgcctcagcaatgccgtgactccgccgacgacggagaaggtatatgcccgccttcctcgcttcagacggccttcttctacgcctccctctacttggtggccatagcccagagcaggcacaagccctgcgtgcaggccttcggcgccgaccagttcgacgcgacagaccccgacgaggccgtgtcccgggcgtccttcttcaactggtggtacatggggctgtgcaccagcgccaccgtgacaattgcgctcatgagctacgtgcaggacaacgtcggctgggccctcggcttcggcgtgccgtccatggccatgctactcgcgctcgccatcttcctgctcggcacgaggacctacaggttctacggctcccgcggtggtgctggtgccagtgccagtgccagtgccagcgcgtcgtcccttttccgcaacgccttcgtggcctggaggaaaaggtcgcgtgaagtggagctgggacatggtgagctcgcccaggacgatgccgtgctcgcggaagaggtgaaggggctggcgaggctgttcccgatatgggcgacgtgcctgctctacggcgcggtgttcgcgcagccgcccacgctcttcacgaagcaggcggcgacgctggaccggaggatcgggcggtcgttccaggtacctcccgcggcgctgcagtgcttcctcggcgccagcatcgtcacctgcatcgtgctgtacgaccgcgtcctggtgcccgtgacgcgcagggtctccggcgccgcctcgggcatcaccatgctgcagcggatcggcacggggatcgcgctgtcccttgtcactctagtcgtcgccgtgctggtggagatgaagcggctgcgagcggcaagggacgccggcggcggcggcctggtggatggctctggcaccggcacggcggcggtccccatgagcctgtggtggatcgtgccgcagtacgtgctgctcggcgccgcggacgtgttcacgatggtcggcatgcaggagttcttctacgaccaggtccccggggcgctcaagagcctcgggctggcgctctacctcagcgtcctcggcgtcggcagcttcatcagcagcttcctcatcacggtgattgatgccgttacgacgaggaacggaggcaccagctggttcgccgacgacctcaaccggggtcacctagactacttctaccagctccttgcagcgctcaccgcgctggagcttctcgctttcgcttacttctcaacgtcttacgtttacaagacaaaggcaggcaatctctaatctccgtggacagaggcatgcatgtcagcatatgtatgtttattttagatagaaggattgcatggcagcgttcttcagtgtccttgcaaactacaaagtactagaggccatcgggaaattgtaaaatggaggtgtactacggtcacaagtggggcacaataataatgaagttacgtgcttcacaaagg

SEQ ID NO: 27894 - DNA, 1945 bp, Zea mays
  Clone ID: LIB4741-045-F3_FLI
aagcagctcaaagctctagctatagctagctagcaaaggggggaaaaaatggctccgcttctcgctgctgccatgaaccacgctgcagcccatcctggccttaggagccatctagtaggacccaacaatgagagtttctcacggcaccacctgccgtcttcttctccacagagcagcaagcgaagatgtaacctgagctttactccacgatctgcaagagtaggcagccaaaatggagtccaaatgttgagcccctcggaaatcccacaaagggactggttcccctctgacttcaccttcggtgccgccacttcagcgtaccaaattgaaggtgcttggaatgaagatggaaagggggaaagcaactgggatcacttctgccacaatcatccggaaaggatactggacgggagcaattcagacattgtagcgaattcgtaccatatgtacaaaacggacgtcagattgctcaaggaaatgggcatggacgcatataggttctctatctcttggcccagaatactgccgaagggaaccaaagaaggaggtattaacccggatggcatcaagtactacagaaacctcatcaacttgttgctggaaaacggcatagagccatatgtaacaattttccactgggatgtacctcaagcactagaagagaagtacggcggcttcctagataagagtcataagagcattgtagaagattacacctacttcgctaaggtgtgctttgataacttcggcgacgaggtgaagaattggttgacctttaatgagccccagacatttacttccttttcctacggaactggggtctttgccccagggcggtgctcacctggactagactgtgcctacccaactgggaattcactcgtcgagccttacactgctggccataacattctcctagcccacgctgaggctgttgatctttacaacaagcattacaagcgcgacgacacccgcatagggcttgcgtttgacgtaatgggtcgtgtgccatacggaacatcgtttctggataaacaggccgaagaaaggtcctgggacatcaacctaggatggttcttagagccagtggttcgtggtgactaccccttctccatgagatcattggctagggaacgactacccttcttcaaggacgagcagaaggagaagctcgccggttcctataacatgttggggttaaactactacacctcacggttctccaaaaacatcgatatctcaccaaactactcacctgtgctcaacactgacgacgcctacgccagtcaagaagttaacgggcctgacgggaagcccattggtcctcctatgggaaatccatggatctacatgtaccctgagggcttgaaggatctccttatgatcatgaagaacaaatacggaaacccacctatctacatcacggagaacggaatcggggatgttgataccaaggagacacctctacccatggaggatgccttaaatgactacaaaaggctagattacatccagcgccacatcgctactcttaaggaatcaatagacttgggatcaaatgtgcaaggctacttcgcttggtctctgctggacaactttgaatggttcgccggcttcaccgaacgttatggcattgtctacgtcgaccgcaacaataactgcacgcgctacatgaaggagtctgccaagtggttgaaacagttcaacgccgcgaagaagcccagcaagaagattcttacgccagcttagaaatcgggggcctcatgatgtgggtgcagcccataaaaaactggtgtgtggtttggaaccgaaaattttctgtttttttccgccacgagaggttctggaggcatactctccagcaccgtggctaataacgcattgttccaattcagtctggccttgtcatgcatgcaataaataaagtgatgggtttccctgtttc

SEQ ID NO: 27895 - DNA, 1914 bp, Zea mays
  Clone ID: LIB4741-045-G6_FLI
ggccggccgggacacagacacacaaacacaagtcgtcgtaggcagcgagcgtctctcctctcccacgcatcgcgccaaggaagagagagagatcgccgctccccttctcggcgtcggtggtgcgggtgccctccctcctcgagcgagatctgtctggtcacagatctatctgacaaaatggtgaagatctgctgcatcggtgctggctatgtcggtggcccaaccatggccgtcattgccctcaagtgcccagacattgaggtcgtcgtcgttgacatctccaagccccgcattgaggcctggaacagtgacaccctgccaatctacgagcctggtctcgatgatgttgtgaagcagtgcaggggcaggaacctcttcttcagcactgatgttgagaagcacgtcgctgaggctgacattatctttgtctcggtgaacacccccaccaagacccgtgggcttggagctggcaaggctgccgacctcacctactgggagagcgctgcccgcatgattgcggatgtctccaagtctgacaagattgttgttgagaagtccactgtccctgtcaagaccgctgaggctattgagaagatcttgacccacaacagcaagggcatcaactaccagatcctttccaacccagagttccttgcggagggcactgccattgaggacctgttcaagcctgacagagtgcttatcggtggccgggagacccctgagggcaggaaggccgtccaggctctcaaggatgtgtacgctcactgggttcccgaggacaggatcctcaccaccaacctgtggtctgctgagctctccaagctcgctgccaacgcgttcctggcacagaggatctcctctgtgaacgccatctccgccctctgcgaggccaccggcgcgaatgtgactgaggtggcttacgccgtgggcaaggacacgaggattggccccaagttcctgaacgccagtgttgggttcggtgggtcttgcttccagaaggacatcctgaacctggtgtacatctgcgagtgcaatggcctgcccgaggtggccaactactggaagcaggtgatcaagatcaacgactaccagaagagccggttcgtgaaccgcgtcgtgtcgtccatgttcaacaccgttgccggcaagaagatcgccgtcctcggcttcgccttcaagaaggacaccggcgacaccagggagaccccggccatcgatgtctgcaagggcctgctgggtgacaaggcccagatcagcatctacgacccccaggtgacggaggaccagatccagcgggacctagccatgaacaagttcgactgggaccacccgatgcacctgcagccgacgagcccgacggccgtgaagcaggtgagctgcgtgtgggacgcgtacgaggccaccaagggcgcccacgggctgtgcatcctgaccgagtgggacgagttcaagaccctggactaccagaagatcttcgacaacatgcagaagcccgccttcgtcttcgacggccgcaacatcgtcgactccgagaagctgagggagatcggcttcatcgtctactccatcggcaagccgctcgacgcctggctcaaggacatgcccgcggtcgcctaatcccacccccctcacccatggattggattccgggaaggaagaggagagaagctggttgaccgttctttattacagtttgtttttgcaggctacgctaccgattttctcttgtgtcaggcataaaaaaaggttggacgggctgctagtattccctgctgtttggtgttttcgtatcggaggacgtctgtagatgtacaattcctcaggccccttgtgttcggcttgaggaagtttccgttgtaccctggacctgctatagccggttgattcttcaattgtattcctataagttat

SEQ ID NO: 27896 - DNA, 1275 bp, Zea mays
  Clone ID: LIB4741-053-H6_FLI
ctcgaggccggcccaatttcttggtgaggtctacgtgaaggtagtggaacgagatcaccttccgagacgagaaaggaatcactcgttttcctccgggcacattcctccgagttcggacggcaacgccttttatggccgccgttgcctcctccttctcgcggttctccttccgctgcgccgtctgcccctccccgctccgcgtccgcttttcgcagccccatccgcccgcgcggctccgcgtctcctccaccgtcgttgctctccacaagcgcaaccccaagcggctcaagtacgccgccgagcgccagttcacgagaggggatgccgggttgctgcgggtggaggtggagccctccggcggggacttctggaagcttgaccccattatcgacctcatcaatcgcggcgccgtcggggtgatccctactgacaccgtctactccgtcgtctgtgacctgagtaacaatgaatcgattgagcgccttcgcagactgaaaggcattggagactccaagcctctcagcatcctgtgtcgctcattacgtgacatcgatacctacacaacaggatttcctcaaggcactaaccaagggcaagctaacatttttcgtgttgtcaagcgtgcaatacctgggccttacacatttattttacctgcaagcaagcagtttcctaaacaatgtataaagcatggttcttccacaaggtatgcaaaaaggaggcaggttggcgtccgaattccagatgatcccatctgccaggcaatattgcaaaatcttgatgaacctttgatatgcacaagtgtcaaatatctatcggaggatgaatggatacttgatccagtaatcattgcagatctttatgagccactggggcttgattttattgttgatggcggacctagaattgctgacccttctaccgtagtagatatgatgggagcaaaccctactgtaattcgtcagggaaagggtctaaagttggattggatggtagcaaaagatgaagaggaggacgaggcacagtcgatgttttctttcaaatcagcttgaaatttgcttcgcctgacctgtatgggctggcactttgctatggtcccccaaccgaagcgtcttctttcaactgcatataggatgtcagttgttagctgtaagcatagatgtcgaacacgaactgcgtgctgtaaatatgcaaggcgatgtaagcgaactggcagaatttgctcagtagcaacctttgctggaggtgatggaaagtttcctgctggttttctcg

SEQ ID NO: 27897 - DNA, 733 bp, Zea mays
  Clone ID: LIB4741-054-F8_FLI
ggccggccggggaaaatttcatgcgttccttatcttccgttccgctcggaagtctctctaccaccttctccccattccgctgttccgccctctcgcgtcgcgtgcctccaggtccctcctctgcgtaactgggtggccgccgatccgccgccaccgccctgcgtcaggtgttccggtgacaagcgtccacctgatgttggaataccaaaacgcaattggggggagactgaagctgaagggtaaagcgctggacgtaaaggatggtggggtgaagaaaaagaagaagaagtaccagcgtgaggagtcgtctcagattgcgcacgatgagctccacaaaggggggagatctgaatcaccaattgatcccaacaatgagcggattgaatctgacaagaccggagatgaagggaacccacatcctgactatggccatctcacaccagcagagcgacgctacatggaacagaagcagaagatcgacatgcagaagatggccaaagccgccaacaagtcccatagagaccgcatccaagacttcaatcagtacctggcaaacctaagcgagcactacgacatccccaaagttggtcctggctaacatagccaaactggctgtgttacgcacaacaattgtgtgctgggtctatccatttatgttagcatgttatgtatcgtttaaaacgatttgttgccaccagaaattgatatttaatttcaaaagcatgttccaacc

SEQ ID NO: 27898 - DNA, 1180 bp, Zea mays
  Clone ID: LIB4741-058-C3_FLI
ggccggccgagaccatcggaattggatcggagtggaacaagatggaaggtttctgcggcggcgacagcgagctggacgagcaatccaaccaggagccggcgttcgaggccttcatgtgccctctcaccaagcaggtgatgcacgaccctgtcaccatcgagaccgggcagaccttcgagcgggaggccatcctcaagtggttcagggagtgcagggacagcggaaggaagccgacgtgcccgctcacgcaggcggagctgcgcagcaccgacatcacccccagcatcgccctgcgcaacgtcatccaagagtggagggcgaggaacgaggacaaggagctcgacaaggccatggcttccctcaccgccacacaggaggctcaggctcaagacgacgacgacgacaccctgcgcgccctcctctacgtctcccgcatgaagaagaccctcgtgcgcaggcaaggcgtcatacccaccatagctgacctgcttaagagcagcagcagaagggttcggctcaaggccctccaagtccttggtgtcatcgtcgaggaagacgatgaaaacaaggaagagcttgctaaaggtgacaccatacgcaccatcatcaagttcctgtccaatgagaatttccaagagagggagcttgcagtgtcgctattgtacgagctctccaagttcgaccctacatgcgaaaggatcggcgcaatctacggggccattctcctgctggttgggatggccagtagcaaatcagagcacggtgtggctgtggagaaagcagagaacacgctcaagaacctggagaagtacgaaacaaacgtcaagcagatggcagagaacggcaggcttcagcctctgcttaccaaactcatccaaggtccaccccaagtccagctcgccatggctgaattcctcggtgagcttgcgctggccaacgacgtgaaggtccttgtggcggagcaggtcggtgttagctactggatgctactggaattcgagggagagaagatcagagaagagagtagcgtgtgggagagaataacaggaagatgtgatagatgtattcctttacccaaattcttcttgtccgattattacagactcatagtacttatactacactgagacgcagcccacactcatttggcccactcgcctaaagctagaactcatttggt

SEQ ID NO: 27899 - DNA, 1011 bp, Zea mays
  Clone ID: LIB4741-069-E12_FLI
actcgaggccggccgggctctctgtctctctagggtttttgattttagccgccgccgctgctcatctcacatccctcgagaagacgcctgctcctcgccgatcgatacgatggccgtcttctccgacctccacaccgccgacggcctcaagtccctcgaggctcacctcgccggcaaaacctatgtgtctggtgactccattactaaggatgacattaaggtcttcgccgcggtgccgtcgaagcctggcgctgagtttcctaatgccgcccgctggtacgagaccgtctctgcggctgtagcctcaagattccctggtaaggctgttggtgtaaatctgcctgcgggatcagctcctgcggcagctgctcctgcggatgaggctgaggacgatgatgaccttgatctttttggtgatgaaactgaggaggacaagaaggcagctgatgagcgtgccgccgctgccaaggcctcttctaaaaagaaagaaagtggtaaatcctccgtccttatggatgtcaaaccatgggacgatgagactgatatgaagaagctggaggaggctgtccgcagtgtccagatggagggtttgacttggggagcatcaaagcttgtgcctgttggatacggcatcaagaagatgactatcatgttgacaattgtcgacgatcttgtgtccatcgacactctaattgaggaccaccttacgcaagagcccatcaatgagtacgtccagagttgcgacattgtggctttcaacaagatctagagttcagtttctgagtttgggcaacggcagcggctcagctcgtcaagtttgtgctgggatgccagtttatcccttctagtctattacagaaatgttgttcggagctgagtctattataaacatcttggtctgagtttattgttgagtggtgccagtttttttcaatatacatttatcttaaaaacagcggtactgatgtttttttgtctaaagttaatgagtttgcaatggttctgagtctg

SEQ ID NO: 27900 - DNA, 1224 bp, Zea mays
  Clone ID: LIB4742-001-E4_FLI
ctcgaggccggccgggctgccctcccctcctgcagcgcccgtcgcctccctttccccttccctccctccctctccccgcgggccgccagaggcaatttcgccctcgattcgaccccgattcgtccgcccgcgaccgggattccctccgccaagcgcggatctgaacgctgcgctccgtgtcgccgctcgaatccgccatgaagggggccaaatccaagggcgccgccaaggccgatgccaagtaagaaaaacgaatctccggttctcttcttccttgttcgtcccgtggatctgttccgtggcgtccgaagcattcgatttctgttattatgacatccgccgccgcgagtagattttgacctttttttttcccgtcgtcgttgttttgctgtcgctgtctctgtcgtcgtcgtcgtcgactcgattgctttggcatctgcaggctggcggtgaagagcaagggggcggagaagcccgccaagggcaggaaagggaaggccggcaaggaccccaacaagcctaagagggctcccagcgctttcttcgtgttcatggaggaatttcgcaaggagttcaaggagaagaaccctaagaacaagtctgtcgctgcggtggggaaagctgctggcgacaggtggaaatccctgagcgagtcggacaaggctccctatgtagccaaggctaacaagctcaagctcgagtacaacaaggccatcgctgcctacaacaagggcgagagcactgcagctaagaaggctcctgccaaggaggaagaggaggaagatgaagaggagtctgacaagtccaagtcggaggtcaatgacgaggatgatgaagagggtagtgaggaggatgaagatgatgacgagtgatggagctcctcgagacaatggaccgtgcttcatccaacaatggagcggctacacaaggccccgtggcgatcacaaaaaaggagcctatatccatgtactagaattattcagtttcactccacatcgtgatgttttatttttacttttgtcgtgctataacggatagcgctcctcgttggcgccactggcgggtggttctgcctctggtctggtgtgtttgtgtgtggtcacacttgccagccagcagaggcgcctgcttgtacctagattactgtttccattgtcgtcatcatcggctaacattgtcataatgtcagtttgggtaatgttagattaagtaattattgtgttc

SEQ ID NO: 27901 - DNA, 1263 bp, Zea mays
  Clone ID: LIB4742-001-H11_FLI
ggttcggccggggagtcgtgagtagtgactcgtctggtctcccctctctcgtccgtctggtcctcccgtccagaggcgttctctctccctccccctttcctctggtcatcgcacccgtctccccgctctgactccgcccgcgccgccggctcccggcacggcccccaggcttcatctccgccgccgtcgccgccgcatcgctccgatcgacccccgaaactccggaaaccgtgggcttcgcgagatggatctcaaggatagcctctccaaatttaagcaacagcaggagagatgccagtcatcactggcgagcatagctgcttcgacctcaaagccaaagcacagggcccaaccagcgcatgctcccaacgtcccagcaagaccatcacaacctattaagttttcaaatgatacagaaaggctgcagcacatcaattcgattaggaaatctcctgttggagcacagatcaagcttgtcatcgaacttctttacaagacaagacaagcttttactgcagagcagataaatgaagcaacttatgttgatattcatggtaataaagctgtctttgacagcttgagaaacaaccccaaagtaagctatgatgggaggcgtttctcttacaagtccaagcatgacctgaagggaaaagatcagctgcttgttttgattagaaagttcccagaaggtcttgctgttgtggaagtcaaggatgcatattcaaatgtattggaagatttgcaggctctgaaggctgctggtgaggtttggctgttatcaaacatggactcccaggaggacattgtatacccaaatgatccaaaagcaaagatcaaggttgatgatgacctgaagcaactcttccgtgaaatagagctgccacgtgacatggtcgacatagagaaggagctacagaaaaacggtttcaagcccatgacaaatactgccaaacgacgagcagctgcccagatcaatggcgtaaaacccaaggctaagcccaagaagaagcagcgtgagatcacaaaacggaccaagctcacgaatgcccatctgcctgagctgttccagaatcttaacacttaaacgtgctacagtatctgacgacggaagatggttcatttcactcctatatattgctacgttgtgtgtacgtgttatgcagcctctgtatgctgtatggcttatggttatgagctccacaatttctgtcaagattctggatgatatacttatgcattctgacataataggaggcaaaactt

SEQ ID NO: 27902 - DNA, 1825 bp, Zea mays
  Clone ID: LIB4742-002-E2_FLI
gggtaccctcgaggccggccgggaggcccggccctcggcttgatcccagcctttcttctcccgttcacagttcaccccaattgctctctttctccccagtagcaacggccgcgcatcctccgccgccgcactaaaccctactccatgtacccaggtctgcgtcgggcccttgccggcgatgagaacccgtcagttccaaagatggctcgtcgtggattgatggaacaggacttaagcaaactggatgtgacgaagcttcaccccctgtcacctgaagttatctcacgccaagcaacaatcaatatgggtaccattggccatgtggctcatggaaagtccactgttgttaaagctatatctggtgttcagactgttcggttcaagaatgagctggaacgtaacattactataaagctgggttacgctaatgcaaaaatctacaaatgtgaggatgacagatgtccgcgaccaatgtgctacaaggcctatggaagcggaaaagaagatagccctctatgtgatgtgcctggatttgaaaacactagaatgaaactcctgagacatgtttcttttgttgattgcccgggacacgacattctcatggctacaatgcttaatggagctgctatcatggatggagctcttcttttgatcgcagcaaatgaaagttgtccacagccccagacatcagagcatcttgctgctgttgaaatcatgcgtcttcaacatatcatcattctgcagaacaagatcgatcttatccaggaaagcgcagcgatgaatcagcatgaagcaatccaaaaattcatccagggaacaatagctgaaggtgcacctgtggtgcctatatccgcccagctgaaatacaacattgatgttatctgtgaataccttgtgaagaaaatccccatccctgaaaggaactttacctcacctcccaacatgattgttattcgctcctttgatgttaacaagccaggttcagaggtcgatgaaattaggggtggtgtagctggtggtagtattctcaggggagtcctgagggtgaaccagaagattgaagttcgccctggcattgtcatgaaagatgagactggaaacatcaagtgcaccccaatctactcaaggattgtctcactgtacgctgagcagaatgaactccaatttgctgtcccaggagggcttattggtgtgggaacaaccatggacccaactctaacgcgtgctgacaggctggttggccaggttcttggtgaagtaggttcactacctgatgtttacgtagagcttgagatcaatttcttcctactccggaggctgttgggtgtgaggacgaaaggtacagagaaggcagggaaggtgtcgaagctcaccaagggtgagatcctcatgcttaacatagggtccatgtccacaggcgcccgcgtggtcgctgttaagaacgatcttgccaagctacagctcaccgcgcctgtctgcacgagccgaggagagaaggttgctctgagccgtcgcgttgagaagcattggcgcctcatcggatggggccagatccaggcaggtacaacacttgaagtaccagcgtgcccggtgtaaagcgtcatactcagacgtgagctgaagttgagtgcaaaagagaaaaaaaaatgagtttgttgttagtcctgtccctgcgttactgcagatccaaagtcctgggtcactctaattttattttgtttcgttcaattttggaggccgtttgcattatgactcctgtgaacattaccaggtcggaaacaagtattgtgaactttatgagtacggcatatggatcagcattgtc

SEQ ID NO: 27903 - DNA, 1657 bp, Zea mays
  Clone ID: LIB4742-002-F4_FLI
ctcgaggccggccgggagcatttcgatcccgacaccccaaaatccctcagccctctggcctcggcggcgctcaaaccttcgccgtcccgccgtctccaaaaccctcttaccatggccgccgcgacaaccgcgggggccggagccgcgacgccgcagccgccacggcagtacaagctagctccgcagagcgagctgcgcgtggaggtgctccccgacgcgcccctccgagtgcgcctcgtcactggcaccgcagagatcttcggcaccgagctgcctccggagggctgggtccccgtccctccccgatccaagatcgccattttcacctggcacggcgcgacggtggaactggacggggtgagcgagagcgagtacacgtctgacgagactccaatggtaatttatgtcaacacgcacgccattctggatgcccgcagggcaagggcgagaacagccgcagctcaggggggcgataaggaggcatcacagggacctagagtgattgttgtggggccaacagattctggaaaaagtactctctgcaaaatgcttcttagctgggctgccaaactgggctggaagcctacgtatgtcgatttagatattggccagggatctataacgatccctggatgtatttctgctacaccaattgagaaacctatagatataattgatgggattcccttggagatgccactggtatacttctatggtcacccaaatccaagtattaatgcggatgtttacaaagttcttatgaaggagctagctaaaacattggagaaacagttctctggcaatgctgaatctagggcagcaggaatggttatcaatacaatggggtgggttgaaggccttgggtatgagttacttctcaacgcaattgaaaccttcaaggccaatgtagtactggtactgggacaggagaaactctggaagatgttgaaagatgcagtacaaagcaagtccaacattgatgttgtaaaacttcataaatcagagggtgttgtcctcagaaattcaaaatatcggcaaagaacgagaagcttccgaatcaaggaatacttttatgggattgcaaatgatcttgcaccgcactcaaacattgtcaatttcagtgatgtctcggtgtataaaatcggtggtggccatcaagctccccgttcagcattacctatcggtgcagagcctgtggcagatcctactcgacttgttgctgtcaacatcagcacggatatgatccatacagtgcttgcaatttcctatgctaaggaacctgaagaaataatatctagcaatgttgccggattcattcatgttactgatgttgacatccaaaggaagaagctgacgtacattgcaccttgcccgggggacttgccaagcaggttgttgatcgcgagttcacttacatggtatgaagcgtgatcagtctaagttagatgggccatatgcccatacgcatgttgtaaagccaggacatgtgacgttgggactgagcgttcgatgtctactgctaaccaagagaaacgatgcaaggacaaatatcttgttccctcgtgatttgctgtgttctcgtttcttctcttattatacgccaacatctacggtgcggttgagataacaaatggcgtggtggtttgagaaatgaggt

SEQ ID NO: 27904 - DNA, 1529 bp, Zea mays
  Clone ID: LIB4742-002-F5_FLI
atcgaggccggccgggacaactcaagcacacgaatccaaacaacacgaaccggcagttcagctaacaactacttcctagtataaagtgacagtagcgggggagaagggaaccgaaaccaagcaacccaatccaaaccagacaagcaaggaatcccccgatggctcatcgcgttctcctcctcctctctctcgcgtcggccgccgcggttgccgccgccgtcgacgcggaggacccgctgatccggcaggtggttcccggtggagatgacaacgatctggagctgaacgcggagtcccacttcctgagcttcgtgcagcggttcggcaagtcctacaaggacgccgacgagcacgcgtaccggctgtccgttttcaaggccaacctgcgccgcgcgcgccggcaccagctgctggacccgtcggcggagcacggcgtcactaagttctccgacctcacgccggcagagttccgccggacctacctcggcctccgcaagtcccggcgcgctctcctcagagaactcggggagtcggcgcacgaggcgcccgtgctccccaccgatggtctccccgacgatttcgactggagggaccacggcgccgtcggccccgtcaagaaccagggttcgtgcgggtcgtgctggtcgttcagcgcgtctggagcgctggagggtgcgcactacctcgcaactggcaagctggaggtgctttcggagcagcagttcgtcgactgtgaccacgagtgtgattcatcggagcctgattcatgtgattcgggttgcaatggtgggctaatgacgacggcattcagttatctccagaaggccggtggccttgagagtgagaaggattacccttacactgggagtgatggcaaatgcaagtttgacaagtccaagattgttgcttcagttcagaacttcagtgttgtgtctgtggacgaggctcaaatttctgctaacctcatcaaacatgggccattggcaatcggcatcaatgctgcctacatgcagacatacatcggaggcgtgtcatgcccatacatctgtggcaggcaccttgaccacggtgttctccttgttggatatggtgcttctggtttcgcccccattcgcctgaaggacaagccttactggatcatcaagaactcgtggggcgagaactggggggagaacggatactacaagatatgcaggggttccaacgttcgcaacaagtgcggcgtcgattccatggtctctaccgtgtccgcagtccacgcctcgaaggagtagactctggtcagcggtgataatcgtgattccatatattgtagaactataatccctgctagtaatccatttgtgctgtttatgtatcgaaggcagcaaagatgtgtgaagcggcaatgggatgcttgctgtaaggtaatatgtttggcttgctaggcatgctacacgctatttggatgtagcaacgttatcaccagctgtatacgctttttaatcgacaacatttgaataatatgtacataacattatgttgtgctt

SEQ ID NO: 27905 - DNA, 1689 bp, Zea mays
  Clone ID: LIB4742-002-H9_FLI
ccggccgggatagccaacccttttgataaagaaacgggcctacactacacgggacacctgcctcctcttctcccatctctccctcttcccctctccctctcgtggccacgactgccgctgccgccctacgccaggtgtccaggtcatctccggcccattcgccggcgacgagcaccccactagatcgaccgagatatggacggcctgtggcatctgggggacgagctccgcgggcagcccaaggtggtggaggaccgccagtggtcgctcatgacgtccaagctggcagagatcaccaggtccaggggcgagaggacgaacgacctcgactacgccaggatgaacgccgcccccgacgccaagcggtggggcaaggcggcgtcctaccagcaccatgacgagggcaggatggaccaccacgtcggcctcagcctcaagatgaacgatctcaagatgaacgaggccgccgctgccgccgtcatgaagctccccttccgcggcgtgccctacaacgtcaacccgatgtaccccaaggggagcaacgccaacgccaatgtcaacgcgttcaagatgaatgtcggggtgaacaagtactccagcagcgcgaacgggaaagacgccggcgggaaaagcagtggcggcggcagcaacaacaacagcggcggcggaggcaacggcaatgggaccgccaacggcagttccgcggtcgacaagcgcttcaagacgttgccgacgagcgagatgctgccgaagaacgaagtccttggtgggtacatctttgtctgcaacaacgataccatgcaggaggacctcaagaggcagctttttggattgccagcaagatatcgtgattcagtccgggcaattactcctggcctgccgcttttcctctataactacaccactcaccagcttcatggggtatttgaggctgccagtttcggtgggtctaatatcgatcccactgcatgggaggataagaagtgtaaaggtgaatctagattcccagcgcaggtgaggatccgcgttaggaagctctgcaagccgttggaagaggattccttcaggccagttttgcaccactatgatggtccaaagtttcgcctcgagctctccatcgcggagaccctgtccctgctagacctatgcgagaaggaaggcatctgagctgttggctgcctcgtgaggttctagtaaatatcaatcatccttgtatgttctgtagatggtggttggcaatgttgtttatttttcaagcgcaagctgctgccggtctcgttttccctgtcctggatggaagcaaagggacctggtactttgaaggccccccctcaaacataagctgtgagcctgtcagtgcacgtgtccgccgttgtcgtcaagaaccaaaccaaatcatgaaatcttgcgccgacggagagttggagcgtgtatgttttgctatctctatctacatgtctcagtagagtggatataccctggggtccccaaaagatgggggcctcaggcctgtatgtaacactacgtgtaatggttaaggtgaatgtgccgtgaggccccccaaaagttggagtgtgtatttttgttgtcaccttgaaccgactttgcgtatgctttttttagtgctgctaccttttgcgctgtgtttggcttctggttcatgtttttgtaatataaggtggcttgcgg

SEQ ID NO: 27906 - DNA, 1529 bp, Zea mays
  Clone ID: LIB4742-003-G8_FLI
ctcgaggccggccggatccactcccactcggccactccccatgctttccttgcgcaacccagccccggcgccccgctgacctggtcgggtgcgcctccgcagctgccgctccggtgcccccaggccgcaggccgctgtcctcctgtgatgccatggtgatttggagttgctcttcttgtctccatggattcattcccagagcggcatggaggaggcactacccactcttgtctcccaggcctcctgcatcgccgccgcctatccaccacttctcctccgctagacggtccaccaagaaatctgccccaaaggcgccaatgggctcttccattcctgccgcaaaggcgctaatagactcttccagagagcccttctatgtcatccgcaagggggatgtcattggcgtctataagaacctcagtgattgccaagcccaagccagcaaatcggtacttcatccttcagtcactgtctacaaaggctattctctgcgtaaagaaactgaggaatatcttgctgcacgtgggttcaggaacgctgtctgttccattggtgcagcggatgcaagtgacgaattgtttggcgatctggttccctgcccttttcagcaacctgatgagaacacacaatctattttgaaaatgtcacagggacaggagatggaaacaagatcatcagagcatcccaaagttgctgatctggaaccattaccagatagcgaactctcttctattcttgaatttgatggagcttgtaaaggaaatcctgggaaatcaggtgctggagtcattattcggcggttagatggatctgtgattgctgtactacgtgagggtttgggtattatgaccaacaacgctgctgaatatcgtgcattgatcctggggctaaattatgcttccaagaagggattcaagtatattcgttgtcaaggtgattctaagcttgtctgtaaccaggttcaaggtgcctggcgtgctaggagcgataatatgtctatcttgtgcgatatagccaaggaacttaaggaaacattccttacatttcaaatcaatcatgttttgagggaattcaactccgatgctgacgttcaagctaactttggatgccaacttgctgttgatgaagttcaagagctgtccgtttgaattgccattggcagagaaaacaagacacggtgcttgagagtagactgttaatcaatactaattgacccacatgatcatatcacagggtgcaaagagctgtttcggctttttccaagagctgtttcgtttttaccggtaaaaagatggattggaaagaggagaaactggtagagagccacaagttctagcttcatgggctctgtgcgctgctaaagtaacaaacaacacgtagccgaagcaggtgagatatgcaccaagacctgcaatattttgctgttggtttggttttgtgttgccatgaggattgaggagcttgattctttgtacatgcaattgtgaactgaattgaagtatacttaactcacaaatacatgatttcat

SEQ ID NO: 27907 - DNA, 686 bp, Zea mays
  Clone ID: LIB4742-007-A2_FLI
atcgaggccggccgggatcgccagacacactagaccacagccagtcaaccacatcactagctatctgtgcagaggcaatggcgtccaaggttgagctggtggttgaggtcaagtccccggctgacaagctgtgggcggcgctgcgtgactcgacggagctgttccccaagatcttccccgagcagtacaagagcatcgagaccgtcgagggcgacggcaagtcggccggcaccgtccgcctcctcaagtacaccgaggcggtgccgatgctgacgttcgccaaggagaagctggagacggcggacgacgagaacaaggtggtgtcgtacagcgtggtggacggcgagctggcggacttctacaagaacttcaagatcacgttgaaggtgactccggccaaggcggagggcgagggcggcgccgtcgtcagctgggccatggagttcgacaaggccaacgaccaggtgcccgacccggacgtcatcaaggagacagccaccaagacgttccacgacctcgacgactacctcctcaagaactagatggagcgcgagaactggagatggtccagtacagtacagttccagtccattcatcggcgcgtcacagtttactagtgcacgttgctcggttgctggtgtggtgtggtgcccgtgctggttccttaagttgcttgctagctagct

SEQ ID NO: 27908 - DNA, 1112 bp, Zea mays
  Clone ID: LIB4742-007-F9_FLI
tccgaggccggccggaccccgcatctcctagccccagctagtagatcattggacacatatcgaaacagctctctagctagcgcgctcgtcgtctaacctggcttccggcatggcttccaagcagatcggagtcttgacctgcttcattgccatcaccgctctcgccttccgtccctgcgcatccgccgtgcccatggacggcggctggtcgaacggcggcgccacctggtacggccccgccaagggcgctggatccgacggtggtgcgtgtgggtaccagggtgccgtcgaccaacctccgttctcgtcaatgatcaccgccggcagccaatccatcttccaggacggcaagggctgcggcacctgctaccaggtgaagtgcaccggacacgagtcgtgctccggcagcccggtgacagtggtcatcaccgacctgtgccccggcgctgcgtgccaggcggagcccgtccacttcgacctgagcgggacggcgttcggtgccatggcgaagcccggccaggccgaccagctccggaacgccggccgcctgcaagtccagtacattcgggtggcgtgcaactggaacggcttggacatcgccttcagggtggacgccggctcaaacgccaactacctggccatggccatcgagtacgagtccggggacggggacctgcgcgccgtggaactgaagcagagcggcgcggcggcgtgggcgcccatgcaacgctcctggggcgctgtgtggcagtacaagtccggctccaccaatctgcaggcccccctgtctgtccgcctcacctcgggctccggcagggtcctcgtcgccagcaacgtcatccccgccggatggcagcccggcagaacctaccgctccgtcgtcaacttcggaggaaaccatgcataacgagtgatattaaggatgtcgtgtgcagatgtctccatctaagatgcatgcatatatgatctgtgtggccagctagctgctagaccatctcactccctgagtctgctgatgctcagccaataatgaatcattccatctcgatcggaaattcaacatatataataatgcaagcaccggaaataaaattctactgtgttctgtgacg

SEQ ID NO: 27909 - DNA, 1079 bp, Zea mays
  Clone ID: LIB4742-008-B12_FLI
ggtcggccgggcaaaaccatatcccgcatccataatactctgttccactccccacatcccactcccatctctcccgtttctctacacttcctgacccagatggcggcggcaccctgctctaccaccttctccggcgacgtgtgggcggagctgcgcctggcctccgccagcgatgtgccgcacatccaccgcctgatacaccagatggccgagttcgagctcctcaccgacctcttcgccgccaccgaagagctgcacacctccacgctcttcccctcgccgacgccgcctcccttcacctccttcacagccctcatcctcgacctatccccctcccccgtcgcccccgacccctcgtccaccatcgcctcccgccgcctcgacctctccgcgtccccgctcgcggaccccgaggccgccgccttcgcctccccgcgcggaggcgggcgcgtcacggccgggttcgtgatctgcttccccaactactccaccttcctctccaagcccgggctgtacgtggaggacatcttcgtgcgcgcgccctggcgccgccgcgggctcggccggatgatgctgtccgccgtcgccggcagggcggccgagctcgggatgggccgggtggagtggtgcgtgctcgactggaacaagaacgccatcgacttctacgagggcatgggcgctgacgtgctcccgcagtggcgcatctgccggctcgccggcaaagcgctggacaagtacaaggggtccgccggcgggaaggctgcggctgcggaataggagggcctggaaaattgcttcctgagttgagtatctgccaataataataatgtggcgtagatttgctcccgtctggcatggtttagatacgatcggtgatttagcgcatttgatcagctcgttgtggcaactgttggcgcattatgctcaattatcttctgattagatgcacaagtatgtctttatgattagccatttcagcctgaacatgcctctttgttgtcggtcggagtctcagagctatttcaaatgaattcctgcctttttttaataacaacataaaatcctgcttgaccagggcg

SEQ ID NO: 27910 - DNA, 810 bp, Zea mays
  Clone ID: LIB4742-008-C11_FLI
tcgaggccggccggggtcgccgttctcatctcccaggattcattttgtcccacgcacgtctccctcccctgcttccatggctgccgtaccctttgctcctcccagccagccgaggtctcttcccaagcaccgccggccatctcgagggagatctggcgcccggccaccctcacctcatccccttcctggcgttcgtccttggctccctcacgtcgtttgctcctccctggtactcgagatcgcccatggagcccagccccatgcggcgctccgctcgctcttgtctggtggctggtgcgcgcaggcgccgggctcagggagccccggcaagagctggcgttgtggcgggccaccaacagtgatggaggtgcttgctgccactccttgtaggcgtcgccttccttgtcgagatcacctccctttgccgcctcgacatggcgaagaacgccgaggtggtcgagagctagaccagctccttttaccactgctcctcccattggggtgaagccgtgggtcggggcgtggtcccgaggtcaggcagcgatggcgaggatgaagagatccgatggtgcgagcagcggttcgagagggaggatgtcgtgccctacgaccgcgacgttgacagggatcccgtgcttgtcggtggcgcagccaaggactggagtaaatgctacgtaggttgtgaatttgttttttttctgccagtaagacacttgatgctacttttgaaattgcaccagattcttctgtagagggtatcctcggatcaatggaatcatctcaatattattcaaagaatagtattgatgt

SEQ ID NO: 27911 - DNA, 1369 bp, Zea mays
  Clone ID: LIB4742-008-D9_FLI
ctcgaggccggccgggacacgcccggggctcctcggtgccctttcccctcgccccctaccgacaccgaccccgacccatgggcggtggcgccgaccgctcggcgccggtgcgcgccgaggagtccgtctccggcggcgtcgacgtctggagcgacgccgtctcctcccacgcaccggaccacctcctcgtcatggtccacggcatcctcggcagtactgctgattggcaatatggagctaatgaatttgtaaagcaactccctgaccatgtaatcgtgcactgcagtgaaaaaaatgcatcaatgttgactctagatggagttgacgtcatgggggaacgcttagcaaatgaggtgcttgatgtaattagtcgaaggccagaaatcaccaaaatttctttccttgcacactccgttggaggattagcagcaagatatgcaattgcaagactttatagacatccagacagcgtgtctgatggaaatactaaaggaaccatctgtggcttggaaggaataaactttattactgtagcaacgcctcaccttggttcacgagggaacaagcaggttccactcctgtttggatctgttgcaatggaaaaggttgcttgccacatcgttcattggatatttaggagaaccggtagacatctctttctaactgacgatgatgaagggctgcctccactgctgcagcggatggttgaagatcatgacgatctctactttatatctgctttgcgagcattcagaaggagagtggtgtacgcaaacgcagactgtgatcacattgttggctggagaacatcatctattagaagaaacaatgagcttcctgagttgccagtatcgtcgtctgacaagtacccccacattgtacatgaggagcattcagaagaaaccgatgatgataagtggcaagattgcatggcagaatgtgatatggacgttctggaagagaagatggtgacggggcttggaaaggtgtcgtgggagaaggtggacgtgagcttccacagcagcatgacgagcttcgcggcgcatagcatcattcaggtgaagtacgcgttcatgaacgagggagcggatgtgatacagcacatcatagaccacttccagctctagagaattttattcctcttccccggtgcggtggccaaaaaaatgcatggaaccgcacgaggagagcatgcatacacggatggagagccatggaggtgcagtgcagcagagtgtgtgcagaggctgctagctaaagcttgttgggcgggcgggctggctggctgacttgactggctggctgcgctgtgtaacagtgcgttgtctatgtttttgtttgtgctacgtacacaattaaagatgatgag

SEQ ID NO: 27912 - DNA, 1695 bp, Zea mays
  Clone ID: LIB4742-008-G2_FLI
cggacggccgggagtctatagatacctttacagaacctaaccaccattgccaggcagcatatatagctagattgcttctgatgcattgttccttgtcttgaccagcttcacaacacaaccacggtgtcgtgtggtcgtcttatgcaagaaaggccagggccactgcgcgcttcaccagagagagcaaggctacaaccaagaggtgtgctggaattatacatctccaaaagctagctagaagaccttggtgggtggtgagcttggaggaggagctcatggctgcttcttcctgcatagcttgcaataatggcagtaccgatgagaaggaggagaagcggaagtgtgatctcgtcgggtacgaagcactgcctgagtggctcaaggacaacgagttcatccatggctactaccggtgcgagtggccgatgaaggagaccgtcctcagcatcttctccatccacaacgagaccctcaatgtttggtcgcatttgctagggttcctgctgttcctgtgcctggcaatctttacagcaatggtgatcccaaggaatggcagcagcaggagcagtaacagcgctgcataccagctgggagatctggtggagatggccaacatgacggtagcgctgaggcacgaggcacttgcagcgtgtttcctgctgccaccatctgctgctgctttgtctgaagatggtcagcagcagatcccaaccagctgtccacccaacacttcctcctcccatcatcatgccatccagatccagagcagcactggtacggcggccaccgtggacgccggcaccgccgccgaccccatcacgcggtggccgctgttcgcgtacctggtcggcgcgatggtgtgcctgctgacgagcagcgtgtgtcacctgatcctgtgccactcggagcgcacggcgtacgtgacgctccggctcgactacgccggcatcgccgcgctgatcgtcacctctttctacccgctcgcctactactccttcctctgcaacccggcgctgcagcggctctacatgggctccatcacggcgctgggcgccgccgccgtgacggcgtcgctggtccccgcgttccaggcgcctgagctgcgcccgctccgcgccgcgctcttctcctgcatgggcgcgtcgggcgccgtgcccatcgcgcacaagctgctcctctacggcggcacggcgcccggcgccgtagcctcggcggggtacgaggcgctcatgggcgtgctctacggcctcggcgtcgccgtgtacgccgcgcgcgtccccgagcggtgggcgcccgggaggttcgacctagtcggacatagccaccagctgttccacctcttcgtcatcgccggcgcgtacgcgcactaccacgccggagtcgagtacctcaagtggagggacgtcgacaaatgctgactggactggttgctcacggcgtaagcaatgcttctatctgtgctgcggccttgcttgcttgagatctgtgaaactttcaaagaatgacaggtggatccgaccgatatatacctggtcggtggcaaagttcatggagaggtttggtgagaggattaatgtgtacctaattagtagtaacagtagtagtagacactacatcgaggttactttttgtgcactgattgacatgaatgggtgtaaacgatttattactatatctcatatttaagtattattg

SEQ ID NO: 27913 - DNA, 1556 bp, Zea mays
  Clone ID: LIB4742-009-B11_FLI
ctcgaggccggccgggagaagcaaagaacaagcggcgaggtgcaccgtgcacctccagctctgacctgctcggtcgcccgtgtcttcgtcttccataatctcgaattccgaatcctcctccaacacctcgttttcctggattatccagcgagggacgccggtttgttgctcgtcctcctccctggttgcccgaggcggcggtggcggggcgaccatgtacagatcggcgggggtcgcgatggcgtggaacgtgttccggttctgcacggctctgcgtgggctaggttccatcatgatcctgctcgtcctcgcgatcgtcggcgtcacctactacgctgtcgtcctctgcaactacggccccgccctgttcaccggcggcggcaccactctcgccgcgctcgccgtcctgctctccttccacttcctgcttgctatgcttttatggagttatttttctgtcgtgttcacggaccctggttctgttccaccaaattggaatcttgattttgatgtggagatgggagaaactgctcctcttgctagctcagagctctgtagccagatgaactcacagcaatctgtggctcttggcaatatgacaaatccaagggttaggtactgtaggaagtgcaaccagttgaagccacctcggtgccaccattgctctgtttgtggaagatgtgttcttaagatggatcatcattgtgtgtgggttgttaattgtgttggggcgctgaactacaaatactttcttctcttcctgttttacaccttcctcgagacaactcttgtcactctctctctattgcctcacttcattgccttcttcagtgatgccgagatcccaggaagtcctgcagcacttgcaaccacatttctcacctttgtgttgaatctggccttttctttgagcgttcttggttttatgattatgcatatttcacttgtttctgctaatacaacaacaattgaggcatatgagaagaagacaactccacattggatatatgatcttggccggaagaggaattttgctcaggtttttggaaatgaaagaaaatattggttcatccctgcatactcagaagaggatttgggaagaactccagctctacagggtctggattatcctgtgagaccagattttgatggtcaggaactgtaacacagcaatttttgccagtgtcctcgtcagatacctcagtgttggacatctactgatacaactgacagcattgctgattgcgctatgcaaggcatcaaatgaaatgttcacaagattttagtaaccatgagtaattcatctgttgcacgtcatgtatgtgacgaagtgaaatttctcctagctgggccagaggaagtttgttgggatgtaaattagttttatcgacaacgtggattgggctgtgtttcattccatccaaactggtagtgtgcttcaaatagtgctgtactttagtttagttattattatgtgatataaatatctttctgataattgtgcctctgttatacactatcaatagtaaatggataagctctgtgtaattctttcg

SEQ ID NO: 27914 - DNA, 1160 bp, Zea mays
  Clone ID: LIB4742-009-E5_FLI
ctcgaggccggccgggctctctgagtcgtctagtgtcatgtgatctggatcccattccggtggcttctgccaagtgctgaggatcggcatccggttcggttcgtcgtcctcgtccccactccccacctgcgcagctgcgctgcgccatctcgaatcctctccttccaccatctcgaacctctccttccatctcctccccggccgattcctccagtctccagccaccttcaactgccggccgcaagtggccccgcgtctcacccctaaccccagtgaagaatctaggcgtcgtctatccagccccgtcatcatcaccatggaggagcggggccagcgacaagaacaagtccatggttgagcagctgcagaggtacggggtcatcaggtcgaccaaagtcgcggaggtgatggaggccatcgacagggggttgttcgtgccacctgggggctcgccataccacgatagccccatgccgattgggtacaatgccaccatatcagcaccacacatgcatgcggcttgcctggagctactggagaagaatcttcagcctggaatgcgagctctcgatgttgggtcaggcactggatacctaactgcttgctttgcactgatggttggaccagaagggcgagcagttggtgtcgaacatatcccagagttggttgctacttctactgaaaacatcaagaaaagtgcagcagccccacatctaaatgatggatccctcagtatacacgtttctgatggcagggaaggttggccagaactggcaccctatgaagccatccatgttggagctgcagcaccgcagatcccggaggcgctgatcgagcagctgaagcccggcggcagaatggtgatccctgtcgggacagtcttccaggagctgaaggttgtggacaagaaattggatggcactgtcagcataagagacgaaacgtccgtgcgctatgtgccgctcactagcaaggacgcccagtcgcacgcaagctgagtgatctatcatgtcaaaaaaaaaagttatcctcacctgacaaggtgaggcattcaatcgaatcgctacccttgtaaatgtattaatcctactgtctcagtaaatgcgctggcttggaaataatgtaaatgatggaacatcatggaacgtttgtttcccttc

SEQ ID NO: 27915 - DNA, 1818 bp, Zea mays
  Clone ID: LIB4742-009-F6_FLI
ctcgaggccggcgggattcggcattcgggtcggtgtcgccgaaacgaaaggaacagctgctctcttcgcctctgccgggctacccttcctccttctccctcgtgaccacgcacgctgagcatccgcgcacctgctcgcccgattgccccggcgttttcttctcccgttcgccctgcgtgcgggcgctatcgttctcgtggcgacgtctgggtgaccgccgccgcggacccggctctactcctgggtgccgtgcctaggcattcgccggcgacgagcacccaactgatccaagttattcatggagcacgcttcctgtgatgatgtacatgagcatgctataagtgtatcacatggggaaactgcatcaacatcaaccaatcatcaagatatgtacagtgactcagatgaaccacatcaggaagataggccatcaacgagcacgcaaaccccgtcatcagagtcttctccatcaacatcaccaactgcttatagctccagaaatttatcttttcctagaagagatagtatatatggtcatggaagaaatccttggaattctggtttgtggatctcatttgaaattgtcatgtacattgctcaggttgtagctgctattgtaatcctcctcttttcaagacatgaacaaccccatgctcctttgttcgcatggataattggatatacagttggctgcattgctagtcttcctcttatttattggcggtatgttcatcgaaacagacatttggatcaagaacctcagcagccacctacaacatatcctactttgactccctctcagtcatcagaagggcgcaaccatcgtaccagtggtattgtcttgtgtcttggatgtgtcacaatttcttgcccaaggcttagtgtgctggcttatcacttcaagacagctgttgactgtttctttgctgtatggtttgttgttggcaatgtgtggatatttgatgggcgcagtatttcatcagatgctcaagccgctcccaatatgtacaggttgtgtttggcattccttgcacttagttgtgttggatatgccattccttttattatgtgtgcagcaatatgctgctgctttccgtgtttgatttccattttgcgccttcaagaagatttgggtcaaaatagaggagctactcaagagctaatagatgcattgccaacctgcaagttcaaaccaaaacgtaacaaaaactgggggattgaccatgcttcaagctcagagcatcttgatgagggtggcatcctcggcctaggaactaagaaggaaagagttgtttcagctgaagatgctgtatgctgcatctgtcttacaaagtatggagatgatgatgagctccgtgagcttccttgcacacacttctttcatgttcaatgcgtagataaatggctcaagataaatgcggtgtgcccactctgcaaacaagagattgggggtgtggttcgatctttcttcggcttgccgtttggccgccgccgtgtggataggatggctggaagaggtgtagctagctcaagattcagtgtatagaacaacgctgctttttctgtggtatcctcttacgcataaagagccctgctcatgttgttggaatggttttgatggattgtcaagcaaagcgctgtgtgcatgactccaagacaattacacctgatggagacctgatatgcttgtagcggcaagtttatgtagaaatgtgaagggctgaaggcgctgctatgctgtaatgtaacatttttttcccaacgatgtaaataaggaacacgaagttcacctgccaggtatattacaactttgcaaac

SEQ ID NO: 27916 - DNA, 1208 bp, Zea mays
  Clone ID: LIB4742-010-A5_FLI
ctcgaggccggccggggaaaagccctggcttccctttcacggccgccctagcttccccacactgagctccttcgccgccgccctagctttcccgcgagcgggacggtagccgccgtatcctccttcctccaacaccgagcggctccaggcaggcagcatcctcgcgccctgtcgtgtcgcctctgcctctgagttcagctcgccggcagccgccgcccgcaatggaggccctccggaaagcggaggcggagctcacggtgtacgtgcacccctccaacgccaagcgcgtccggcacgccgtatcccgccagctcagcgcgcttctcttcacgtatgtggaccgttttgatggcgtgttgctgatgcatgaagtttcattccttattggcaaagacaaagagggcaaacccatatatgaaaggagtgaccgtaatgatcaaattgctgaacccgtttcttatggcaaaatcatgaatggcttggtgccatatttcagcgtccaagtgcatgccaccctgctgctcttctctccccagccggacatgatcctggaagggatggttgaaatgcttgggaaggagtcaattcatgccattgtattaggggttttctcagtggcaattatgtctgaagatattaagttcaaattcaaatggaaaagtgatggagggaaatttgtgagcctcacagataaaaaacatgtgattgaaagaggaacaatgataaggttttctgtcaaaagggtggatacagaaatgaattgtcatattactggatctttaatcccacctcacactggatgcatgcgttggttgtcagtacatgatcctaaatatgcatcagaactcaaaagtggtgaaagtagatcaagggatacaagcatcaaaattgagcagaatgaacaagaacatagaatactcaagaatgaagatggtatggtgaaatctgaacggccatataaatcccgaaagagggggcggcacattgagaaatgacatttcattgaggccgtgaagatacaagaatgtgaaagtcatgttcgcttcaatggttgtgctgcctgtttatgtttcttgtggggggagaaggtgcctctccagttggagatcccggtagcttcatagaaatgtacgatgattttgtaaaacgaattgagggttgcatttgcaaattatcaccttttttgacaagatagtagtaactgatct

SEQ ID NO: 27917 - DNA, 789 bp, Zea mays
  Clone ID: LIB4742-010-C3_FLI
ctcgaggccggccgggatccttctagcttcgatctctatatacctctgtatgtgagtgaggccaatgagagccctcgtagtcgtaagtttcgcttcggcgtgcttgctgctgctgttgcagctcgcaggagcgtcgcatgtcgtctacaactacaaggacctcgaagccgaggctgctgcggcgacggaccaggtgccgccgtccatcgtcaaccccctgctcaggacggggtaccacttccagccccccaagaactggatcaatgatcccaacgcgcccatgtactacaaggggtggtaccatttcttctaccaatacaatcccaagggcgccgtatggggcaacatcgtgtgggcgcactcggtgtcgcgagacctcatcaactgggtggcgctagagccggcgctcagaccaagcatcccgggcgacaggtacggctgctggtccgggtcggcgacggtgctgcccgacggcggcggcccggtgatcatgtacacgggcgtggaccacccggacatcaactaccaggtccagaacgtggcgtacccgaagaacgtgtcggacccgctgctccgggagtgggtgaagccctcgcacaaccccgtcatcgtccccgagggcggcatcaacgcgacgcagttccgcgacccgaccacggcctggcgcggccccggccccgagcagtggcggctgctcgtcggcagcgcggcggggtcgtcgccccgcggcgtggcgtacgtgtaccgcagccgcgacttccggcggtggaggcgggtgcggcggccctc

SEQ ID NO: 27918 - DNA, 1141 bp, Zea mays
  Clone ID: LIB4742-010-G11_FLI
ctcgaggccggccgggcttccaccaaacgcgagaaacttgattccaggcagcaacccctcttccattccattcccgccgaccccgacgccgccctgtctcctcggctcctctctccgatccaatggcctacgccgcacgcctcgtagccaaggtccacctcgccgcgacgccgcaggccgagccgcgccacctctccagcttccgcgtaggagcactcagtcgatccacaaccgttcaacggcaaaagtttgttgctaaatctgctatctcggctgtggaaagtggtgatacatttgttggagtaaagcaaaatactagacctatcatagtcatagacaactatgatagcttcacatataatttatgccagtacatgggagaggttggagctaattttgaggtttatcgcaatgatgagatcactgtggaagaaattaagaagatttctcctagaggaatacttatttccccaggccctggcactcctcaagattcaggaatatccttgcaaacagttacagagcttgggccctcaataccgttgtttggggtttgcatgggtttacagtgcattggagaggcatttggagggaaggttgttcgatccccttacggcgttgtgcacggaaagggctcccttgttcattatgatgagaaacttgatggaactctgttttatgatatttctaacccattccaggctggaaggtatcacagccttgtaatcgagaaggatagtttcccgcatgataccctggaaattgttgcgtggacagatgatgggttgatcatggctgctcgccacaggatatacaaacatattcagggcgtgcagttccatccggagagcatcataactactgaagggaggctcatggtcaacaattttatcaagattattgaaggctacgaagcctcgaattgctctccgtgatttatctagttggaagcagcagcagccctgcgtggggcgggtgacaataagatgatgtaaaagcttgtataactacatagctcgaacatgtaaactcagatgtatatgttcagatgtcacaaactcacgacactcagagtccaactactgtacatggtcgcatgtggcgtgtcgatgtcaaatcaagggcttgtttggtttgtggc

SEQ ID NO: 27919 - DNA, 1466 bp, Zea mays
  Clone ID: LIB4742-011-A6_FLI
cctcgaggccggccgggtcttggctttaacctttttcccttttgcaacctttttcgaccaaccttcgtctccagactcgtccaccctataaattgtctcgccagaccattccaatccggcaactcctgctctgcctgagcctgagcgtaggcggctaccagagagaagggtaggcggcgccggcggcgggagcaatagaagagcggtaaatccaagagagatcagagcctcggagggaaacagaagcgcacagagcatggagagcccgatctcgaggactaacctgaattgcatcagcctggcggacccgaacgtccagaaatcagtggcgctcctcaagcaggcatgcctggattcaggcttcttctatgttgtggatcatgggataagccaagagttcatggatgaagtttttgcccagagcaagaagttctttgaccttcctcatagtgagaaaatgaagcttctccgagacgagaagaatagagggtacacacccatgctagatgaaattcttgatcctgaaaatcaagttaatggtgactacaaggaaggatattatattggagttgaggtacctgcagatgatccagaagcaaacaggccattttatggtccaaatcagtggccttctaaagaagtactaccaaaatggagagaagtgatggagcaatatcacagggaggcattgatagtagcaaaatcagtcgcaaggatcatcgctcttgctctagatctagacgtggacttcttcgatagacctgaaatgcttggcgagtccatagccacgctaaggctcctgcactacgaaggtaaggtgtcagatcctgcaaagggtgtttacggagcgggcgcccattcagactacggcctgataactctcctggcaaccgatgatgtagttgggctccaaatatgcaaggacaagaacgctcagcctcaactgtgggaatacgtagctccgttgaaaggcggatttatcgtcaaccttggcgacatgctcgaaaggtggagtaacggcgttttcaggtcaaccttacatcgagtggtcctagatgggcgagaacgctactcgatagcctacttcgtggaaccaagccacgactgcgtggtggagtgcctgccgacctgcaagtccgaatcaaatcctccaaagttccctccgatcacctgctccgcgtacctgtcccagcgctacaaggacactcacgcggatctgaaatcctacgacgacagcaaggcctgatcagaggactgccctctcctctctctgtctcagcgatcagtacgtacgacgtgtatcctgcaataacactgggtggagggcggcagtaccagtgtgccacagtatcagtataggtatagagagttctgttggtgccaccgtgccaccgtccatgtgttcatgtaagatgacgagaagaatcaagaacgggggccggcgttgaggtccccggccttaatcg

SEQ ID NO: 27920 - DNA, 1323 bp, Zea mays
  Clone ID: LIB4742-011-C10_FLI
ccgggacaaggccaacacgtccccgtccagattcatccacccttcccctttctcttcgtctccgtccgctcccggcatcgtcccctcttccccgtctcgcggtcgccgcccacgggcttcgattgatcttcttccggtgctggtggcaggtggacggatcgtgtccttgcttggccgcccacagcagcaatggacgacggggacctggacttctccaacccggacacgtacctgtgcccggcgctcggcactgacccgcccagcagctgctccatggacagctacttcgacgagatcctcaaggacacggagcaccacgcctgcacgcacacccacacctgcaacccgccggtgcacgacctatcgcacacccacacctgcgtccacgtccacaccaagatcgtcgcggcctcgcccggcgacgacactgccgactcgccgtccgagaacaacaccaacggcagcggcggcaacggcagcaacgccgcctccaagaagcgcccctcggggaaccgcgccgccgtcaggaagtaccgggagaagaagaaggcccacaccgcgtcgctggaggaggaggtggtccatctcagggcgctcaaccagcagctcgtgaagaagctccagagccacgccgcgctcgaggcggaggtggccaggctccgctgcctgctcgtcgacatcaggggcaggatcgagggggagattggcgcgtttccgtaccagaggccgccgccagcggccaagaacgtcgacctcgtgtccggtgttgaccaaggagggttccttgccggggctgctgcccaggttaccagttcctgtgatttcagatgcaacgatcaaatgtactgcagccctggaatgcagggcgctgttggcggccaggtgttgggacaaggtgcctgtgatgtctcgagtatccaatgcgttggaagcaccaggtctgcgtccactaagctacctgtctgcggggggatggatgcagtacctgctgcctgcttgccaaatgttcaaaacaagtgatggattatataactgaagaagagtataactcggctctcttgtcgccgagccactgttttgtggttccattggtttcctgctgtctggctgaatgcaattttgagtgaattgccatctaattgtcaacgatgaagatcagatttgcttctgtcccatcttgtcaatccagagctagacttgctcttgtctattttcagctggatgtcttgtgccccttttaaaggcattgctagtcttgttgacacaccagaaactaagatgctctgtatgaatcaactggctgtttattctctgagatttgag

SEQ ID NO: 27921 - DNA, 1090 bp, Zea mays
  Clone ID: LIB4742-011-H10_FLI
ccggccacactagtccaaactataatacagacggaagaaacctgttcaccgtcaccgcagcccgccccactaactattgactgtcggattccctacccgtcggcgacaatccgctgcccccaatctgcctggtaggtctcgcacctccggtcatggctgccgaagctggcccaatctccaaggtcctcatcgtcatagcaatgcagaaggaggcgacgccgctcgtccacaagttcaatctcgtcgaggcgcccgcccaccaatccacttttcctaaaggtgccccatgggtttggtaccatggcagctacaaaggcctccacattgaccttgtattgcctggaatggatgctgttcttggagtcgacagtgttggtacagtaccagtagctgttgtgactagtttctccattcaaacattgaagccagaccttatcattaatgcgggcactgctggtggcttcaaggccaaaggagcaagcattactgatgtattccttgcatcagatgttgcattccatgacaggaggataccaatacctatttttgacatgtatggaactggagcacgcaaaacttttgcagctcctaatatcttgaaggagctcaatttgaaggttggcaagttgtcgactggggattctctggatatgtgtccccaggataaggagttgatactgcgcaatgatgctacaataaaggacatggagggagctgctgtagcatatgtcgctgacatgttctcgacaccagcgatctttgtgaaagctgtgactgatatcgtggatggggtgaagccaacgtatgaggagtttctgcagaacctgattgccgtgacgacggcactggagctggcagtcaccaaagtggtggatttcatcagcgggaaacgcatctccgatctttgaaagctcgtggtcacgaaatccaacatccccctgctctgatgcacgatgctaggctaggatacaatacaacgttgggtcaatgattttttttggaggtgttctatacgtgaggttttaccccttttgcaatggctcttgatctattcctgaataccgaccagagcagttgtctcttgctaaag

SEQ ID NO: 27922 - DNA, 1541 bp, Zea mays
  Clone ID: LIB4742-012-G8_FLI
cctcgaggccggccgggacccgaaaaccccaaacccaaaggcatctcccagtcggagtcgccccatggccccacccacctattctccctgccggcggcagccttaaccctaatctcatcgcctcctcttccttctccagttcctcgaaggcccagcagacaacagcccctctttcttctcagccatgtcggaggacgaagcgaacgctgctgctgcgccggcagagggaaagaactggcggcggaaggggaagcacgacaagcccaagccgtgggacgaggaccccaacatcgaccgctggaagatcgacaagttcgaccctgcctggaacgagggcggcatgctcgaagtcagctccttctccaccctctttccccagtaccgagagaagtacctacaggaggcgtggccggtcgtgaagggcgcattgaaggagtacgggatctcgtgcgagctcaatttggtggagggatccatgactgtgtcgacgaccagaaagacaagggatcccttcgctattatcaaggccagggaactaattaagcttttgtccaggagcgtccctgcacctcaggcaatcaaaattcttgatgatgagatgaactgcgatattattaagattggtggtcttgtgagaaataaggagcggtttgttaaaaggagggaacggcttttaggccctaacttgtctacactcaaggctattgagattttgactggctgctacatcttagtgcagggaaatactgttgcagccatgggcaactataggggaaggggactgaaacaagtgagaaggattgtagaggattgcatgaagaatgtaaagcatccagtgtaccacatcaaggaactactaatcaaacgtgagctagcaaaaaatcctgctctagccaatgaaaattgggacagatttctcccgaagttcaagaagaagaatgtcaagcagaagaagcctcaaactaaggagaagaaaccgtacacaccctttccaccgcctcaacagcctagcaagattgatcttgaacttgagaacggtgagtatttcatgagtgacaaaaagaaatcagcaaagaaatggcaagagaagctggacaagcaatctgggagagctgaagaaaataaaagaaaaagagaggctgcatttgttcctccaaaggagaacactgcaggtccatccaaatctgacaagaatgccagtgacaacagtgagatagccgatatagcgaagtcattaaagagaaaggcgaaggaatttagaaagaacgaggcccaggagagtgtcatagctgaatcatatatcgcaagtaatgatgaattgcggcaaaaaaagaaaaagaaatcaactaagtccaagtagccctaatcctcatgcataatgacactggcaattgagaaggattgcatgagccatccctataattatgtcattcatgctgtgatcgtattagatgatgaaacaaaattcgaaccttccgctggtctgttgttgcaacagttcatatgcaataggtttttaatgggtaactgccatgataacc

SEQ ID NO: 27923 - DNA, 1562 bp, Zea mays
  Clone ID: LIB4742-016-G7_FLI
gaggccggccggggaaaacccctaatgtctcgaggtggcgcaccccaacagactggctccgcctccttcctccccccctccggcctccgccgctgccttcttttccccgtgcgcatagtcgctcgcagaggcgccgacatcacttcgtccgcaccggaaacacgcacgaagtgaggagcagcaccaaacaccgcgccgcttctcctatatttgttcgtctcgcggagccgcctcgtgtgtaagcgtgtggcggatccatggcagcggcggcggatacctcggaggcgtccgcggcaggaatcgcgctcgcagaggccaatatcaactgggagaggttggacaagacgaggtttcatgtgattggagctatcctgttcacggcccagcaaggtgctctgcacccaacagctgttgtgaagactaggatgcaggttgctgaaggtgggcttgcacatatgtctgggtttgctgtttttaggaggatattgagaagcgatggcatccctggcattttcagaggatttggcaccgctgctgttggagctctgcctgggcgagtgctagctctaacatcactggagatctctaaagaaatgacatttaagtattgtgaacattttgatctgtcagaggcgtcacgaattgctatagcaaatggcattgcaggtctaatgtcgagtatctgttcatgctcatactttgtgcctctagatgtgatttgccaaaggctcatggttcaaggattgccagggatggcaacatacaggggcccattcgatgtgataaataaggttgtcagaacagaagggatccgggggctttatcgaggttttggtatcactatgttgactcagtcgccagcttcagccctttggtggagtgcatatggtggtgctcaacatgctatttggaggagtttgggttatggaaatgactcacaaacaaaaccatcttaatcagaacttgttgttgtccaagcaacagcaggaacaattgctggtgcttgctcgtcgattatcaccactccagtagataccatcaagactcggcttcaggttatggacaactatggtaagggcaggccttcagtcatgaaaactaccaggctgctgcttgatgaagatggctggaggggattctatagaggttttggaccgaggtttcttaacatgtctgtctggggcacatcaatgatcgtgacatatgagctcataaagaggctatccgtgaagtctgaatgacacattttggtggattctcaactaaggtgatttactgttcaaaatcatctatacagatataggcaatcaaatcagtttgcctcgcgaggagtataggcgagtattatgatcgggtgggatgcagaattatggtttagttgcataggataacatgcttctgtatgacacttgcgatgtatatatttttgctaaagagccctcctttcaggatgtttgtagccagcttcttttggatgtaacagatggaggccaagacgcctgttctgtctaatgaggcacattatatgtagctgtactattcgtggtccagcaaaattttgg

SEQ ID NO: 27924 - DNA, 1233 bp, Zea mays
  Clone ID: LIB4742-016-H9_FLI
ggcacgccttccgcggttccgccgagccgcccatagcaatcatcgccgccacctcctctcccggcgtggagtggaagagaacccgtccgcactcataggctggttttgttcggtgggagggcaacttgagtctaagatattcaggtattgctagagatgttgggtcatggtctagcaaccgatccctctagtactttgcgtacggtcctcaagggtatcaagtgcaccgttggggcttgtctgttcgttgagttttgacaggggattcaaggaaaagaacaatatcttcatcaacgtggatagatgcatgaagtacagtactttctgttatgcaccaataaatcccaatatcacaccactggcaactgcatcgtttggggacatggctgattcttcaatttttacctttcccagaatccatgtgaaggatccatatcagcgcctcggaatcagcagggaagcattggaagaagaaattcgggctgctaggatttatctgataagcaagtatggaggccataagccaagcgctgatgcaattgagtctgcccatgataggattatcatgcagagtttctttgataggaaaaaaccaaaaaacgaacctcaagaaaaaattagagaacttagtcagtcacgtgccgtgaaggctattcaaggcagatttcaaacaccacgtagcaaagtcatttggcagacagctattacttttgtcttgcttggagtgcttacccttgctttccctactgacgaagggccaaccctccaggcggccgtctcttgtgcagcaaatatctatttcatttatcagagggtcaaaagtggttggcgagcattcttttatgggtttggttctttctttgcttcctggttcctgggcaccttcttgatggtatccctaattcctcctgtactccccggcccaagaaacttggaagtgagcaccgcgtgtgttacttacgtgctccttttcgtatcgtcgaccttcttgaagtaagagatctccgtgcttccttccatgttagcccaaagtgttgcaggagttatatacatggtatcctgcttcaaatagcctgtacaatccatcggctttttttgtttgtttcacgttcgtggagttggaaatgctatccccttggtgagttgatagtagttttcaggttgccatgtgatatgtagaacttttttttttgcccttggaccgtgaggtcttaagcacaaagagtctaacgc

SEQ ID NO: 27925 - DNA, 1419 bp, Zea mays
  Clone ID: LIB4742-018-E3_FLI
ccggccgggaccaaacaaacactcgagctaagctcagcctcacacagcctctcgtctcgagctagagtgctacactgctactagcttagaagaagaagcagcttacagctgaagctgcagcaatggcgaaatcttacaccttactgttcgtcgcactggtcgttatggcccttctagtgagccccattgcttgctcccgcaagctcgccaagccgaacaagcccaagccgacccacaagccggcggccagggtcacgcccggcggcaaccacaccagtatccccgcagtgtccgccgcctacggctccggcggctggttgtctgccggcgcgacgtactacggcgccccaaacggcgacggcagtgacggcggtgcgtgcgggtaccagaccgccgtcgggcagcgccccttctcgtcgatgatcgccgccggcagcccgtctctgttcaagggaggcaagggctgcggcgcctgctacgaggttaaatgcgacagcaacccggcatgctccggccagccggccaccgtggtcatcaccgacgagtgccccggcggtgtctgcctcgcagaggcggctcacttcgacatgagcggcacctccatgggcgccatggcgaagcccggcatggccgacaggcttcgcgccgccggcatcctcaagatccagtacaagagggtgccgtgcaagtacagcggcgtgaacatcgccttccgggtggaccagggatccaacccgttctacttggaggtgctcatcgagttcgaggacggcgacggcgacctcagcgccgtccagctcatggaggccgggtgcggcacgtggaccccgatggtgcacaactggggcgcgctctggcgctacaactccaacaccggcaaggcgctgaaggcgcccttctcgctccggctgacctccgactccggcagggtgctcgtcgccaacaacgtcatccccgccggctggaaccccggagccacgtaccgctccttggtgaactactcctgattgatgaactgcggcggcggcggttcggttctccgccccccattgcatgcgcttggctggattattatgcgtggccaagaagtgctttccagggtgcgtggtgttcaaagaacgagtctcgagtttgttttctgagaagaagaagaaaatgtatgttcgggtgtccgcgagaggcggtgtaagaagaggaggaggacgagaaggttaaggagccgtgcgttcttcactccctccacggtctctgcagtcacctagtgatgtgtgtagtggtcggtgtcggtttcttttttcgttgtgatggctcaggacaggagttgggcgttgtatcagtctgtgtgtgtgcgcgcgcgcgcgtagttttctgtaccacgcaatcctttcagagaattgaaatcctgctttcttgtttcag

SEQ ID NO: 27926 - DNA, 2039 bp, Zea mays
  Clone ID: LIB4742-020-E5_FLI
ctcgaggccggccggggaccccatcgcgttgccggatcgagctcagctctatctcgaaccttggttcgccgcacggcaccagaagcacggccgtgttctcatcccctccacacgtttccgcctcccgatccacgtccgccgttagccgcggccgacacagctcctcctcctcctcgcagctcttctccagctctcggaggcccgaggtttcatcgacccgcgctccttcatcctcgacacctcactccggcggcgcgggtccgcagtgctgcacatcgcgagccgcgcggcacagccgcacttgttgtccttcgtgcgtggggtgcggttcgacgcgggcggcgggatggcggcgagcgcgcgggacagcaccgatgcagcggagcgagttgtggatgaccacgacggctgggcgtcggacgccgagatggacgtggagatggatgtggtggaaggcgatgccgaccggagggacggcggcgcggatggtgatgatgagtacttgctgctcactaggataagggacacatcagcagctgaagcaagggcaggaaaggatatacaaggtataccatgggagaggatacacatagccaggcaagattaccgaaaagctaggttggaacagtataagaactatgaaaatttccctcaatcaggagagctcatggataagctatgcaagcaagtggagaagagcagcaagtattatgaatttcagcacaacactagatcagtgaagccatcaattctccattttcagcttaggaatttgttatgggcaacatcgaagcatgatgtctattttatgtcaaattccacagtaagccactggtcatcattgtctcacaaattatcagaggttcttgacttctctgggcatgttgctccagcggagaagtatcctggcagtttactagaaggtttctctggtgttcaagttagcacacttgctgtgaatgagggtttggtggtagctggtggttttcaaggagaactaattggcaaagatgtggaaggctgtagtgtaaaattctgtatgaggacaactttgagtgacaatgccataacaaatgccatagatatacacagatcgataagtggaagcctgcacattacagtatctaacaacgattgtggtgttcgtgaatatgatatggagagatatcagctcgtgaaccactaccgatataactggccggttaatcacacatccgtgagcccagataagaaacttttggctgtggttggagatgatcgagatgctcttcttgtggattcacgaaatggaaaggtaacctctaccctagttggccatctggactactcatttgctacggcatggcacccggacagccggacattcgcgaccgggaaccaggacaaaacctgccgcatctgggacacccgcaacttgtcgacctcacttgcagtactgcggggcaacatcggcgcgatccggtgcatccgctactcctccgatgggcggttcctggtgttctcggagcctgccgacttcgtccatgtgtacagtgtggctgcggactacaagaaacggcaggagatcgacttctttggtgaggtgtccgggatcacgctgagcccggacgacgagtccctgttcatcggagtgtgcgaccgcgtctatgccagcctgttgcagtacaggatgatccgcggattcgactatcttgactcatacgtgtgaagaactgagctttggtgaccggtgttgtgctaggtgctggctgaaggttctgatgcgcggttcagggaatatatctgcctgctcttagttcatggcgaatgatggttcggtgggactcgacgccagcgaatctgccgtgtaaatagtttagaatttgaagcgtagtgtagtgctgtggaccaatgctgtctctgaacatacatatgatcagagtaatgtgtgtttgcgctgttagtttcagactccggaatacaaatagttttggaccaaattcctaaagcctgtttgtactgtggaacacatgaaagggctagtttgtattcacttcgat

SEQ ID NO: 27927 - DNA, 686 bp, Zea mays
  Clone ID: LIB4742-020-H1_FLI
ggccacggcgaccccagtcagtgtgagatccgaaagaccggccgccgccgcccaccgggtcatcgccattcgccacaaagccatttgaaccccccacgtctcctcgcctcgttccccatttgctgcgtctccttgcccgcgccgccgctcgccgtttgcccctcgtctccgcaccgcgcgctgttgtccatccttgtgcagcaaaaatgacggctggctacattgttggctcactggtcggatcctttgccattgcatacctgtgtgacacatttatctctgacaagaaggcatttggaggtagcacccccaagactgtttctgagaaggagtggtggcaagccacagacaccaagttccaggcctggcctcgcactgctgggccaccggttgtcatgaaccccatcagccgccagaacttcatcgtcaagtccactgagtaggtttgggctggagaagctggttctgcgacttggtgccgccatgaagccagagttccttttctaaggtcttaatcaattgtaataaaacgaaatacagtcaggatttttttgtgatttttacttgatctgtgagcgaacactgggtctttcaccttgtcatccaatgggttctgctccttggtgaaatctcccaccagccagtaaagaactgggttgttttcataatatatgcttttgctacgg

SEQ ID NO: 27928 - DNA, 1116 bp, Zea mays
  Clone ID: LIB4742-023-A8_FLI
ctcccaacccaatctcctcactcctcagagagagccccaagccaagatctgcgcgggcaagtcaccaggcgaagcaccggctcccatggccgtggacctgatgggctgctacgccccgcgccgcgccaacgaccagctcgccatccaggaggcggcggcggccgggctccgcaacctggagctgctggtgacgtccctgtccacgcaggccgccgcgccgcacagggccgctgatcagccgttcggcgagatcgccggccaggctgtctccaagttccgcaaggtcatctccatcctcgaccgcacggggcacgcccgcttccgccgcgggcccgtcgagccgtcgccgccggcggcgcctcctgtcgtccccggtccgcccgtgagcgtggcgcagccgccgcagagcctgacgctggacttcacgaagccgaacctggccgtgtcggccgccacgtccgtcacctccacgtccttcttctcgtcggtcacggccggcgagggcagcgtctccaagggccggagcctcatgtcctccgggaagccgccgctgtccggccacaagcgggagccctgcgccggcgcccactccgaggccaccaccaacggcagccgttgccactgctccaagagaaggaagaaccgcgtgaagaggaccatcagagtgccggcgatcagctcgaaggtcgccgacatcccttcggacgagtactcgtggaggaagtacggccagaagcccatcaagggctccccttacccacggggctactacaagtgcagcactgtgcggggatgcccggcgaggaagcacgtggagcgggccaccgacgacccggccatgctggtggtgacgtatgagggcgagcaccgccacacgccgggcgcggtccaggggccgagccccctggcgaccgcgtcgccggtgcccgtcgccgtctccgccggcaacgggctcgttgtctagtctactaaaagctaggattagcttctcgtcttctttgttttttttttgtttgagctgatgtccgtgtaaaacaaggaagaaggttgtagaaagagggagaggaggacaccggaatttcgatgccgcaaaactcaaacctttgtgtcgtgtct

SEQ ID NO: 27929 - DNA, 1001 bp, Zea mays
  Clone ID: LIB4742-023-G5_FLI
taccctcgaggccggccgggaagattctcttcactgtctcctccaccgccgctcacggaatcgcatccgtccaaaacccttagcttcgcttcagtgtcttcacgggccgccggcggagatgcggttcacggcgtctccggtggtggagcttccggtcagcggcgcggtgttgactttcgaacaggacaacgactccttcgaggtgggcacctctgtgtggccctcgtccctggtcctcgtcaagttcgtcgagcgctgcatccgcgacccggccctcccctttgccgacgtgctccgcttcccgggaacccgggccgtggagctcgggtccgggtgcggaccggcaggacttggcctctcccgcctcggcctcaccgatctcgtcctcaccgacatcgccgccgtgctcccggcgctccgccgcaacctgcggcgcaaccgagttcacctcgcgcgcgcgccccgcctcgcccagctccactggaactgccccgcgcatctcgcgacgctagccaccccgcgccgcttcgatctcgtcgtcgccgcagacgtggtctacgtgcaggagtccgtgccgcacctcatcgcggccatggatgcgctcgccgacgccgagcgcggcgtggtgctgctcggctaccagatccggtcgcccgaggcgcaccaggtgttctgggagaccgttccggctgtcttcccggtcatcgagaaggtggcacgggagcacctcgaccctgagtacgcctacgaggaatccgatgtattcatactccgaagaagcccgcgtcagtgaggtcagggtcgaccttatgaagcctctcgaagcacataagctacagagaaactcaaaagttatattttctatgaagaactatgttctatctaacagaaatataagctccccggtatacactcccttgttgactctgaactttgtccgcaaagtaagagtcctttttttataaacaataaaaaagcgtgatattaaatctttttcgacg

SEQ ID NO: 27930 - DNA, 1215 bp, Zea mays
  Clone ID: LIB4742-024-D6_FLI
ctcgaggccggccgggtgacggcgtccaccgaattcaacttcccggcggtgttcaacttcggggactccaactccgacaccggcgggcgcgtggccgccggcttcgagtccatcttcccgccctacggctccagcttcttcggcgggcccgccggccgcttctgcgacggccgcctcgtcatcgacttcctcatggaggcaatggatatgccactcctcaacgcgtacctggattctctaggcacgccaagctttcggaccggcgttaattttgctcaagctggatgttcgatcacaccagcaaagccgacatcagtcagcccattctcatttggtctccagatcaagcagttcttcgccttcaagaacaaagtcactaagctcctgtctgaaggagatatgcacagccgatacattcctcagcaagattacttctcagagggactctacacgttcgatattgggcagaatgaccttgctggtgagttctattcaagaacagaggaccaggtcatcgcatccattccaactattttgctggaatttgagaatggtctcaagaaactgtatgaccaaggtgctaggaagttctggattcacaacacgggccccctcggttgcttgcctcaaaacattgccctcttcggcaaagacccatcccaactggacgagctccactgtgtggcgaagcacaaccgtgccgcaaagcctttcaacttacagctgcacgcactttgcacgaagctgagggcagaattcgatggagccagcatcacttacgtggacatccacacgatcaaatacagcctgatcgccaactactctcgatacgggttcgagcacgccactcaggcgtgctgtggatacggaggcccacccctgaactacgatggtaacgtaccatgtggacacacggtgtctctggatggtaagatggtcaccgcaaaagggtgcagcgacactactgaattcgtcaactgggatgggatacattacacggaagctgcgaatttccatatcgcctcgcagatcctgaccgggaagtattctgatcctccgttcgtggataagatgccgttcgtcataaaacctagattctgattggcatacaattttccctctttactcacccactttacagcaccggttgcagatacgatgtatacttattacttgccaataaccatatatagcttgagtaaaaaaatcatatac

SEQ ID NO: 27931 - DNA, 1290 bp, Zea mays
  Clone ID: LIB4742-026-H11_FLI
ggccggccgggaaggttctcggcttctcgcaggcgcggcgaccggcttcaaccccaactcttcttcttcttcctcgcaaacttcgaacgggacgagaaggaagcggacgcgagaggagactaaccgacctcggatccatcgacgcgtgaagatgtcttcgcccgccgagtactacaaatcacttccacctataagcaaggcatatgggacattgtgtttctttaccaccgtgctagttcagctccagattttgcacccattatttctttacttagattaccccttggtgttcaagaagtttgagatatggaggctattgacaagtttctttttcctggcaccattttccatgaaatttggtattcgccttctgatgatgtaggttaaagttttgctgactactgattataaaatagtgacagttatgaactatctataattgtaaattagctttggttgtttggatttgctttatcgtgttttggcatgcagagcaaggtatggtgtcatgttggaaaagggtgcatttgataagcggactgcagatttcttatggatgatgatatttggtgccatctcactattggtgttgtctattattcccctattcaattcttttttcttaggaatacctatggtcagcatgctcctttatgtctggagccgagagaatccaaatgctcagataaatatatacggcctcgtccaattgaggtccttttatcttccatgggctatgctcttattggatgtgatatttgggtcatcattaatgcctggacttctgggtatcatggttggacatctctactacttctttgcagtgttgcaccctcttgccaccgggaagagctacctcaagactcctaaatgggtacataagattgttgctcgattcaggataggcatgcaagcgaactcacccgtccgtccaccagccaatggcaacagcgggtctggtgtgtttagaggaagaagctataggctcaatcaatagattcacccacctcgtaatgtgatccatggtcggagtggcaatgtagaagcaaagaccagaacgcatagtagggtcaatcaaaattaagggttacccgtcagagattttcttaaaaaacctggacggacggaatggagaacccttccatttgctcatttagttgctaacaatgttcatcgtccatgtttacacatgaatataattctgtaatgacaatttgtgtacacttatgctggacttattgtcgcctctttttagctaggataagaacaaaagatgatgagtttgctcag

SEQ ID NO: 27932 - DNA, 1463 bp, Zea mays
  Clone ID: LIB4742-027-B12_FLI
ggccggccgggctcccacctgaccctcccgtcccgcattcgggacgaagccaacgacgagctcagcagcgccgacgccgcaacgacaaccagagcaccccgcactgtggagaattcatgtaaattagattaaaggtagcaatgtggcgccgctgttgctgcaattgccaagtggatgaatccgaccagcatgaaaatgggcatgtcaaggccacaatcaaaacattgatggggcaataacggggttgaaagattctgctactggaaaagtcgagccgcaggatgctgctccccgaattgatatccctgttctatccttggatgaactgatagaaaaaactgatgactttggttcaacggctttgataggtgaaggttcttatgggagagtgtactatgcgattcttgataatggaacaaaaatggcagtaaagaaacttgattctactgaaaatgaacccactgctgaattcttgacccaggtttcattggtttcaagattgaaacatgaaaactttgttgacatgttggggtactgtatggagcgtaatcttcgcatagtagcctatgaattcaccaccatgggttccctgcacgatgtactacatggaagaaaaggagttcaaggtgctcaacctggcctggcgcttgattggatgcagcgagtgcaaattgctgttgatgctgcaaaaggacttgaatatcttcatgagaaagttcagccttccattgtccatagggatattagatcaagtaatatccttttgtttgaagatttcaaggcaaagatagcagactttaatctctcaaatcaggctccagatatggctgctcggttgcattcaactcgtgtcttgggaacctttggatatcatgctccagagtatgcaatgaccggtcaactaacccagaaaagtgatgtatatagcttcggagtagttcttttggagcttttgacaggtagaaagccagtagatcatacaatgcctagagggcagcagagcctagtaacgtgggctaccccaaggttaactgaagacaaggtgaagcagtgtgtagatccacggttgatgggtgaatatccggcgaaaggactcgctaagcttgctgctgtagcagctttgtgtgtgcaatatgaagctgaattccgcccaaatatgagcattgtggtcaaggctctgtctccactactcgtaacaaagcagactccaccacctgttgttgacagttgacgtacaaaattaacctaagttgcaaatatgagcgcaacagttgggatactacggacatttgatcggttcacctcagtcacagatttcaaacactaactgcatggaaggcatctttagtactgcattaacaactttgcatctgcggttctacagcatgcgcatgtcaacaatgttccttttcatctctcagtaaatgccagtatcaaggagactagtgaaatattcagtgaac

SEQ ID NO: 27933 - DNA, 869 bp, Zea mays
  Clone ID: LIB4742-029-E7_FLI
ggccggccgggaaaaaaaaaaaaaaaaaaatcagctgtgtctcagcaggaggcgttgcggccatggcggcttcgaagcccatcttgtatagcgcgtggatcagctcctgctccttccgagtccggatcgccctcaacctcaaaggtgtggattatgagtacagggctgtgacaaggaacgatctagattacgaaaagatcaatccaatcaagtatgttccagcattggttgatggggattttgttgtttctgactccctggcaatcatattgtatcttgaagataaatatcctcaacaccctcttttgcctcaagatctcaaaaagaaagctataaatctgcagattgcaaatatagtttgttcaagcattcaacctcttcaatgttatgctgtaattggtctgcttgatggcaccttaggctgtaaccagagccttcagattgttcggaattacaccgacaagggatttaaagcaatcgaaaaacttctggaaggttgtgacagtaaatatgctactggagacgaagtccaactggcagatgtgtttcttgcgccccagatgtatgcaggcgtgacgcgcttcggaattgatatgtcaaagtaccctcttctggagaggttctacaaagcctatatggagatcccagcatttcaagtcgcggttcctgaaaaacagccggatgcgcctgcgtccccatactgaaacggaggcagcaaccatattgatattcaaattgatttggttatcttggaatcatgttgtatgtagcatgacatagaaggccacgatgtatgcctatttgtttcgtacacattctggtttgtccgaagaatttcacagtaaataaggcccgatgatttgtgtagt

SEQ ID NO: 27934 - DNA, 701 bp, Zea mays
  Clone ID: LIB4742-031-C4_FLI
agtctgtcttcgctagggtttttagcccgtataagagccccttcctcactccggaaccccattccccgccgcctcgcgcccccgctcgcttcacttctctaggtgcgcaccgatcagaagagatggcggtgccgctgctgacgaagaagatcgtgaagaagcgggtcaagcagttcaagaggccccacctcgaccgctacaagtgccttaagccaagctggcgcaggccaaagggtattgattcccgtgtcaggaggaagttcaagggatgcaccttgatgcccaacattggttatggttctgacaagtcgaccaggcactacctccccaacaagttcaagaagtttgtggtccacaacgtttctgagctggagttgctcatgatgcacaacaggacctactgcgctgaaattgctcacaacgtgtccactaagaagcgcaaggagatcgtggagcgtgctgcgcagctcgacattgtggtcacgaacaagcttgctaggctccgcagccaggaggacgagtagtctggtttcttgtcttaacgacgaactggatgttgccattcctttctgtaggaaactactttgcttgtgtcttgttagtactgaaaaccagagtcactcctacctttttgcaatcagtagctactaaaatgtggcagattccactatttccttgcatctatctaaattatatgcgcc

SEQ ID NO: 27935 - DNA, 1123 bp, Zea mays
  Clone ID: LIB4742-032-D8_FLI
tcccggcctgtcccctcacctccctccccctatctctccaccgccgcagctagctgcgacgtcatgcactcgccggcgccaccgccaccgcatactatctacaattagccagccgtaggcttacctatcctgtgtcaagcaagcctctcgcaagcaacaaggaaggaagctagctagttttatagctgctgtcggcggcggcggctgaagcgacgtgcctgagctaggatttaggttgagatcaggagagggagaaggcggcggcgatggggcgcgggaaggtgcagctgaagcggatcgagaacaagatcaaccgccaggtgacattctccaagcgccgctcggggctactcaagaaggcgcacgagatctccgtgctctgcgacgccgaggtcgcgctcatcatcttctccaccaagggcaagctctacgagtactctaccgattcatggtacgctctcggccccctccgttgcttacgtttcgacactgcccgctgcgtgctgccccatttccaagctgtttgaaactatgaattgaggtgatgcgtaattatctctgttcgaacttgttgagaatttttggaattatggttattgggtagacagacgtacagctctggttatgtgtagatgagtcgaagaggcgtgtagcgtgtcccgttcgtgcgcgcgctatatatatacggggtaattttatgctccgctttcgctggtatggcgttggtactgctctgtttgggggaaatttttgctgccatgctgcatgtgctaattgcttgactaacttgacttctccgcagaacaccaatactatacatctcatctcgcccttattctgcacatctcatcttgtactcagcacccttaatctgcgactggggaagtggggattatatggagaggagtatagtttctgtaatttggatttttctcatccaggcctggcagcatcagtattatttaggttgctgctgcctcgtttcttcgccgaagtgctacttaatttgtgtgactatttcttcgttcttacattttttcttctttctgtgccccttttctgattggcgctacttgtgggcgctccccatggtatggagatacatggaatcgtcaactgccac

SEQ ID NO: 27936 - DNA, 1087 bp, Zea mays
  Clone ID: LIB4742-036-D7_FLI
tcgaggccggccgggaatcatcgctcgctgagcttccgttgttgcacagcacatcgatcgacgacgatatcgggaagcaatatggggttggccttgtcgcggctggaggagattaggacgcagtaccgcatggcagcggaagacggcgaggctgacagtccggcaccggcgccagtgtcgccgaccggtgctgctgctgcttccggcggcggcactgaaaagaagaagcaggcggacgactcgtcgtcgtcgtcaaagacgacagaatgggttcctcataagttctctgagatcgtcggtcaaagacgacctggtgaggatatgttccgagggatctaccttccacgatcggatcagcagccgaaaacaaagaagtactgggtagatgggagaaatgccaactgcttcatgctgttccctaaaggattcagcatcacctggggttcggacgaaaggtactggagttggcgcaagctcacacaagaagagaaaagagggatcgacgacgaggaggccaacatggaggtggcgtacctcaaggacgtgtgctggctggagatccgtgcgaagctggagatgtcccacctcactccgggattcacctacgtcgtcgcctttgtagccaagctcgaaccgaacggctacggctggtccgagccggtcgacctccagatcaagtgtcccggcgacatcgacgggaagcctcgtcagcagcggaaggagagtctatggaagacggttgacgggaaaaagtggacggacctcaatgtcggggaggtgaaggcggaggccgggcaaaagggggagatggagatcgccatgctcaggttaggtggggactggaagagaggactctccctcaggtacatcaagattgccccccaaaaaccctagctagctagctagctaggttcaccggccataaacgacgacgacgacgatctacgtactccgactgcatgcatgcgcgcgtctctgctgccgtagtacgtgcaccgtaataatatgcactcaccctgtctactcataagatgaatgaatgccatattgatggccatgcatggaataatatgcactcaccctgtcg

SEQ ID NO: 27937 - DNA, 1331 bp, Zea mays
  Clone ID: LIB4742-036-G10_FLI
ggccggccgggtcgcccctccccacacctccgctcccggcctgtgccgccgtcgccaccgctcgctcgcccgcctgcctgcctgggcccgcagcaccgactctgacagcgcccgtcctgcttcctgtaccggcaggcgagggagtggactcagggagtgtgatggcggcaatgccggcgccgcttctgcctctgcttctgctggtggtggccgcggcgatgacgctctcccccgccgccgcccgcattcccggcgtgtacggcggcggcggcggcggctggcagagcgcgcacgccacgttctacggcggcagcgacgcttcgggcaccatgggcggcgcctgcgggtacggcaacctgtacagccaggggtacggcgtgaacaacgcggcgctgagcacggcgctgttcgacgaggggctccgctgcggcgcgtgcttcgagatcaggtgcgaggagcagcccgggtggcggtggtgccggccagggaggccctccatcctggtcacggccaccaacttctgcccgccaaactacgcgctcccctccgacgacggcggctggtgcaacccgccccgcccgcacttcgacctcgccatgcccatgttcctccacatcgccgagtaccgcgccggcatcgtgcccgtctcctaccgccgggtgccgtgccgcaagtccggcggggtgcggttcaccatcaacggcttccggtacttcaacctggtgctgatcacgaacgtggccggcgcgggggacgtggtgcgcgcgagcgtcaaggcggccagcaccgggtggctgcccatgtccaggaactggggccagaactggcagtccaacgccatcctcgtcggccaggcgctctccttccgcgtcaccgccagcgaccgccgcacctccacctcctggaacgccgccccgagcacctggcagttcggccagaccttcgagggcaagaacttcagggtctgatgcatgggatgggatgcgatgggatgggacttgggagaagaagccaaaactcttttctttctttctttctttcttcttatacgtaattattactactcactcctgctaccgtactactgctactggagtactaagcgcgtgttactgtgttagagggtggtgggtgttgtcaatgcccgttttaaggtcacgccttccgcccgccttaatcccaggtccaggtcctctctgaaaaaatggagtcttttcttctgaacaagatgtgtggatgggattctctagagtttgtcagggtatattgccgtctcttcggtccctagcacttctctatgcatcaagtttgtgcctttggcttaaaaaaag

SEQ ID NO: 27938 - DNA, 1224 bp, Zea mays
  Clone ID: LIB4742-036-G2_FLI
gggcagccgccttgcgcttgccctctctgcgacgactgggtgcgccgccgccgccgctgtcctacgtcaggtgtcgaagccttcgccggcgaagagcgctcaccagattatccatctactagattcacccctggtggaggaggagaagaaggtaagcgaagatgctacggcggaacatacgtcagcgtcgggagtacctttactccaagagcctcgagggcccccagcgggcgctgttcgagaagaagcgccggatccgggcggcgctcgaggagggcaagcccatccccaccgagctccgcaacgaggagcacgacctgcggaggcagatcgacctcgaggaccaggagcgtcaagttcccaagagcatcgttgacaacgagtacgctactgccaccattcgggagcccaagatactattgaccacttctcgcaatcctagcgcgcccctaactcagtttgttaaggagctcaaggttgtcttcccaaactcacaaagaatgaaccgtggtggacaggtcatatcagaaattgtggaggcctgccgctcacatgatataacagatcttattctggtccatgaacaccgtggtcaacctgatggtttgattgtctcccatctaccacatggtccaactgcatactttgggttgctcaatgtggtgacacgtcatgatatcaaggacaggaagacgatgggcaaaatgtcagaagcttacccccatttaatactggacaacttctcaacccagattggcgaaaggactgcaactattctgaagcacctctttcctgtcccaaagccagattcaaagcgaataattacatttgctaacagagacgattacatctctttcaggcatcatgtatatgaaaaaccaggtggccccaaatcgattgacctgaaggaggtcggcccccggttcgagttgcggctgtaccagatcaaactaggaaccgtggaacaaaaggaagcgcagagcgagtttgtgctgcggccctacatcaatactgccaagaagcaaaagacgcttggagcgtgagctacactgcagtacagaacttaatttttttttggtcttcatcgtttatgctgtagtagcaacattcacagggtgattagatcaatatctgtcaatctaatagaagccgcaatgtacccctgactcgaacccaagctggctgacttttttttttttgtcacggatgtgggttccacatgtc

SEQ ID NO: 27939 - DNA, 1028 bp, Zea mays
  Clone ID: LIB4742-040-D8_FLI
ctcgaggccggccgggttttgttggtggtcatttaaccagcgcccgtcgcctccctttccccttccctccctccctctccccgcgggccgccagaggcaatttcgccctcgattcgaccccgattcgtccgcccgcgaccgggattccctccgccaagcgcggatctgaacgctgcgctccgtgtcgccgctcgaatccgccatgaagggggccaaatccaagggcgccgccaaggccgatgccaagctggcggtgaagagcaagggggcggagaagcccgccaagggcaggaaagggaaggccggcaaggaccccaacaagcctaagagggctcccagcgctttcttcgtgttcatggaggaatttcgcaaggagttcaaggagaagaaccctaagaacaagtctgtcgctgcggtggggaaagctgctggcgacaggtggaaatccctgagcgagtcggacaaggctccctatgtagccaaggctaacaagctcaagctcgagtacaacaaggccatcgctgcctacaacaagggcgagagcactgcagctaagaaggctcctgccaaggaggaagaggaggaagatgaagaggagtctgacaagtccaagtcggaggtcaatgacgaggatgatgaagagggtagtgaggaggatgaagatgatgacgagtgatggagctcctcgagacaatggaccgtgcttcatccaacaatggagcggctacacaaggccccgtggcgatcacaaaaaaggagcctatatccatgtactagaattattcagtttcactccacatcgtgatgttttatttttacttttgtcgtgctataacggatagcgctcctcgttggcgccactggcgggtggttctgcctctggtctggtgtgtttgtgtgtggtcacacttgccagccagcagaggcgcctgcttgtacctagattactgtttccattgtcgtcatcatcggctaacattgtcataatgtcagtttgggtaatgttagattaagtaattattgtgtac

SEQ ID NO: 27940 - DNA, 629 bp, Zea mays
  Clone ID: LIB4742-040-F8_FLI
ggccggccgggaagcggcgccaaaccaacgagagcacccggaccagacgcccaagtcgatcgccatggcgatgaagccggcggcggcggctccccctaccccggccgcggcgcacagcgtgttcgtctacggcagcctgatggcggacgaggtggtccgcaccatcctcaagcgcgtcccgcccgccgccccggccctcctcccaaactaccaccggttcaacatcaagggccgcatttacccggcgatcctgcccgttgagagcaagagagttgctgggagggttatcatgggtgttactgatgaagagctccagcttcttgacacgtttgaagacgtggagtacacgaggacaagagttgagatatcattggctgactcttccgagaacatgctggctgacacttacgtgtggagtgatgcagaggatctcaatctttatggagaatgggactttgaggtgatatgacttgtttcctgcagtcctggggtgttaatgctatgtgattatcatgctacgtggatcatatcaaaatgatgaactctatcagctactgccgtcctcgggatctaaaattctgttgcgaccacgcacaatgaatgtagtgattttctcgcatatataatag

SEQ ID NO: 27941 - DNA, 1196 bp, Zea mays
  Clone ID: LIB4742-042-A11_FLI
ctcgaggccggccgggacctcctgcaccccgacatccatcgatcgatcgatcgagctctagcaacaagaagaagaaggagaaggaggagatggggaggtccccgtgctgctgccacgacgccggcgtcaagaaaggcccgtggacggaggaggaggaccgcgccctggtggaccacatccagaggcacggcggccacgtcagcagctggcgcaacctgcccaaggccgccgggctcaaccgctgcggcaagagctgtcgcctccgctggaccaactacctccgccccgacatcaagcgcggcaacttcaccgacgacgaggagcgcctcatcatcggcctccatgcccagctcggcaacaggtggtcgacgatcgcgacgcacctggacgggcggacggacaacgagatcaagaactactggaacacgcacatccgcaagaagctgctgcgcatgggcgtcgaccccgtcacgcaccagcgcctgccccccgacgacctgctgctcgccgtctccgcctcccccacgacgacgatcctctcggcggcggcgagccagctgcggggcctcaacaccgctctcatgcaggtgcaagcgctgcagtttctgctgcaggccgtcagtggagttggaaacgacgttaacgccgccgccgctgctgctaatggtggtggtggtctcgtccctagcctcagcgcagccgcagataataacgccgttctgaacgcgagccgtagcgtcgttccaggcttccaggacctgcagctgacgacgatgaccaggcctcttctcgtgtctcacgcgaatcacgggtcagctgatcatcatcccagctacatcgcaactgatgatgtggtgcagcgacgactgaacgcttcggctcctccggtggtcggcggcggcgcctgtgcagagccgctggctgctgcattggcgtccacggcttatcgacaccaagtggcagctgccgctgacgagccggtgaatggttttgccgagctaatactgtcggagcccatcgagatgccgagcatgtgctctctggaggacgaagatcatttctggaaggacatgctcgtagagagcagcagcttcagcctgccactatgaaatttccaagcgtgggaacgggaggacgactggcggtgcatgcatgtgttgtacaaaatcgtgtgattatctcaatgtttctttaac

SEQ ID NO: 27942 - DNA, 1119 bp, Zea mays
  Clone ID: LIB4742-042-G6_FLI
ggccggccgggactcgccggccgtccttgaagagcgagcagcaatggcgcaggagatcgagcacacccacatccccatccgcggcctcaacctccacgtcgcacaagtaggcacaggtgaactgggcacggtggtgttcctgcacggcttcccggagatatggtactcgtggcgccaccagatgcgggccgtggccgcggcggggtaccgcgccatcgcgccggactgccgcgggtacggcctgtcggagcagccgccggagcacgaggaggtgtcccttgacgacctcatcgccgacgtgctcggcatcctcgacgccctcagcgtcccgaaggcgttcttggtgggcaaggacttcggcgccatgccggcgtacgagttcgcgctgcagcaccccatgtccttcgacgccatcatgcccgaaggattctacatcctgcgctggcgcgagccgggcagggcggaggccgacttcggccggttcgacgtgaggcgcgtggtgcgcaccatctacgtgctcttcgccggcgccgagatcccgattgccaaggaagggcaggagatcatggacctggccgacctgtccacgcccctcccggagtggttcaccgaggaggacctggacgcctacgccaagctctacgagaagtccggcttcgggtacccgctcaagatgccgtacagatctatgcacaagctcccgaaccggctggacgccaagttccaggtgccggtgttcatggtgatgggggagaaggactacgcgttcaagttcccggggttcgagaccgccatgcgcggcggggtcatggacaacttcatgccggacctcaagatcacctacatccctgaggggagccacttcgtgcaggagcagctcccagagcaggtcaacgacctgctcctcggcttcctcagggaccatccctccgccgcataagcagtgggtgagaccgtcagaataatggaatgcttcctgagcaacggtttctctactctattgccgttgcctggatccatgaccgtgttaattaattaattagtgcatatacttcctactcaaatcagatgtacgtttttttttatctgcaataaaaatcatcgtcgctgcattactct

SEQ ID NO: 27943 - DNA, 721 bp, Zea mays
  Clone ID: LIB4742-044-E9_FLI
ggccggccgggaccaaggaaattcacaaagcgatactagctagtccctaccaaagcatacttcctgaaacactcttgcaatccactgagttctgtttgttgagacgcatagagctagagtcgacaatgtcgctcgtgaggcgcagcaacgtgttcgaccccttctccatggacctctgggaccccttcgacaccatgttccgctccatcgtcccgtcggcgacctccaccaactccgagactgccgccttcgccagcgcccgcatcgactggaaggagatgcccgaggcgcacgtgttcaaggccgacctccccggcgtcaagaaggaagaggtcaaggtcgaggtcgaggacggcaacatgctggtcatcagcggccagcgcagcagggagaaggaggacaaggacgacaagtggcaccgcgtcgaacgcagcagcggccagttcgtcaggcgcttccgcctgccggagaacaccaaggtggatcaggtcaaggctggcctcgagaacggcgtgctcacggtcaccgtgcccaaggcggaggagaagaagcctgaggtgaaggctattgagatctctggttgagcatccaatccaatatggacgattggacgtggaaggtttcctgtgtcttctacgatataataattggtcgctgtcctgtgtggatgtttcctgtgtcttctacgatatattaatgtacttctgtctgtttcgtttcg

SEQ ID NO: 27944 - DNA, 1194 bp, Zea mays
  Clone ID: LIB4742-044-H1_FLI
ctcgaggccggccggaatacagttgcttcttctctgacgcaacgcaaccccaactccccaagctcgcggcaaccgcgagtacctcactctgtgcaaccgccgccacgcgcaggtgttgactgttgacttgatggatcagattatggattttcctgttgacccaatcatggcagctaaggcctataagtacaaagcagaaatacttattaatgaatacttgctagcagattcatatgttctatacacttctgtgctcgcggggctcctgatgtgcaagttgtcgtatgacttcacacacataatcagttctgtctacttcaaaggttatgcctctcttgcaaagatgaaaaaaattgaatggaacaacagaggaatgtccactgtccatgcaatattcattacaatgatgtcagtatacctagtcttcttatcagacttgttctctgatcagctggaaggtccagtaacatttcgcagttcacacctctccaatttaacattgggggtctctgttgggtacttcattgcggatcttgcaatgatattttggttctacccttctcttggtggtatggagtatgttttccaccacatcctgtgccttgtttgtgctgtatattctatgctttctggggaaggacagctatacgcatacatgtttctcatctctgagactaccaccccgggaatcaacctacgatggttcctcgacgttgctggaaagaaaaattccaaagcatacattgccaacggggttgcaatgtttgttacttggctgatggtccggatagttctgttcgtctacttgttttatcacatccttacaaattatgatcaggttaagcagatggacacttttgcttgtgttctgatatctgtcgcccccaccatactgttcactatgaatataatatggttttccaagatcgtaaaaggtctcaagaagacgcttgccaaaaggcacactgaataggggaatgcgcgtacatgtacatccatcccatctgtacattcacttacagctatgcacatagtagctaacgcagacatgctgttaattcagctttttcgttgtgactgctcagcttgttttctggatgttatatggttttgtgtgtatgttaggtctaactgcgtgtgcttaatgtaatagttcatcgatttgtaaaatttaggtctatgcgatagcttcag

SEQ ID NO: 27945 - DNA, 797 bp, Zea mays
  Clone ID: LIB4742-044-H10_FLI
ggccggccgggttgtttataggcgtcttgggtggcgcccctgatccactctccgcttcccgctccgatcgacctgctccctccccaccaccgagcccatggcggaccagctcaccgacgaccagatcgccgagttcaaggaggccttcagcctcttcgacaaggacggggatggttgcatcacgaccaaggagctgggcactgtcatgcgctcgctggggcaaaatcctacagaggctgagctccaggacatgatcaacgaggtcgatgctgatggcaacggcaccatcgatttcccagagtttctcaaccttatggctcgcaagatgaaggacaccgactctgaggaagagctcaaggaggccttccgtgtgtttgacaaggaccagaacggcttcatctcggccgccgagctccgccatgtcatgacaaatcttggtgagaagctaactgatgaggaggtggacgagatgatccgtgaggctgatgtcgatggtgatggccagatcaactacgaggagtttgtcaaggtcatgatggccaagtgagccacagaaccataatctgaaggcagagaagattatgcattgcatattagtcaagatgcaactttttattccatcgacttctagtgaaacattctgctagttgtagttgctgaaaaaggcaatgtagttcctgctttgttcttccctccagtgtgttttcagaactgttgtttcatgtgaacttgtaatgattgccctctctgctgtgtcttgattgcagttaaaatcatatgtagtttcaccccacccg

SEQ ID NO: 27946 - DNA, 590 bp, Zea mays
  Clone ID: LIB4742-046-F8_FLI
aaaagaaatcttgcaatccacccctcgaaagaaaacctcaatcaacaccagaagctctcgatcccaccgaggaagaagagaggaatggcgtccgaggaggagggagtcgtgatcgcctgccacaccaaggccgacttcgacgcccacatggccaaggccaaggaggccggcaagctggtgatcattgacttcacggcctcctggtgcggcccctgccgcttcatcgcgccactgttcgtcgagcacgccaagaagttcacccaggctgtgttcctgaaggtggacgtggacgagctgaaggaagttgccgcggcctacgatgtcgaggcgatgccgaccttccacttcgtcaagaacggggtgacggtggagaccgtcgtcggtgccaggaaggagaacctcctggcccagatcgagaagcactgcgccgcggccgtgcctgctgcgtctgcgtagagaggatggaccagcacgtacgtggcggtggtggtggtcttgtcgttttcagtttgggcttgtcagcgctgtggctgggtggtcgattgtgaactggagagcatgcagttctaatactttggaatttggatgtc

SEQ ID NO: 27947 - DNA, 868 bp, Zea mays
  Clone ID: LIB4742-047-D11_FLI
ggccggccgggatcccgggactgcggcgatgtcgtcggccgccgcctcctcctctcccgccgccggtagcgaaggaagcggtggtgcggtggaagggcgggagatcgcgtacgtgagctacggaggggagcatcacctgccgctggtaatgtcgctggtcgacgaggagctcagcgagccctactccatcttcacataccgctacttcgtgtacctctggccgcagctcaccttcctggcgttcgatgccagggatggcaagtgcgtggggacggtcgtgtgcaagatgggggagcaccggggtgcattcaggggctacatcgccatgctcgtcgtcctgaagccctaccgaggaaggggaatagcaactgagctagttactagatcaattcgggtgatgatggagtctggctgtgaggaggtgacacttgaagcagaagttactaacaagggtgcccttgctctctatggtcgcctggggtttatccgagcaaaaagactgtacaggtactatttgaatggtgtagacgcttttcggctgaaacttctgtttccacgccctgatcctggcctgcctccaatgatggttggcaacgacagggatgaccagaagatggattctccctacttgtgacagtaccctaatcagtatgtagaattgagttggagaccctgatcattcttttttgctctgtttcatgcttttatagctagcatgtaactgcatattgttgtactaacatataaattttcgaggtgttttatttcctcctgttctttgataaggatgtattaatcaacttcagatcaaacaataagaccgtgcagttcttttgctcaataaacaaaacgcatgccgcagttgccg

SEQ ID NO: 27948 - DNA, 725 bp, Zea mays
  Clone ID: LIB4742-051-B6_FLI
aatctccacctccctactagtagtactcttcggtgcagtccgcatccccacatctgaccgactctcaaagttcacagctccaatcctggtgcaagcgcacagtagcggagcaagatgcggggaggggaccggccatcggcgtcgctccagctcctctcgctgggcctcgtgctcctctacttcttcacctcaggcagcaccgttggtctcgtggagggacagaagacgtggtgcatcgccaagccgtcggcgtcgaacgagatcctggcgcagaacctggactacgcgtgctcccaggtgagctgcgccgtgatccagaagggcgggccgtgctactacccggacagccccgtgtcccgcgccgccgtcgccatgaacctctactacgcctacagcggcaggcacccctggaactgctacttcaacaactccgcgctcgtcgtgcagtccgacccaagctatggctcctgcacgtactactgaggaggagtggagagacgaagagagagatccattcgtgcctggcggctggctccactgcatccgtatgcagagtcttggttttctagtctagactgccaatttaccaaatgcacattgttgtgttgtgttgtgtacccgtgatgtagctgacatttggagatctcgcagcgaactcgtggatactccgtttcgcattcatgtgctttgaagttcattgcagcggcgctgcacaaatttcccgt

SEQ ID NO: 27949 - DNA, 683 bp, Zea mays
  Clone ID: LIB4742-051-B8_FLI
ctcgaggccggccagtgagcgcaatcctagccctagcccagcgccccctccggccctccctgcttcgtgcttggtagcgatggcgtcgttttctgaagcgcccccggggaacccaactgctggcgagaagatcttcaagaccaagtgcgcgcagtgccacaccgtcgacaagggcgccggccacaagcaaggtcctaatttgaatggtctgtttgggaggcagtctggtacaacacctggttactcttactcttcggctaacaagaacatggctgtgatttgggaggagagcactttgtatgactacttgcttaatcccaagaagtacattcctggaaccaagatggtattccctggactgaaaaagccacaggaacgtgctgatctcattgcatacctgaagaatgccactgtctgatgaggatgctgctgtggctctaaagatgaagagcagcgattcttttttgcagctaaaataatgacacgaatttactttaatttgacaggctggatgaacaagaaagctaagaactccaggtagttctgtaacggttttgtctattgctgggggcaaacaccaccccagaagagcttttgattaatggttgaaatgtgacaccactataatacgtttgacctgacgagcatttaaacacacatttcggaagcttttgattagtgtt

SEQ ID NO: 27950 - DNA, 962 bp, Zea mays
  Clone ID: LIB4742-052-F9_FLI
tcgaggccggccgggagagcagaggagcagccctgataggcaccaccaccagctagctctctctgtctgctgctcctctcaaaagagtcgcagttcactttgttgtactagagcgctgagcagatctttccttgtttctccattccggtacgaaggggtggggtccaagtgaagggaagggaagggaagggaagagaaggcctgctgcgagcgatgggcatcgtcgacgtcgtctccgagttctgctccttgccgaggactcgccggcatctcaagaagaggaagcagttccagacggtggagatgaaggtgcgcatcgactgcgaagggtgcgagcgcaaggtgaagaaggcggtggagggcatgaagggcgtgagctccgtggaggtggcggccaagcagaacaaggtgacggtcacgggctacgtggacgccgccaaggtcatgcgccgcgtcgcctacaagacgggcaagcgggtggagccctggccctacgtgccctacgagatggtgcagcacccctacgcgccgggcgcctacgacaagaaggcccccgccggctacgtccgcaacgtcgtctccgaccccaccgccgcgccgctcgccagggcctcctccaccgaggtccgctacaccgccgccttcagcgacgagaaccccaacgcctgctccgtcatgtagacccacccaccgaccccttgttttctttctggacttctggatctcgacctcaagaggtggcagctccatcgttcttcttgtctctagctattagttagtactagtatagtaggtgcttgcttgggagagttgctcttggagggaggttttgctcttcctgtttttttttcttttttttttcgttttccggtttcatgtagatgtagtgtgcgttttgatttttgtgaaaaaaaaataaaccagtttgtaacggtagaccacttgtgcaaactatgatcagg

SEQ ID NO: 27951 - DNA, 720 bp, Zea mays
  Clone ID: LIB4742-055-F9_FLI
ctcgaggccggccggggaacgccaaacagtgtctcttttccagttccagacctgaagaaactccgaccggtggcggcaggatctgtgccgcgatggcgacgtcgaacaccgctcggatggaggacggcggcggtgacctgcggagcaccatcaagaagtggaacatcatctaccctgtctacctcaactccaagaagacggtcgccgagggccgccgcatcgccgctgccaaggcctgcccggaccccacctgcatcgagatcgctgactgctgttcgcacctcaagatcccccacgccatcgagttggataaggcgtaccctcgggatttcttccaggtggggagggtcagggtgcagcttaagaaagatgacggctcccccgtcaatcctgctattaaaacaaagaagcagctgatgatccaagtagcagagctagttcccaagcatcacggaaggacaaagaagcaagagccagcgcccaatcccggtggcagttcaaagaacacaaaaggcgggaaaaagaaaaagtgatgcagtatcattgtgttgttgttttttttattattttgttcgtcatcatacactaagcttctgtgaaaatgaaaaagtcttggacgttgttgttatgttgccattatgccatttttcatgtataagaacttactaagaatcttccattgactcggtaaaatgcaacataattttttttggcttcgct

SEQ ID NO: 27952 - DNA, 1373 bp, Zea mays
  Clone ID: LIB4742-058-G6_FLI
ctcttcctccgccaggcgccagccgcccgttctccagcaatggcgtctgcctcgcacgccccgacgccgctgctcaaggacgagctggacatcgtcatcccgacgatccgcaacctcgacttcctggagatgtggaggcccttcttccagccctaccacctcatcatcgtgcaggacggcgaccccagcaagaccatccgcgtccccgagggcttcgactacgagctctacaaccgcaacgacatcaaccgcatgctggggcccaaggcctcctgcatctccttcaaggactccgcctgccgctgcttcggctacatggtctccaagaagaagtacatctacaccatcgacgatgactgcttcgttgccaaggatccatcagggaaggacatcaatgcacttgagcagcacatcaagaacctcctgagcccttccactccatttttcttcaatactctgtatgacccttaccgtgttggcgccgattttgttcgtgggtaccccttcagccttcgtgagggtgtcccaactgctgtttctcacgggctttggctcaacattccagactacgatgcccctacccagcttgttaagccccttgagagaaacaccaggtatgtggatgctattcttacgatcccaaagggcaccctcttccctatgtgtggaatgaaccttgcatttgaccgtgagctcattggtcctgcaatgtactttggtcttatgggtgatggccagcctattggtcgctacgatgatatgtgggcaggatggtgcacaaaggtgattacggatcatctgggcctgggtgtgaagactggcctgccctacatctggcacagcaaagcaagcaacccatttgtgaacctgaagaaggaatacaacggcatcttctggcaagaagagctgatcccgttcttccagtcggtctcccttccaaaggaggccaccaccgtccaaaagtgctacctcgagctggccaagcaggtgagggccaagctcggtaaggtggacggctacttcaacaagcttgccgactccatggtcacgtggattgaggcctgggacgagctgaaccccccaaaaggcggagtccccacagcaaatggccctccaaagaagtaaaacactatgtagtgtaaacttcactcgttcatgtggaccatcgtactgaaaggaaatactgttttggggttagtgctgatggactgagatcactccgctgtaactcgagattttcacgtcccggaaaccgccctgccggttttagggcgtttacatgtttttttttcatttttcgtgtgatacaacaggtgtaatgtcggattggattagaataaagtttatgatcttcatcttttcctcagaaaccg

SEQ ID NO: 27953 - DNA, 976 bp, Zea mays
  Clone ID: LIB4742-059-B10_FLI
ctcgaggccggccgggaccaagtgccaaccgccgtgccctctccctctctatctgcgacgtctctctaccgccgccgccgccctacgccacgcaaaaaacgtcacaagatgcgcccctgctgaaaacgcactcgatggcgtccgcgacgggggtttcctcctcggagatggcggtggaccacgcgacggggccgggcgccgtggacaagccgcggttcgatgctctgacgccgaatgagatgagcggcgggaggccccagttccggaaagtgcccgtcccgcagcaccggttcgcgccgctcaagcgatgctggatggaaatctacacacccgtatacgagcatatgaagatcgatatacgcatgaatctcaaggcaaggagggtggagctgaagacaaggcaagacacaccggacgtgagcaaccttcagaaatgtgcggactttgtgcatgcttttatgcttgggttcgacattgctgatgccgtcgccttgctgcgtcttgatgacctgtatgtggactccttcgaaatcaaggacgtgaagaccctgcgaggggagcatctgtcgcgtgctatcggccgcttatcagggaaaggaggcaagaccaagtacgctattgagaactctaccaggacccgcatcgttatcgctgatacaaagatccatatacttggatcctttgttaacatcaaggtcgcgcgggattcgctttgcagtctcatcttgggttcacctgctggcaaagtgtattctaagctaagggctgtatcagctaggttggcggaaaggtattaaattagattggttttgcttgtaccgtgtaacggttgcagttttgatcacagtatgttttactagcggatttgtgtgctcggggatgctgggagatttaaattggtgtgtacatgtgctcttgtgccaccacaatccatgtggtggggttgattttgatgaaaattagttattttcttaag

SEQ ID NO: 27954 - DNA, 1620 bp, Zea mays
  Clone ID: LIB4742-059-C2_FLI
ctcgaggccggccgggccgctccggctcgtccgccacttcccggccatggccgccaccgccgcagacgagttcgtgaagggccgcgtcttccccaacggcgtcgccgtcatcacgctcgaccgacccaaggccctcaacgccatgaacctcgaaatggatgttagatacaaggcacttcttgatgaatgggaaacaaatccaagtgtcaagtgtattcttgtggaaagcagctcttctcgtgccttctcagcaggtggggatgtgaagagacttgctaatgattgcaccatgccagaaataatagaggtattcacagtagagtactctttaatttgtaagatacatgagtatgcaaaaccttatatatgcttgatggatggagtgacaatgggatttggaattgggctatcagggcatggccgctaccgcattattacagagagaacactcctagccatgcctgaaaatggtattggcctgttcccagatgttggctttgcttacattggtgcaaaagcaccaggagggggtgcagttggagtttaccttgggattactggaaaaaggatatcatcacctgctgatgctatgttcataggccttggtactcactatgtaccttctgcaaatttgggttcactcaaggagtccctgctgagtgctaacttcaccaatgatcctcatagagacgttgagtcagttctgacaggatacaagaaagaaccagagtctgaaccacaactaaaaaagcttttgccatatatcatttcttctttcagtcctgataaatcagtggctgaatctgtggaagagctaaagaaatgtagccgaagtggtgatgctgcagtggcagaatgggccaatgaagctttagcaggaattgagaaaggcgctccattttctctttgtttaacacagaagcatttctctcaagttgcatcagcatatgggactagtgaacactatttatctaagctggctggtgttatgaaattggaatatcgcattgccttgaggtcgtcgattagaaacgattttgttgaaggtgtgcgtgctgttttagttgacaaggaccagaatccgaagtggaatccagccactctggaagaagtaaacatggccgaggtcgaatcagttttcgagccattaggggccgaggctgagttgagtgtgtgaaatatggcctgccacactcagttttcttatttgtgctgcaataataatgtatacaaaacagaaatgcgatgcccacagaaacaataaatgctgtgtcttcatgaactaactggagtggttccattttctcgaaaggggcgcgtgggaatctaaggtctgttgcttgctttcctgcctctgcctgcaatattccagccatggtaccaggtggatggccaaatactctagaagcgtttgccctgggcacttgcatgtagcttgatgtgagtagtgtaagaacaaccgggtacggaaaccgttgtctggccagcagatttcaaggcgtgtttagacaagtgtacaactgacgcgcacagatgtacggagtatatattatatgaaatatggcactaaaactcttttcccaggggctttgacgcaggcccggccgcggaaaaagtaat

SEQ ID NO: 27955 - DNA, 1137 bp, Zea mays
  Clone ID: LIB4742-059-D4_FLI
ctcgaggccggccggtcgattcccccactccactcgccgcccgcggctgggctgcgctgcgcatcgacgacggacgacgacacaatcacccccaccccccgtccaatcagcagcggacgagggacgaccacggccccccgtctgccgcacgcgcgcccgctctgccagctgctgctactactgctaaacctcgcccaccagtcgcgtgaggaaatagcaacctgcttgagctcgttcgctcgctcgcctgccttcttccctgggcaagctagctagctaggatcgaggaggagctctgcccggccatgcagcgtggggatccgctggtggtgggccgcatcatcggcgacgtggtggaccccttcgtgcgccgggttccgctccgcgtcgcctacgccgcgcgcgaggtctccaacggctgcgagctcaggccctccgccatcgccgaccagccgcgcgtcgaggtcggcggacccgacatgcgcaccttctacaccctcgtgatggtagatcctgatgcgccgagccccagcgatcccaacctcagggagtacctgcactgcatgctacaacacacgtactgtcaggatcttgtctacattctccacctcgtacggctggtcactgatattccggcgacgactggagtatcttttgggaccgaggtcgtgtgctacgagagcccacggccggtgctggggatccaccgggtcgtgttctgctcttccagcagctcggccggcagacggtgtacgccccggggtggcggcagaacttcagcacccgcgacttcgccgggctctacaacctcggcttgccggtcgccgccgtctacttcaactgccagagggagtccggaaccggtgggagaagaatgtgatctcgacccggctgggtggaaattaataagatgacgggtaatcgggtatatgtatatatttatatatatatatatatatatatgtatatgtacgtgtatttgatctggtggccttttgttacatttgggtgaggtgtatttgatattatctgtggaagattggcgcattctctggcgcatatttgatagctacatgtatctatttatacagatataaagcgagcaataatatgcgtatgagagggttcagccacact

SEQ ID NO: 27956 - DNA, 1051 bp, Zea mays
  Clone ID: LIB4742-062-B2_FLI
gcggcacccaaatcccaaacccctagcacacgcaccatggcggcgcagcagaagatccggtggggggagctggaggaggacgatggcggggacctcgatttcctcctcccgccccgcgtcgtggtcggacccgacgagaacggcctcaagaaggtcatcgagtaccgcttcgacgacgacggcaacaaggtccgggtcacgaccaccacccgcgtccgcaaactcgctcgggcgcgcctctcccgcagcgccatcgagcgccgccagtggcctaagtttggggacgccctcaaggaggacgcgggctccaggctcaccatggtctccaccgaggagatcctcctcgagcgcccccgcgccccagggagcaaagctgaggagtcagctgcatctggtgatccgctggctatggcgagcaagggaggtgctgttctcatggtttgcagaacctgtgggaagaagggcgatcactggacctcaaagtgtccgtacaaggacctggcaccaccgactgaaactttcacggacaggcctccaacgtcagatggccctcctgcaccaggtggtcctgctaagggagcatatgttcctccaaccatgagaggaggtgctgataggactggagactcgatgcgccgcaggaacgacgagaattccgtccgtgtgaccaacctctcggaggacacccgcgagcctgacctccttgagctcttccgtgcctttggccctgtcagccgtgtctacgtcgcggtggatcagaagactgggtcgagcagggggtttgggtttgtgaactttgttcacagagaggacgccgagaaggccatcaacaagctcaacgggtatggttatgacaaccttatcctccgagtcgagtgggcgacgccaaggcccaattagttttgccgctacctgctagaatcgcatatttctgttgaattatatcagtatgtttgtttgaattactggtacctgagtcatgaatttatcttgttggaaaaacctgttatgtgtggtttggttggacgagaataactatactcgcttcttt

SEQ ID NO: 27957 - DNA, 658 bp, Zea mays
  Clone ID: LIB4742-063-E6_FLI
ataacaagttcagcgccggggctccgccaacggcgccgccgccgccggcagcgtaccagcagcagcagcacggggcgaacatggacacttcacgccccggcggcgggctgaggaaatggtccaccggcctcttccactgcatggacgacccggggaactgtctcatcacatgcctgtgcccctgcgtcacgttcgggcaggtcgctgacatcgtggacaagggcacctgcccatgtatcgcgagcggactggtgtacgggctcatctgcgcgtcgacggggatggggtgcctgtactcgtgcctctaccggtccaagctgagggccgagtacgacctggacgaaggggagtgcccggacatcctggtgcactgctgctgcgagcacctggctctgtgccaggagtaccgcgagctcaagaaccgcggcttcgacctggggatcggttgggaggctaacatggaccggcagagacgaggagttgccggcggcggcgcggtgatgggggcgccgccggccataccgctgggcatgattaggtagatgattgattgatgcgaaatggcagaacttgctttcgtggttcttttgtttgactatgtaatgtatcttcgtttccatcgattctatgtaatttaactgtccctttttttttggcg

SEQ ID NO: 27958 - DNA, 1176 bp, Zea mays
  Clone ID: LIB4742-064-B2_FLI
ccgggcctcacaagcaccagaccaattaactagcttcttctagctctagctaggctcgtttgctgcaagaaggtaacagctagcaggcatggaggggaaggaggaggacgtccgcctgggcgccaacaagttctcggagcgccagcccatcggcacggcggcgcagggcacggacgacaaggactacaaggagcccccgccggcgccgctcttcgagcccggggagctcaagtcctggtccttctaccgcgccggcatcgccgagttcgtcgccaccttcctcttcctctacatctccatcctcaccgtcatgggcgtctccaagtccacctccaagtgcgccaccgtcggcatccagggcatcgcctggtccttcggcggcatgatcttcgccctcgtctactgcaccgccggcatctccggcgggcacatcaacccggcggtgaccttcgggctgttcctggcgaggaagttgtccctcaccagggcggtgttttacatcatcatgcagtgcctgggcgccatctgcggcgcgggcgtcgtcaaggggttccagcaggggctgtacatgggcaacggcggcggcgccaacgtcgtggcgcccggctacaccaagggcgacggcctcggcgccgagatcgtcggcaccttcatcctcgtctacaccgtcttctccgccaccgacgccaagaggaacgccagggactcccatgtgccgatcctcgcccctcttccaatcgggtttgccgtgttcctcgtccacctggccaccatccctatcaccggcaccggcatcaaccccgcgcggagccttggcgccgccgtaatttacaaccagcaccatgcctgggctgaccactggatcttctgggtcggccccttcatcggcgctgcgctggctgccatctaccaccaggtgatcatcagggcgatcccgttcaagagtaggtcttaaaggagccgatgctgctgcttcgagatgctgccggtcttgaaaggatggattcgtggctgtttcaaatgatcccctactatgttacgtgcagttccattccattcctctttcaaagttcggagctgcttttatccgaacccagacttgtaattcatctgtaccaattgtgtaatatgccgcgcctctgttatgtgcaattcaaaattatgagacagcgaggc

SEQ ID NO: 27959 - DNA, 876 bp, Zea mays
  Clone ID: LIB4742-064-E5_FLI
ccgggaaaaaaaaaaaaaaaaagcgactctggggctctggcctctggcctagcctccactgtctcccagtccccaggtcctcatcggcctccggtcttctggtctccccagatctcccaccggggaaccctacccgagcatcagccatggcgatcgcggcgcgcgtcctgcgccgcttcccgctccacctctacccctcgctcgctcgctctttctgcgcagtttccccggccgccgcctcggccgccccggcgtccgccaaggtcgccgatcgcatcgtgcgcgtcctcgccatcgatctcgagggggcgcgccgcgaggtcgtcggcctctccgggcagacactcctccgcgcgctcgccaacgcggagctcatcgagccggcctcccaccgcctcgaggatatcgacgcgtgctccgccgagtgcgaggtccacatcgcgcaggagtggctcgacaagctgccgccaccgtcctacgaggagcggtacgtgctcacgcgcgcgtccaggaaccgcgagctcaacaagcacgcgcgcctgggctgccaggtcgtcctcacgccggagctgcatggcatggtcgtcgctgtccccgagcctaagccgtgggacatcccgtaatggcctgccgcgacgaatggcaaggtgcggctttcgacgctgtgagccttccttcattcccctggctcggtcaagcttgtgcgcctctgccatacccttttatgttacggatttgatgaagaataatagtttgatgggaaaaacctgccattggttaacttttgttcttttgaatgtggagtgtaatggatgctgtaatgtggaatcccgttgcaattaccgcagttcaatgtttcatggtttgaagttttct

SEQ ID NO: 27960 - DNA, 656 bp, Zea mays
  Clone ID: LIB4742-065-D3_FLI
ctcgaggccggccgggagcagcagcagcacagtcatccacactaacgaacgaactcttgctccgatcacgagctagctgaggtcgacgatggcggctgtgctgaacagcaggaagacgccgcaggcggtggtggccgtgctggtggcggcggcgctgctggcttcgtccgcttcggcggcgatcacctgcgggcaggtggggtcgtcgctggcgccgtgcatcccgtacgcgacggggagggccagcgcgctccccgcgtcgtgctgcagcggcgtcaagagcctcaacagcgcggcgcggaccagcgcggaccgccaggcggcgtgccgctgcctcaagagcctcgccaacagcgtcaagagcgtcaacatgggcaccgtcgccaccatccccggcaagtgcggcgtctccgtcggattccccatcagcatgtccaccgactgcaacaagatcagctaagttacgacgaccaagctaataagcctaccgaacgtacacgtacgtcccgcgcgctgcacgagtgatgaagccagggaagaaataaaataaagccgctgtattgccaggagcagcatgcagtatcgatctatatatatactgtactgtagtactctatattatgtatgtgtggcctgcagtgcgagttgcttcgatc

SEQ ID NO: 27961 - DNA, 1583 bp, Zea mays
  Clone ID: LIB4742-065-G4_FLI
ggccggccgggacccgaagcacatcccgtcgcatcccatcccactaccacccatctcgtcgtccgccgattcgatccggttcttccaacccaggggctgtgatggcgacgaagaggagcgtgggcaccctcggcgaggcggatctgaaggggaagaaggtgttcgtgcgcgccgacctcaacgtccctctcgacgacgcccagaaggtcaccgacgacacccgcatccgcgcctccgtccccaccatcaagttcctcctcgagaagggcgccaaggtcatcctcgccagccacctgggtcgtccaaaaggtgtcaccccaaagtacagcttgaagcctcttgttccacgcttgtctgagctccttggagttgaagtcgtgatggccaatgattgcattggtgaggaagttgagaagttggctgccgctttgccagaaggtggagttctgctcctagagaatgttagattctacaaggaggaagagaagaacgaacctgagtttgctaagaagctagcatctgttgctgacctttatgtcaatgatgcttttgacacggcacacagagctcatgcttcaaccgaaggagttaccaagtatttgaagcctgctgttgctggcttcctcatgcagaaggaacttgactaccttgttggagctgttgccaacccaaagaagccatttgccgctattgttggtggatccaaggtctcaagtaagattggtgtcattgagtcgttgctggcgaaggtcgatatcctcatccttggtggtggtatgatctacacattttacaaggcacaaggatattctgttggaaaatctctcgtggaagaggataaacttgagctcgcaacttctcttattgagaaggcgaaggcaaagggggtttctcttttgcttcccactgatattgtagtagcggacaagtttgcagccgatgctgagagcaagattgtccctgccactgctatccctgatgactggatgggtcttgatgttggccctgatgccacgaaaaccttcaacgaagcattggacaccaccaagactgttatttggaacggccccatgggagtgtttgagttcgagaagtttgcagctggcactgaggcgattgccaagaagctagctgagcttacaaccacgaagggtgtcactaccatcatcggcggcggcgactctgtcgctgctgtcgagaaggctgggctggcggacaagatgagccacatttcgaccggcggcggtgcgagcttggaactcttggaaggcaagactctacccggtgtccttgccctcgatgacgcctagatccgctgctgctgctgctgctgctactcaggttctgccagctttgcgtgtcatcttgtttcggaccttggtgtaacgctgcaaggttaaggtttactcctccacacatggacttttggggataggcttgccatcgtgttttgctagatgagtcgtgaaataagcttttacttcctcgctgctgtgggtgaagtaactggaattcggaaatttggaactaacaaaaccccccgtggatttgtatgatatgttttgttcgacagtttgcgtctg

SEQ ID NO: 27962 - DNA, 1012 bp, Zea mays
  Clone ID: LIB4742-067-A8_FLI
ggccggccggggcacacgcacggccgttgagacttgagacagagacgcaggagcgcggaggaaaaggaggcccagaccaccgacggggaaaaaacatcacgaacaccgttctccatagcgggagtagtgaggaacgaaagagagggggcggcctagggcttcgattccgcagccatggacgccgctgacgtgtggggccgctcatcgtcctcgtcttcttcgtccgccgccgccgcgaggcgcctgcaggcgcgctacgatctgtacatggggatcgacgacgcggacgccggcttggacgaggtgacggagccgcgcggcggggcggagtcctacaactgccccttctgcggcgaggacttcgactttgtcggcctctgctgtcacatcgacgacgagcatgccgttgaggctaagagcggggcatgccccatctgtgctacaagggtcggaatggacttgataggacatttgactatgcaacatggaagttatttcaagatgcaacgcaggcgcagagtccgaaaagtatcttctgggtcccattctttattatctttgttgagaaaggacttgagaaatggcagtttgcagtcatttctcggtggatcatcctatgtatccaatcctcctgctgcagcaccagatccatttgtgtcatcaaacttgataacagcatcacaatagttaaggaacacgaagagaatcatcagactctgctgctgttgtcgtgatcacacaagaggcccatctaagttcgtatatgtacggatggaatatttatgcatgtatgtatttatgtttatctccctgcatttacccttagtgcaacagggtggtaggggacggttgtagtattccaaatttatgtatcaaataaatgaggacactgtccttggggtgcaattgtgtatataatataataatagggagctactcgccatgatttaggatattttatttaactgttgtaataatatgcagtgttttgtatgatgaccccattttttac

SEQ ID NO: 27963 - DNA, 1065 bp, Zea mays
  Clone ID: LIB4742-067-B9_FLI
ccgggacctttatttacacatatctctgtatttacaaattaggttgttgatgtaggctgtacgcacctgctagtttgctactcgatcctatatatcgtccaatcctatctgacctctcgacatctggtccttgattactcgtcctttttgcttggttatatcgtcgccccggccgcttgagctagcttcctctagttctcgcgctcgtcgtcgatcggttgtttgcatagcccacggcgagccgaaggaataatgtcgtcggcgcccctgcagatcgcgccggtgccggagcatgtgtgctacgtgcgctgcaacttctgcaacacaattctcgcggtcagtgtcccgagtcacagcatgctgaacatcgtcacagtccgttgtgggcactgcactagcctgctgtcggtgaacttgagaggactcatccaatcacttcctgtccagaaccaccactactcccagcagcaggagaatttcaccgtccaaaatatgggttttactgaaaattaccctgagtacgcaccttcgtaccgcatgccaacgacgctgtcagcgaaaggtgatctggatcatatgctgcacgtgcgcgctccagagaagaggcagcgtgttccttcagcatataacagatttattaaggaggagatacgaaggattaaagcatgtaacccggacataagccatagggaagccttcagcactgcagcaaagaattgggcacattttccgaatattcattttggtctagggccctgtgaaagtagcaacaatcttgatgaggccaccggtgcaatgtgccatccccggaaagtccaagatctctactaagacctatatcagcactgccctttgtttcctcttagttctggactagttggtgagtgccatatatatatatgcatgagtgtgatatgatcatgaggtaaggaattatgattaagatgatatatatgtacgagatgaacatgcccctaggttcatgaaagactaaataaggatcgtcatctcaccatgttatcataggtagtaactattgtttgaaataaattatcctttgtgtac

SEQ ID NO: 27964 - DNA, 1013 bp, Zea mays
  Clone ID: LIB4742-069-B9_FLI
cccatttcgaagcccaccgaattccctgcgattcctctcccctcgcctcctcgtctccccctaggggatcgtcggagaggaatcgcaaagagggccgtctcatccgagttaaggaagccatggagcacaaggaggctgggtgccaggcccccgagggacccatcctctgcatcaataactgtggcttcttcggcagcgcggcgaccatgaacatgtgctctaagtgccacaaggagatgataacgaagcaggatcaggccaagctggctgcctcctctatcgacagcatcgtgaacggcagcgacgccgtcatggagccggttgttgctggcagcaacacggtagtagctgttgcccaagtcgagttgcaaacaatgaacgtgcagcagcccgctgatgttgccggacccagcgagggggtggcggcgatctccaaaggggggaaggtagggccgaaccggtgcagcgcctgcaggaagagggttgggctcacgggattcaactgccggtgtgggaacttgtactgcgcgctccaccgctactccgacaagcacgactgcaagttcgactaccggactgctgccagggacgccattgccaaggctaatccggtggtgaaggcagacaagctcgacaagatctagggggggttccctacggttggtgtcaggaagattgtaaaccgcggtaactcgtcatgcggaactgctgccttgccccccgcgcctttctcttccatgtttgctgctacaatcttgttgttgggcattgcagtgcacggtgcacacttgtgtagcccgcctccgagaattctcctgcctctgcatctggtcagttcaaaaatgatttgcatgttggctatgttgtgtaagctctatttatggtggtctcgctgagacgggtatttggcttcgcagttatctagctatgtgatgtactgttgtcttgtccctgggtattatatggtacactgcagccagtaatagtaatctgcaactgtgcgttaaatggtt

SEQ ID NO: 27965 - DNA, 1426 bp, Zea mays
  Clone ID: LIB4742-070-D12_FLI
tgggaccctcgaggccggccgggggtctctccccttcgtcatcttcagatcggagctagcaccggcgacctcgtaacgaactcagcgcgccaaggaaatctcgcgtggtcgttacgtgccgagctcgcctcctcgcgcctatataacctggccatctgttcctcctccttgtctcatgaggtcgcgatcgaagccaccatctaccgggagcagagggtgtcgccgccgatgaacttgcgatgggccaacgcagggaccccggcgtgctgctcggggggttttccggttccgagggtcgagaagggtgtcttcatgaagccgatgcagtggagcgccctgtggtggcttgattcctcaccggacttggtgtccgccgcggaaccgcgctccgccccagtaaggttgtaggtttgcattcaacgattctgtgggttgaagcagctaagcaacttcttctgctggatccaccacacagtcgtcgaaagaaaggagcagaaacgagaaaacgctgaccatcgtttcttgcagaggaagcagttcgccttgccttcaatctgactacatatcctatagatctatatataaatacgaatggtctagcaagcaggaagccacgcccaaaccgcagaagaaacatgtcttcttcacctgttaagatcatcggccattcggtaagcccattctcgcaccgcgtcgaggccgctctgcggctcaagggcgtgccgtatgagctgatccaggaagacctgagcaacaagagcgagctgctgctcgccaaaaaccctgtccacaagaaggtgcccgtgctcctccatggcgatcgtgccatctgtgagtccctcgtcatcgtcgagtacgtcgacgagaccttcgacgggccgtccctcctcccggccgacccccacgaccgtgccacggcccgtttctgggcagatttcatggacagcaagctcctgaagccgttctggctggcgcactggacagagggcgacgcgcagaaggctcaggcggaagatgccaagcagaagctggcgctcctggaggcgcagctcgacgggaggaggttcttcgggggcgacaccatcggctacgtcgacatcgcagcctgcgtgctagctccttggctcagcgtcgtagaggaggtgactggagtggccgtggttgacgaaggtgagttccctgctctgcgccgttggtccagagagtacagctcctgcgaagctctcaagcagtgcgtcccggacagggaccagctcgtcgccttctatactgaaaggaaggaggcgtacaaagtgttcgctaatgcatggttgcagcagtagtttggttttgtgtgtggaataataatgtatggatcacagattgtctgtgctgaaataacagtaatgagcctagctagataagtaaataaccatatgcatgtccc

SEQ ID NO: 27966 - DNA, 1148 bp, Zea mays
  Clone ID: LIB4742-070-H1_FLI
ctcacacaccaccatcgaaacacaaaccagcagcaggcagagcaacgactagctgccaggggtgctagcaagagtgcaacaatggccaccgcgctgtccttcaaggccttggcactggccgcgctcctctccgtggtcgtcgtcacctctggcgctcgcgccgagcaacagctcaagcgcaacgccaccaccgcctcgcaggacagatccttgttgtcctacagcagtggctggctgccggccaaggccacctggtacggcgcccccaccggcgccggccccgtcgacaacggtggtgcgtgcgggttcaagggcaccaaccagtacccgttctcgtccatgacgtcctgtggcaacgagcccatcttcaaggacggcaagggttgcggctcatgctaccagatacggtgcctgaagagcaaccacccggcctgctccggcgtggcgcagacggtgatcatcacggacatgaactactacccggtggccaagtaccacttcgacctgagcggcacggcgttcgggtccatggccagctggggcctgaacgacaagctccggcacgccgggatcatcgacatgcagttcaggcaggtgccgtgcaacttccagggcctgaccatcaccttccgcgtccagcacggctccaaccccatgtacctggccgtgctcatcgagcacgagaacaaggacggcgacgtggtgcaggcggacatcatgcagagcaactccggccactgggagcccatgcacgagtcctggggctccatctggaggatcgaccccaaccgcccgctccgtggccccttctccatgcgcatcaccaacgagtccggcaggcagctggtggccaagaacgtcatcccggccaactacatccccgacgtcgactaccgctccttcgtccagtactaatgatcgacctcggtcattgcttgccgcttattaagcgtttaattgtttcttctttatttaattagtggctgccgttgccgaccgaacatgcatgcatgtgggggaaattggaggaggcaagcatcaatatgcaatgtgctctcccgcccactgtcactctaccgttattaattaccagtgtgtaaccagcaaatcatactacatatatatacatggttatataatttcatact

SEQ ID NO: 27967 - DNA, 695 bp, Zea mays
  Clone ID: LIB4742-071-A6_FLI
cgattgggtacctcgaggccggccggggtctccgtccgtatataagaagccagatttcgaattccctcctcctccgcctctcccgcagtccctctcctcctttccctcccccgtcgcgatcgctctgtgctccgcctccgtccgtcaaggcctgctcttgcgccgttcctcctcgcccaatccgccaggggatggccacattcgagctctaccggaggtccaccattggcacctgcctcaccgagacgctggacgagctcgtctccagcggggccgtcagcccggagctcgccatccaggtccttgtgcagttcgacaagtccatgactgaggcgctggagatgcaggtcaagagcaaggttagcgtcaagggccatctgcacacctacaggttctgcgacaatgtctggaccttcattctaacagatgcaaccttcaagagcgaggagattcaagaaacactgggaagggtgaagatcgtggcctgcgattccaagttgctgcaacctcagcatccataaaacaagagtcgcctgctccatacatgttcagctcacggtttcatgcttattactggcgccacccaaaccttcctagttcatgtgaatttttgctccctctgaactttttcctagagtaccatggctgtcaacatgttatccgtactgaaatatggaatacatggttttgctttc

SEQ ID NO: 27968 - DNA, 1113 bp, Zea mays
  Clone ID: LIB4742-072-C11_FLI
cctcgaggccggccggaccccgcatctcctagccccagctagtagatcattggacacatatcgaaacagctctctagctagcgcgctcgtcgtctaacctggcttccggcatggcttccaagcagatcggagtcttgacctgcttcattgccatcaccgctctcgccttccgtccctgcgcatccgccgtgcccatggacggcggctggtcgaacggcggcgccacctggtacggccccgccaagggcgctggatccgacggtggtgcgtgtgggtaccagggtgccgtcgaccaacctccgttctcgtcaatgatcaccgccggcagccaatccatcttccaggacggcaagggctgcggcacctgctaccaggtgaagtgcaccggacacgagtcgtgctccggcagcccggtgacagtggtcatcaccgacctgtgccccggcgctgcgtgccaggcggagcccgtccacttcgacctgagcgggacggcgttcggtgccatggcgaagcccggccaggccgaccagctccggaacgccggccgcctgcaagtccagtacattcgggtggcgtgcaactggaacggcttggacatcgccttcagggtggacgccggctcaaacgccaactacctggccatggccatcgagtacgagtccggggacggggacctgcgcgccgtggaactgaagcagagcggcgcggcggcgtgggcgcccatgcaacgctcctggggcgctgtgtggcagtacaagtccggctccaccaatctgcaggcccccctgtctgtccgcctcacctcgggctccggcagggtcctcgtcgccagcaacgtcatccccgccggatggcagcccggcagaacctaccgctccgtcgtcaacttcggaggaaaccatgcataacgagtgatattaaggatgtcgtgtgcagatgtctccatctaagatgcatgcatatatgatctgtgtggccagctagctgctagaccatctcactccctgagtctgctgatgctcagccaataatgaatcattccatctcgatcggaaattcaacatatataataatgcaagcaccggaaataaaattctactgtgttctgtgact

SEQ ID NO: 27969 - DNA, 1396 bp, Zea mays
  Clone ID: LIB4742-072-C4_FLI
ctcgaggccggccgggaccttctcgcgcggcgacgtgctccgctcgcttccagccacctcgctcgccgcccgcctcggaatccccgccgcgagatcttgtcccccggaggatggagaatataaggtacccaagcattcaacgtttctcccaaattataagggattctaagtgaactaatcctcaaactcactttaaagggccacatttacatgcatactactattgttgtctatcaccgacccaaatataggtgaaaacagtaaaagttagcaatctttcattaaatgctttgaaaagagagatcacagagttcttcagtttctcaggagatatagaatatgttgaaatgcaaagtgaatctgaatggtcacagcttgcttatgtcacatttaaagactcacagggagcagacactgctgttcttctctcgggggcaacaattgtggatcgtgctgtcattataactcctgctgagaactatcagctgcctcctgaagcacacaaacaattatcgggagcaaacgtctctactgaatcagcagtgaggaaggcagaagatgttgtgagcagcatgctggccaagggcttcgtcctcagcaaagacgctctcaacctggcgagatcatttgacgagcgtcacaacatcctatccaacgccactgccactgttgcatccctagaccgccagtatggcctgagcgaaaagatcagtctcggaagggccattgtcggcagcaaggtcaaggaggtggacgagcggtaccaggtctcagaactcaccaagtccgccttggctgccgccgagcagaaagccagcgtcgcgggctccgctatactgagcaaccagtatgtctcggctggtgcctcgtggctaacaagcgcgttcgatatggtaacgaaggcagcgggcgacatgacctcgatggccaaagataaggtggagagggccgaggaggagaggaaagccatcatgtgggaggagaggagtgggctggtcagcgagtacgcgaagatccatcttgacgagccctcttcgtgggagcccgcggttctgcctctggaatcagtggacgagcagaagctccaagctgtctgacacgcagagaccgagtctctcgcacgaaattcttttttgcagctcgtcctatatatagattgttctttttcgtcggtgcactggatcaaaacaattgcgcttgtcggccagtgccgtgtaaatttctgagagttggtcttgtgttattaccaggttttgttcgtttctttcgttttggagagagtggtgctaccagcactactacactagactactctgtgtgaatggaatactactgtactttgtctcttcttctactactactacagaaacataatataacttccttcgttagatcc

SEQ ID NO: 27970 - DNA, 1374 bp, Zea mays
  Clone ID: LIB4742-072-E2_FLI
tcgaggccggccgggacaatagatctcgtctccctccgtacccctcctgtccgtcattttctcgtcacctacatatctccggctcgccgtcggcgtcgccgcctcctcctccttcgcccgctggaggcgcccgtagcgacctcaccggtgggtttgctgaagtgacatcggccgaggtggaactggttggggggagtccatttcgggttcgagcagcctgagcctgcgcgccggcagcgacggagttgagttgagatggcaaacattccccactccttcgcaggggcctcgcctccgtccccctctccgatggctggcagcagcagcggccccgccccgggccaggcagccaaggacaagaagatggcgtccgcggaacagctggtcttggaactctgcgaccctgaactgcgcgagaacgctttacttgagctctccaagaaaagggagatttttcaagatcttgctccgctgctttggcattcatttggcacaattgctgcgttactccaggagattatatccatttacccgtcactatcaccccccacactgtcacctggagcatcaaaccgagtttgcaatgctcttgcacttctgcagtgtgttgcatcgcaccctgagaccaggatccttttcctaaatgctcatattccattgtacctgtaccctttcctcaacactaccagcaaaacgagaccttttgagtacctaaggcttactagcttgggggtcattggtgctcttgtcaaggttgatgatactgaagtcatcagttttctgctgcaaactgaaataattcctctgtgcttgcgaaccatggagatgggtagtgagctatccaaaactgtggcaactttcatcgtccaaaagattcttctagatgatgttgggctgcgctacatttgtgccactgctgagcgtttctttgccgtaggcagtgttttagcaaacatggttgtttcacttgctgatcagccctccacaaggctgctgaagcacatcattcgttgttacctccggctgtcagataaccctagggcttgtgctgcattgcagagctgccttccagacatgctcaaagatgggaccttcaataactgccttagggatgatccagccacaaggcgctggctccaacagctcctgcacaatgtgactggcggaggcgtgggaggtgctcctcaaccaggaatggatcccatgaacatgggaatgtgatgtgcattctagttgttgcaattcactgcaataacacatcacctctcagtgaattacaactagagaagatctggccactgtccagatgaaacttagtatggtgtagtctgactttctgccggggtaaaaataggaatgttgtttggtattgcc

SEQ ID NO: 27971 - DNA, 1097 bp, Zea mays
  Clone ID: LIB4742-072-G11_FLI
accccgcatctcctagccccagctagtagatcattggacacatatcgaaacagctctctagttagcgcgctcgtcgtctaacctggcttccggcatggcttccaagcagatcggagtcttgacctgcttcattgccatcaccgctctcgccttccgtccctgcgcatccgccgtgcccatggacggcggctggtcgaacggcggcgccacctggtacggccccgccaagggcgctggatccgacggtggtgcgtgtgggtaccagggtgccgtcgaccaacctccgttctcgtcaatgatcaccgccggcagccaatccatcttccaggacggcaagggctgcggcacctgctaccaggtgaagtgcaccggacacgagtcgtgctccggcagcccggtgacagtggtcatcaccgacctgtgccccggcgctgcgtgccaggcggagcccgtccacttcgacctgagcgggacggcgttcggtgccatggcgaagcccggccaggccgaccagctccggaacgccggccgcctgcaagtccagtacattcgggtggcgtgcaactggaacggcttggacatcgccttcagggtggacgccggctcaaacgccaactacctggccatggccatcgagtacgagtccggggacggggacctgcgcgccgtggaactgaagcagagcggcgcggcggcgtgggcgcccatgcaacgctcctggggcgctgtgtggcagtacaagtccggctccaccaatctgcaggcccccctgtctgtccgcctcacctcgggctccggcagggtcctcgtcgccagcaacgtcatccccgccggatggcagcccggcagaacctaccgctccgtcgtcaacttcggaggaaaccatgcataacgagtgatattaaggatgtcgtgtgcagatgtctccatctaagatgcatgcatatatgatctgtgtggccagctagctgctagaccatctcactccctgagtctgctgatgctcagccaataatgaatcattccatctcgatcggaaattcaacatatataataatgcaagcaccggaaataaaattctactgtgttctgtgacc

SEQ ID NO: 27972 - DNA, 1452 bp, Zea mays
  Clone ID: LIB4742-072-H1_FLI
ccggggccccgtcccaaatccccctgtcccgctaggattccccccaaaccctcccccaaaaccccagagcggagaagagcgcaagatgttcggcttcgggcaccacggccaccacggccagaacccgccggcgcacggcggcgtgcaccagcccaccttcaagatcttctgcaaggccgacgaggggtactgcctcaccgtccgcgacggcaacgtggtgctggcccccgccaacccgcgcgacgagcaccagcactggtacaaggacatgcgcttcagcacccaggtcaaggacgaggagggcaaccctgcgttcgccctcgtcaacaaggccactgggctcgccatcaagcactccctcggccagtcccacccggtgaagctggtgccgttcaacccggagtaccaggacgagtcggtgctgtggacggagagcggcgacgtgggcaagggcttccgctgcatccgcatggtgaacaacatccgcctcaacttcgacgccttccacggcgacaagggccacggcggcgtgcacgacggcaccaccgtggtgctgtgggagtgggccaagggcgacaaccagagctggaagatcctgccctggggcgacgaggcctacgccgggggcggcagcagcgccgccaacgcgccccgcttcggcggcggcgagcccaccgtccgcatctactgcaaggccgacgaagggttcagcgccacggtccgcaacggcgccgtgtgcctcgcgcccaccaacccgcgcgacgagtaccagcactggatcaaggacatgcgccacagcaacagcgtcaaggacgaggaagggtacccggccttcgcgctcgtcaacagggtcaccggcgaggccatcaagcactcccagggcgagggccacccggtcaagctggtgccctacaaccccggctaccaggacgagtcggtgctgtggacggagagccgcgacgtcggccacggcttccgctgcgtccgcatggtcaacaacatctacctcaacttcgacgccttccacggcgacaaggaccacggcggcgtgcgcgacggcaccaacatcgtgctctggaagtggtgcgagggcgacaaccagcgctggaagatcgtcccctggtaaatgtgctgttctgtggctgcactggtcatcaccatgatctggagctttgaaggcatagccacctgtggtcagcaactgctgccgtgttgctagaataaagttggtggcgatcgatcgatcgatctttggtgatgggtgtccctccctgtgtgtttgtgtttagttccagtcgtttgtgaggaagtcagttatgtttgagtgagaggggtacttcgctcttcggttaactctgtacttgtcatgaggagagttttcatacccggagtgtagaactctgtactgtactcggatccttcctttttcatccaagtgggttttattttatg

SEQ ID NO: 27973 - DNA, 1017 bp, Zea mays
  Clone ID: LIB4742-073-B10_FLI
tttcttgcgagtgaggccaaagccgagcaaacaaaacgatatgccgctgccctgaaccgagaccaccaccgctctgcctcgcctcgcctcacctcacctcacctcgccgactagggttttgtaccgccgtggatctcgccgtccccgccatggacgtctcgcacgcgggatcctccgtcgccggcgaggctccgacgaccggggagcaccggatggggactaccatcgtcggggtctgctacgagggcggcgtcgtcctgggcgccgattccaggaccagcactggaatgtatgtagccaaccgtgcttcagacaagattactcaactgacagacaatgtgtatgtctgtcgctctgggtctgctgctgatacacaagtcatttcggattatgtacgctatttcctccaccaacacacaatccagcttggacaaccagctaccgttaaagttgcagccaacttgattaggttgctagcttatcagaacaagaacatgttgcaagctggcatgattgttggaggatgggacaagtacgagggaggccaaattttctcagtccctctcggtggaacgatcttgaagcaaccatttgcaattggaggttcaggttccagttacctatatgctcttcttgatcatgaatggaaagagggaatgagtcaggaagaggcagagaaatttgtggtgaaggtagtttcccttgctatggcccgtgatggtgctagtggaggggttgtccgtacagttacaataaatgcggatggcgtgaagaggaacttttaccctggcgacaagctacccctgtggcacgacgagctggaaccccagaactcgttgcttgatattcttgctgctgggaaccctgatcccatggtgcagtgaactcgccctccacttactttgtgaacttttcactgtatctgacttgttcttgattatttctccctgaactatgtcagaccagagtaatttacgaattgttgttatcgcaccttaataaattcatgtttagccg

SEQ ID NO: 27974 - DNA, 657 bp, Zea mays
  Clone ID: LIB4742-073-D3_FLI
atcgaggccggccgggaactctcacacagagaccacccacctgcgctgcgcctcggttttacggcccttccctcaccgccccgcgcgagcgaagccatgaagcttgaggtcatgccgaagcagcgggtgctggaggcggagcagagggaggaggccatggagatgagtggcctggacctgtggaagcacgagaagcccccaaggatctgctccttgcccccgccgctcccggcgccgccagcgtgcgacgaggcggcgctcgtgccgccgctcaacttcgccatggtcgacgacggcatattccgctccggcttcccggagaccgccaatttccggttcctcaagtccctcaacctccgctccatcgtgtacctgtgcccggagccgtacccagagacgaacacggagttcctcgagaagaacgggatcaggctccaccagttcggaatcgaggggcgaaagcaccttgagctgttcagcttccttctgtgtttggcagcctaatcaattatggggagatatctatgtggtaatggctgtgtcaaacagcatacacgatttttttagaaatgtaaccgatttatctttatgagtttgtgagaaaagctgcaagatattcctgtaacttcagcaatgacgtctgaggataatgaatgc

SEQ ID NO: 27975 - DNA, 1434 bp, Zea mays
  Clone ID: LIB4742-073-F7_FLI
tcgaggccggccgggaattcctcatgcaggcagaggcagaaacactgcccgaggctgatgcctcgatggtgcgatcccgttccctgtcgccatcgagttcgttttttcgttgcttgacagccttaaagcggcgcacgaatgccacgagccactgaggcggcttcccagttcactccaggcccagggcgcccggtcgccatgaattcccgctcctcctccggcggcgtgcggtccgagagctcgctgtcgttgggggagcgcctctgcgcggtcttcttccccgtcatcgccatcgccgaggccgttttcttcgccttcaccgactgcctcgcggacctctgcaccgactccggctcctcgcactcgcgccgcttcggcgcgggcgcgtcctcctccgccgccaggaacagtcggagcaaccattgccagcaccaccacagacctttcctacgccgcgccgctgcgggtggatggacctcccccaacctccgccagctcgcacgcctcgccgacgagtcccgatgcttctcggtgaacgaggtggaggcgctctttgagctctacaagaagatcagctgctccatcatcgacgacggcctcatccacaaggttttttatttgtttgatgagaagaaaaatggtgtgatcgagtttgatgagtttattcattccctaagtgtcttccaccccttggcaccaattgaagacaagatcgattttgcatttaggttgtatgacttgagacaaactgggtttattgagcgtgaagaggttaagcaaatggtaattgctattttgatggagtctgatttaaaattatcagatgacttactcgaggccatcatagataagacatttgaagatgctgatgcggataaggatggaaaaataaataaagaggagtggaaggaatttgcgttacgccaccctaacctgttaaagaatatgacactgccttatctgagggacatcacaaccgtcttccctagtttcgtcttcaacacggcggtggaagattagtcgctccaattgaaggcaataaagcagtactggggattgcttgaggtgcacaaggttcctgaaacctgacggctgttggtcgccttcaaccactgagaatccgatgtgttctgagcatcaaggcagccgccacctgaccatcactcctgctataaattataatataaattataaggctcatccggggtggcagatcggcagcgggaacttacctgatataatttcttgctgccgtttttgcgcagcaatggattgagagttggtagctgtagatacatctagcttccattctatacgtggggatccaggaactgtaaatacgttctattggaattgtgtcggaaagttcctagtacgccagccagatctaggataagccagagcttgtttcttgcagcggttttcttgcccctc

SEQ ID NO: 27976 - DNA, 1095 bp, Zea mays
  Clone ID: LIB4742-076-G11_FLI
ctcgaggccggccgggaccttccttctctacttctctcctctctcctctctcccaccgcatccgatctcgtacctcacttcatcgccccgccccgccccgccgccgcttcgacggcgcgccgaccggctaggacgcgcctccgacccggatagtgttccgctcggtcgaatccgacggccgctcgctgctgcagcgggcgcttgctgtgcgtcgcgtgggctcggctggaggcaggcggaacctttcctgggtctcggagatggcggcgcctccggcgagggcccgggccgactacgactacctcataaagctgctcctcatcggcgatagcggtgttggggaaagttgtctccttttacggttctcagatggctccttcactactagctttatcaccaccattgggattgacttcaaaataagaacagttgagcttgatggtaagcgcataaagttacagatatgggatactgctggtcaagaacgttttcgaactattacaaccgcctactacaggggtgcaatgggaattttgcttgtctatgatgttactgatgagtcatctttcaataatataagaaactggataaggaacattgagcaacatgcttccgacaatgtgaataaaattttggtaggcaacaaagctgacatggatgaaagcaaacgcgctgtaccgacttcaaaagggcaggctcttgctgacgagtatggcatcaagttttttgaaacgagtgcgaagaccaacctgaatgtggagcaggtttttttctccatagcaagagatatcaagcaaaggctttctgaatctgattcaaagccagaggatcgcacgatcagtatcaacagacctgatggcggtgaggcttcggcttcacaaaaatcagcttgctgcggatcgtgagggggttacattgtcacaaggaagataaatagtgtgataccatgcctgtaatttacccttctacctttttatctggcttaatcgtccacttctaacttttaattgcaattgcttggattcagacttctgtgttgtaatgtgaacaattttagttgtacccccctgttagcaatgcaagtgctcgtaagcc

SEQ ID NO: 27977 - DNA, 784 bp, Zea mays
  Clone ID: LIB4742-076-G12_FLI
ctcgaggccggccgtacttttccggcctcccattcctcgcgcggcgaccacccgattcgaagcgtgcggagagaccgaagaagcgggagagatggctcgtaccaagcagactgctcgcaagtccacgggagggaaggctcccaggaagcagcttgccaccaaggctgcccgtaagtctgcccccaccactggtggagtgaagaagcctcaccgctaccgccctggaactgttgccctccgtgagatccgcaagtatcagaagagcactgagctgctgatcaggaagctgcccttccagaggctcgtcagggaaattgcacaggacttcaaaactgatttgcgtttccagagccatgcggtgcttgccctccaggaggctgctgaggcataccttgttggcctgtttgaggacaccaacctgtgcgccatccatgctaagcgtgtgaccatcatgccaaaggacattcagctggcaaggaggatccgcggcgagagggcctaatcgccacctcaaacatcgtgacaaaaacatgaaggcctggggttattgttaatctggtgccattgtaaggacatatgagtagggtttgttttgtggatcgcaagtttctcttctgctactgttgctgctacctttgctggtgttattgctagggtcgaatacttaagttaactatgcgctgacagtctggactagcagtgttatgtgcgctgctggaccttgcgcgcaatgctgtggccgatttgttcgttaatgtcaagaattgtgttacagtgcgtgtat

SEQ ID NO: 27978 - DNA, 1015 bp, Zea mays
  Clone ID: LIB4742-077-E9_FLI
tcgaggccggcccatttcgaagcccaccgaattccctgcgattcctctcccctcgcctcctcgtctccccctaggggatcgtcggagaggaatcgcaaagagggccgtctcatccgagttaaggaagccatggagcacaaggaggctgggtgccaggcccccgagggacccatcctctgcatcaataactgtggcttcttcggcagcgcggcgaccatgaacatgtgctctaagtgccacaaggagatgataacgaagcaggatcaggccaagctggctgcctcctctatcgacagcatcgtgaacggcagcgacgccgtcatggagccggttgttgctggcagcaacacggtagtagctgttgcccaagtcgagttgcaaacaatgaacgtgcagcagcccgctgatgttgccggacccagcgagggggtggcggcgatctccaaaggggggaaggtagggccgaaccggtgcagcgcctgcaggaagagggttgggctcacgggattcaactgccggtgtgggaacttgtactgcgcgctccaccgctactccgacaagcacgactgcaagttcgactaccggactgctgccagggacgccattgccaaggctaatccggtggtgaaggcagacaagctcgacaagatctagggggggttccctacggttggtgtcaggaagattgtaaaccgcggtaactcgtcatgcggaactgctgccttgccccccgcgcctttctcttccatgtttgctgctacaatcttgttgttgggcattgcagtgcacggtgcacacttgtgtagcccgcctccgagaattctcctgcctctgcatctggtcagttcaaaaatgatttgcatgttggctatgttgtgtaagctctatttatggtggtctcgctgagacgggtatttggcttcgcagttatctagctatgtgatgtactgttgtcttgtccctgggtattatatggtacactgcagccagtaatagtaatctgcaactgtgcgtt

SEQ ID NO: 27979 - DNA, 929 bp, Zea mays
  Clone ID: LIB4742-077-G3_FLI
gccacttgcgtagagagttgggcgcagagaatccccaggcaaacaaacagggtagagggagaggagaggagaggttgggtctggaacaccatggctccgatgaagctgtacggggcggtgttgtcgtggaacgtgacgaggtgcgcaacggcgctggaggaggccggctccgactacgagatcgtgcccatcaacttcgccaccgccgagcacaagagccccgagcacctcgtccgcaacccgtttggtcaggttccagctctgcaggatggtgacttgtacctcttcgaatcacgagcaatctgcaagtacgctgctcgcaaaaacaagccagagctgttgagggaaggaaacctcgaggaggcagcaatggtggatgtttggatcgaggtggaggctaaccagtacaccgctgcactgaatcccatcctcttccaggtcctcatcagtcctatgcttgggggaaccaccgaccagaaagttgtggatgagaaccttgagaagctgaagaaggtgctagaggtgtacgaggcacgcctgaccaagtgcaagtaccttgctggagacttcctcagcctcgccgacctgaaccatgtgtctgtcactctctgcctgtttgctacgccctacgcatctgtgctcgacgcctacccgcatgtgaaggcctggtggtctggtctgatggagaggccgtctgtccagaaggtcgctgccctgatgaagccatctgcttgaaacggttgccctgtcaatcggtgaatggaataagccaagtctgttctgggttgtttgcttgttcagtgatgtgtcttctatgacgaaagttgagtgcctatgtgtgagcatgcttgcttgtaacgagaccttgaattgttcggaaatgagcattcctgtgctcttctttaaaataaactttgccttaggttccc

SEQ ID NO: 27980 - DNA, 1201 bp, Zea mays
  Clone ID: LIB4742-079-C2_FLI
ctcgaggccggccgggcttctctgtttcctctctgttgttctcttccaaggagaacaaccaccgtctctctcccccgtctatctcttcttggagcctggagaagaggaaggagcagggaacgggggaagaggttgctgcgacagctcaggtctcaagtttggattcagacaagtagacaaacaccagttggttaagatggcagctggtttccagatcggtgtgatcgggtcacttgcactctctgttgcatcttcagtttccattgtcctctgcaacaaagctctcatcagcacacttggttttccattcgctacaacattaacgagctggcatctgatggtgaccttctgcaccctccatgtggcacagcgcttacgtttcttcgagcccaaggcaattgatggacagacagtcatactctttgggttgctgaatggcacgtcaattggtcttctcaatctgagtttaggattcaactccattggattctaccagatgacaaaattggcgatcatacctttcactgtgctattggagactatcttcttgaagaaaagattcagcgagagtatcaagctttctcttctggtcttacttcttggagtaggaattgcttcagttactgatctcaagctaaatctgcttgggtccatcctttctggcctcgccattgccaccacctgtgttggccaaattctcacaaatacaatacagaagaggttgaaggtctcctcaacgcagcttctgtaccaatctgcgccttaccaggcggcaattctgtttgcatctgggccttttgtagatcaactccttactaaccggagtgtctttgcacacaaatactctgctacagttctggtatggtcttaatttacctaaatacatgaaataatgttcttacaattatttagggaactcaattgatttaagacacacaaccagccaattccataatttgcagaatattaagattcagagacctgcaagattgctaacaaactaattggtagttgctgtatatgtagatctttaatcatgtgaaagcgctttaagtgtaaacatgttttatgtactgtaaaatactacctccatccttttttatttgacgtcaaatagtgtaaaaatgaactgcaaaacgtcaaataaaaaaatggagggagtagttcagtgatacctacagaaataaaaatgaaatcaaac

SEQ ID NO: 27981 - DNA, 1507 bp, Zea mays
  Clone ID: LIB4742-081-A7_FLI
aacaagaggttggccagccatcccgcgcgagccacttcctctctcctccccatcggatccagcgccacgcggatccgcaaggcaatccatggcctctacccaggcggaagcggaggcgggggcaccggccccgcccgaggcggcggaggcgaaggagaagggcaagcagggcggggtgctggggagggtgtggcgggcgctcttcggtggccgcgaggacttcgagaagcggctgcagtacctgtccaaggaggaggcagccgtgcacgcgcggatgcgccggcggacgcagttctcgcgccgcgccgtgcggaacctcatcgtactctccgtcctcgccgaggtgttagctgttgtttatgccatcatgacgacaagaaatgaggatctaacttggcaaatgagggcaatacgagtgctacctatgttcattcttcctgctgtatcctctgtcatatattcaacagttgttaacttcacaaggatgtttgagcagaaagaccagaagacccttgaaaaattgagggctgagaggaaagccaagattgatgagcttaaagagagaacaaattattatctaacacagcagcttattcagaaatatgatcttgatccagccgcaaaggctgcagcagcttctgttttggcatctaagcttggggaggagactggcttaaaagttcatgttggagaagaaccaaagctggatgctgcagtggccagaagcaatgatgttgagatagtaccttcagatggtttgagaaacaggaagcaacccagtgcaagaggaagcaggactgggagccccacttctcataccccagcacagggaactgaaactaatctacctcctgctcctgctagtgctggcctggaaactgcaccagctccagtggtggtagagcatcatcaaggttcaggggctagtgatggtggtggatggattgcaaagattgctgccttacttgtgggggaggacccatcacagtcgtatgctttgatatgtggcagctgccatatgcataacggcttggcccgaaaggaagattacccacatgttacttactactgcccgcattgtcatgcattaaacacatcaaaacagtccatggggcaatactcaggctccaactcaggccggtcgacccctgttgttctggctgatggattatctacttccagttcagtacaagagactgaattgagtaacctgacgacattgcaggagctacccgaggaaggaaagacagacaagcaacaagtggaggcaagttgatggttcttatgacttgtactgttgatgtgtgtggaactagtttatctttagacttatatcgtcatgtgttcaactggtggagccacaaatttagcactgttgtaaattggaaatagtgagtgatatgatcctcggaagcatagcacgcaaaaacaagaaatgggacatggtgtacatccttgagtggatgattttttgttgtcatatagagcgcgaagtcttcttcctgcg

SEQ ID NO: 27982 - DNA, 1385 bp, Zea mays
  Clone ID: LIB4742-082-E11_FLI
ctcgaggccggccgggattccccgtttgccttgtttaccattcctccccaaaacacatcctgcgatcctcgaagcctccgccgagcatcgatcatgtcggcctactgcggcaagtacgcggatgagctcatcaagaatgctgcctacatcggcacccctggcaagggtatccttgctgctgatgagtcaactggcaccattggcaagcgcctttccagcatcaatgtcgagaacgtggaggagaaccggcgggctctccgtgagctcctgttctgctgccctggtgccctccagtacatcagcggtgtgatcctcttcgaggagaccctctaccagaagaccaaggatggcaagccttttgtcgatgtcctcaaggagggaggcgtcctccctggcatcaaggtcgacaagggcaccattgaggttgttggcaccgacaaggagaccaccacccagggccacgatgacctcggcaagcgctgcgctaagtactacgaggccggtgcccgctttgccaagtggcgtgctgttctcaagattggccccaacgagccgtcacagcttgccattgacctgaatgctcagggtctggctcgctacgccatcatctgccaggagaacggtctggtgccaattgttgagcctgagatccttgttgatggccctcatgacattgatcgctgcgcttacgtcactgagacagtccttgctgcctgctacaaggctctcaacgagcaccatgtcctcctggagggtaccctcctgaagcccaacatggtgactcctggctccgactctaagaaggtgacacctgaggtgatcgcccagtacaccgtccgtaccctccagaggaccgtccctgctgctgtgcctgctgttgtcttcctctccggtggacagagcgaggaggaggccaccctgaatctcaatgccatgaacaagctcagcaccaagaagccatgggccctgtccttctccttcggccgtgccctccaagcgagcaccctcaaggcctgggctggcaaggtggagaacgtggagaaggctagagcggccttcctcgccaggtgcaaggccaactccgaggctaccctcggcacctacaagggtgatgctgccgccgacaccgagagccttcacgtcaaggactacaagtactgagttgcttctctttgcgatcccgttgttttggaactcctgcctgcgagtaggttgctgagtgttgtttgcttgttagagcttttatattcggacatgaaaaaaacatgcttcctatgtggatgatggttatctttatattcgtatattaactactagtctctgttgttaatttccgtgtaatttgctcctcccagatgggagaatcgaacgccgcttttttgttc

SEQ ID NO: 27983 - DNA, 1404 bp, Zea mays
  Clone ID: LIB4742-082-E6_FLI
ctcgaggccggccgggaaaacctcattccatgctctcttcattggttcatacttcatagctagtttgcctcccaaaaacacctgccctcgtgcgtggcaggagcacgggcacgatgatcagcacagcgcacagccggcagcagcaccatgccttcgagaagagccctggcaacagccacatgaagagcatcgacaggaagctgcagcaggccatgagccaggcggccagcaagtacatgcagaggatctaccctctaggcatgcagaggagcagctccagcctcacattgtcgtcgctctcgctgtcgcagaactccaacgactcctccatcagcagctccaacgccagctgggagcccaaggtgccgctgctctacggcggcaccttcagcccctggggcgacgtcatggtgtctcgggagatgaggcgggaggacgacgacaaggtcagtgaccatgacgtcgaaggaggcgaggaggacttggactgcagtgagccggggagcctgcgtaggtgcagctggatcaccaagaacagtgacgaggcgtacgtccagttccacgacgagtgctggggcgtccctgtgtacagcgacaagtatttgatttcgccaccacatttgcttctccctgatgaatgaatttgtgaactaataacttgaaactaagcttcatgctgtacgcacgcagccggctgttcgagcttctgtcgctgtcagggatgctgatcgaccacaactggacggagatactgaagcggcgggacatgtacagggaggcgttcgccgacttcgaccccagcgcggtggcgcggatggaggaggaggacgtggcggagatcagcggcgacagggagctgaggatcgccgagtgcagggtccggtgcatcgtggagaacgccaggtgcatccagagggtggccagggagttcggctccttcagcggctacatgtggggccacgtgaaccaccggccggtggtgggcaagtaccgccaccacaagtacatcccgttccggacgcccaagtcggaggcggtgagcaaggacctcgtccgccggggcttccgcctcgtcggccccgtcatcgtctactctttcatgcaggccgccggcatggccatcgaccacctcgtcgactgcttccgcttccacgactgcgtccgcctcgccgagcgctcctggggcatcaccaacgtcgccgcgtaggcgtagccagccgggccctcaatatctgtgcatgcatgcctctccaactttttcacaccttcttcttggtgttgttatttttttttttgtttggagatcgaaattgtgtgtgaaattacgtagagtatgtagtactctactaagttatgatgtaatacttctattaactctttgccaatgaaaagtagtactgaact

SEQ ID NO: 27984 - DNA, 1457 bp, Zea mays
  Clone ID: LIB4742-083-C7_FLI
ctcgaggccggccgggagcgccagcaggccgcagcttcagtctgcagagcacagccgtgcgcggtttgcaaccgtaccagcacaagcaccccaggcgggcaggaaaccagcctcctccgctgctccgccgcaatggcgtccccgcgcggccatcgccgggccagcgtgctgcagaaggcggcggcgctcctcctgctcgccctgtcctgctgcggctgcaccggtgccggcgccggtccagcggcgccgaccccgaaggtgccggcggtgatcgtgttcggtgactcgacggtggacacgggcaacaacaacgcgatcgggaccatcctgaagagcaacttcccgccgtacgggcgcgacatggccggcggggcccagcccacggggcggttctgcaacgggcgcctgccgccggacttcatctccgaggcgctcggcctgccgccgctggtcccggcctacctcgaccccgcctacggcatccaggacttcgcccgcggcgtctcttcgcctccgcaggcaccggcctcgacaacaagaccgccggcgtcctgtcagtgatcccgctgtggaaggaggtggagtacttcaaggagtacaagcggcggctccggcggcacgtgggggtcgcgggggcccggcgcatcgtctccgacgcgctgtacgtggtgagcgtcggcaccaacgacttcctggagaactacttcctgctggtgacggggcggttcgcggagttcacggtgggcgagttcgaggacttcctggtggcgcaggcggagtggttcctgggcgagatccaccggctgggcgcgcggcgggtcgccttcgcggggctcagccccatcggctgcctgcccctggagcgcacgctcaacacgctccgcggcggctgcgtcgaggagtacaaccaggtggcccgggactacaacgccaaggtgctcgacatgctccgccggctcacggcggcgcggccggggctgagggtcgcctacatcgacgtgtaccagaacatgctggacctcatcaccgacccttccacgctggggctggagaacgtggaggaggggtgctgcgccacggggaaggtggagatgtcgtacctgtgcaacgagaagagccccgacacatgcgacgacgcggacaggtacttcttctgggactccttccaccccacccagaaggtgaaccagttcttcgccaagaagacgctggacctgtgctacgaccagctcctgctgtgatgctgatgatgcgccctagagctcagtgtggctacgtttagtccacactccacagtcaaaattgttgctgctaattcgtctccgtgtgtatagcatagctagcattcgatgtgatgtatgtagtagtatatggttgctgtgcctgtctcgatgcgtcggtcgatcgattcacgattcttttgggcttaaatgctcataagggagataaaattacac

SEQ ID NO: 27985 - DNA, 1295 bp, Zea mays
  Clone ID: LIB4742-105-H1_FLI
ccccggctccttgcctttgttctgttctccattcgcgaaaggctcgcagcaaaaccacgccatcgatcgccgccaccagtccagcatcctccgatcgactacgtactcccacccactccggcagcagcgaggcctctctgtctgtgcgcggcgtggctgtcgtcgatctctgcctggcgggcggccggcatggggaggtccccgtgctgcgagcaggcgcacaccaacaagggcgcgtggaccaaggaggaggaccagcgcctcgtcgcctacatcaaggcccacggcgagggctgctggagatcgctaccaaaagccgcaggtctgctgcgctgcgggaagagctgccggctgcggtggatcaactacctgcgcccggacctcaagcgcggcaacttcaccgaggaggaggatgacctcatcatcaagttccacgagctcttcggcaacaagtggtcgctcatcgccgggaggctgccgggcaggacggacaacgagatcaagaactactggaacacgcacatcaagcgcaagctcctcgcccgcggcatggacccgcagacgcaccgcccgctcgccatcgcgaccgcggggcagcagcattaccagctgcaggagccgcagaagcgagcggccggcggcggtccagcaggccatccgcaccaggaccacttggaggtcgtcgtcatctccaactcgccggacgaggcctacagccgtagcagcgacgacgagccgcggtccgccacgccgccgcggcgccacctcgacatcgacctcaacctgtccatcagcctagcggcctaccagccgccggaggaagccggcatcatgaagcagccgctggtgatgaagcaggagcaggaaacggcggcgggcggcacgggcaccaatgccgcggcggtgtgcttgtgcctcaacagcctcgggtaccggccgggcgtcgagtgcgtctgcggcgacggcagctcctcctcctcctcctcgcactcccactcccactcccaccaatgggctctgaattttttacaggcggcggcgccctgctacagaggccaatagtgtagtaagagcgatcagtgacatcattaaagtgggagcgttattacgatcgagactgagggtgagggaggaggggcagagcagggatagtagtagttaactacagctagtagtagtatagtacgtaaaagccacacatgtttaggctttaacagctctctgaaacacgcatcatgggttatgagttgtgctctcgtcttgtcgtttcaattcggaggacaaagtgatcatgt

SEQ ID NO: 27986 - DNA, 1967 bp, Zea mays
  Clone ID: LIB4743-002-A11_FLI
ctcgaggccggccgggtttcgccgcctcgtttcgttatttgtttcgttatttcgccgcctcgttttgttatttcgccgccgttcgccgtcgtacagccgagccgccgccgagtcgagccggcaaagcgaagggaaggagagcggggtgaagaggagaggactccatggcgacagcctcagtgactttcaagtcacgggaggatcaccggaagcagctcgagctcgaggaggcgcgcaaggccgggctcgcgcctgcggaggttgacgaggatggaaacgagatcaatccccatattccccagtacatgtcctcggccccatggtatcttaatgctgagaagccgagtttgaagcatcaacggaagtgggagtcggatccgaactacaccaagtcgtggtatgatagaggcgcaaagcttttccaggccaacaagtacaggaaaggtgcttgcgaaaactgtggagccatgacacatgacaagaagtcttgcatggagcggcctcgaaatgtgggggctaaatggacaaatgtcaacatagctcctgatgagaaggttgaatcttttgagcttgactatgatggaaagcgcgatcgttggaatggttatgacccatcaacctacactcgagttatcgctgattatgaagctagagaagaagctaggaaaaagtatctgaaagaacagcagctcaagaaacttgaggagaaggatacagagaaggatgatgagaacgctggtagtgaagatgatgaagaagatggcctgaggatagatgaggccaaagttgatgagagtgcccagatggacttcgctaaggtagagaagcgtgtgcgcacaaccggtggtggaagcactggtactgttaggaacttgcgtatcagagaagacacggcaaaatatcttttgaatcttgatgttaactctgcatattatgatccaaaaactcgctccatgagggaagaccccttgccagatgcggatccaaatgataagttctatgtgggtgacaaccaaaatcgtcttagtggtcaagctctggagttcaagcaactcaacatccatgcatgggaagcttttgaaaaggggcaggatatccatatgcaagcagccccatctcaagcagaactgttgtataagagtttcaagatcaagaaagaaatgttgaagtctgaacataaggataaaattatggagaagtatgggaatgctgcgtccgaagatgcaattcctcgggagctgctgcttgggcaaagtgaaaaagagattgagtatgaccgtactggtcgaataatcaaaggacaggatgtatctcttcccaagagcaaatatgaagaggatgtgttcattaataatcacacgagcgtgtggggttcatggtggaaagatcatcaatggggctacaagtgctgcaagcagactatcaagaatagttactgtactggcttggctggaatagaagctgccgaggcatcagcagatctaatgaaggccaatatggctcgcaaggaggctgcagaagatgagcctgtacagcatgaagagaagcgattagccacttggggaaccgatgtgcctcaggatcttgttcttaacgagaagaagctccaggaatctctaaagaaggaaactgcgaggaggaaagaggagaaggatgaaaggaagaggaagtataacgtgaagtttaacgatgaggttactgcagaagacatggaggcctaccgcatgaagaggattcaccatgatgatcctatgaaagattttctcaactaaaagtgtggtaaatgtccgcactgccgtataacgttggtggcaccctgccttgcagtgaagctgtgtaattgaaatgtaagatagactgtgcctgacacgggagccttcttcaactcttcaggtgtatgtaatcagaaacatgtggacatggataatctgtttgacatatatataatatacttaatgtatgcttct

SEQ ID NO: 27987 - DNA, 1977 bp, Zea mays
  Clone ID: LIB4743-003-H1_FLI
aaaaatccgcatgcatttgattaatctgcaacacatactagtccagctataaaggctgcctcgcctcgtcttccccacaacactccactgcctgctggctggctgctgcttccttccagatctaggggatcaagcaagcagccttccccgcgccgccagcaatggcggcacccccgcccgcgccgttcctcctcctgctgctcgccgtggcagcagcgtcgttcgccggcgccgacgacccctaccgctacttcacctggaccgtcacctacgggccaatcagcccgctcggcaccacgcagcagggcatcctgatcaacggccagttcccgggcccgcgcatcgactgcgtgacgaacgacaacctggtggtgaacgtcgtcaacagcctggacgagccgttcctgctcacctggaacggcgtcaagcagcgcaagaactcgtggcaggacggggtagcgggcaccaactgcggcatcccgccgggcgccaactacacgtaccgcttccaggccaaggaccagatcggaaccttcttctacttcccgtccctggccctgcaccgcgccgcgggcggcttcggcgcgctcaacgtgtaccagcggcccgccatcccggtgccctacccgccgccggccggggacttcacgctgctcgtcggcgactggtacgccgccgcgtccccgcacgcggacctccggcgcgcgctggacgacggcggcggcggagcgctcccgccgcccgccgcgctgctcatcaacggcgccgccgcgtccggggccgcgccgttcgtcggcgcccaaggcgggacgtacctgttccgggtgtccaacatcgggctccgcgcctccgtcaacgtccgggtgcagggccacgcgctgcggctggtggaggtggagggcacccacccggtgcagagcgcctacgactcgctcgacgtccacgcgggccagtcgctggcgttcctcgtcacgctggaccaggcgccgctggactacgccgtggtggcgtccacgcgcttcgccgccgccgagctcacggccgtcgccacgctgcattacgcgggggccacggcccgcgcgcccggcccgctgccgccggccccgccgcccggctacggctggtcgctgggccaggcgcggtcgttccggtggaacctcacggccagcgcggcgcgccccaacccgcagggctccttccactacggcgccatcccgacgtccaggacgctggtgctggccagctccgcttccctcgacggcgccgggcgtaggcgctgcgccgtcaacgccgtgtccttcgtcgtgcccgacacgccgctcaagctcgccgacagatacgacatcgccggcgtcatcgactgggacggcctccccgcgcggctcgacggcgccgccggcgcggcggcggtgctgcgcgccgggacgcccgtgctcaggctcggcctgcacgagttcgtggaggtggtgttccagaacacggaggaggagctgcagtcgtggcacctcgacggatacgacttctgggttgtagggtacggcgatggccagtggaatgagacgcagcggcagacgtacaatttggtggacgcgcaggcaagacacaccgttcaggtgtaccccaacgggtggtcggcgatcctggtgtcgctggacaaccagggggatgtggaacctgcggtcggcgatgtgggaccggcagtacctcgggcagcagctctacctcagggtgtggacgccggagcagagcctctccaacgagtacgccatccccgccaacgccatcctctgcgggaaggccgccgccctcccacactgacacgacgacgttcagcagccatactactgcctgctccattcgaccaaccaagtcaaagaagaagaggagaatctatttttgttgctgcaagaattaatgtgaaaaaaaacacaattactgccactggtatacgtatctcctaactcctaattgtccagc

SEQ ID NO: 27988 - DNA, 1761 bp, Zea mays
  Clone ID: LIB4743-004-A7_FLI
cgaggccggccgggctagtcaccggccattccgttgtgtccataggctgtcagtcacttccagtcctagcccactcctccgatgctccaatcatcaacactctctacctgtgtccgtgtgctcttctcctccgcaccaccaaccaaccagtgctgtcctccgccgatccactgacctaccgcgagcgccaatggcgaccgccgcggtcctcgccgccacattagcgctgttcctcggcgccgccgccgcaacggccgcgacggctgcgacggaggcggaccggatcggcaggctgcctggccagccgccggtcaacttctccatgtactccggctacgtcaccgtggacgcggcggcggggcgggccctcttctactggttcatcgaggcggccggcgtgcccgcggagtccgcgccgctcgtgctgtggctcaacggcgggcccgggtgctcctccgtcggctacggcgcgtcagaggagctcggcgccttccggatcaacgccgacggcaggacgctctacttgaacccctacccctggaataaagtggcgaacatgctgttcttggactcgccggccggcgtcggctactcatactccaactccacctccgatctgtacactgccggtgacaacaagacagcccatgactcgtacaatttcttggtgaattggctggagcggttcccacaatacaagcatcgcgatttctacatcacaggagagagctacgcaggccactacgtgcctcagttgtcccagctagtctaccggaacaacaaaggcatcgagaagccgatcctaaacttcaaaggcttcatggttggaaatgcggttattgacgattaccacgacttcatcggcacattcgagtacttgtggacgcacgggctgatctctgacgaaacctacgagaagctgcggcttgcctgccagatcgacgtatctgagcatgcgtcgaaggagtgcaacaaggtcttcgacatcgccgaggccgaggaaggcaatatcgatgcgtacagcatctacacgccgacttgcaagaagacttcactccacaagcgcaggctaatcagaggaagaacgccctggttgcccagagggtacgatccctgcacggagaagtactccacgaagtactacaacttacctgaggtgcagagagctctacacgccaatgtcaccggaataccgtatccctgggtaacctgcagtgacccagtgtatgatttttggaaagattcgccgaggtccatgcttcctatctaccgtgaactcatcgccgcgggcataaggatatgggttttcagtggcgacgctgattccgttgtcccgctcaccgcgacaaggtactccattgacgccctctttctaccgactatcacgaactggtatccttggtacgacgacgaagaggtcggtgggtggtgccaggtgtacgaggggctgacactggtgacggtccgaggcgcagggcacgaggttcccctgcaccggccgcggcagggcctgaagctgttcgagcacttcctgcggggtgagcccatgcccaggcctgtagatagcgtccagtcgttttagaactggttgctgtctccccgcttggtgaaggaggagacctggctgcgctgcgcattcttgttgctgtaaactcatccgtcacactccgttgttaggatagatttgctgaaaatcagaacataatgttgctcgtttcagtgagcagattgggtatttagcaatgtctcgttttgacagtg

SEQ ID NO: 27989 - DNA, 1862 bp, Zea mays
  Clone ID: LIB4743-004-C12_FLI
cccgcctccgagcaaacaaaatccaagaagaagaagcacaagtccaaggatctccccgccactgacccgccatcgctcgccgaggctgaggagaagactgatggctacctaatcaagccccagtccctggtgccgtccctggacacctcgacctggccgctcctcctcaagaactacgaccgcctcaacgttcggactggacactacaccccgctcccctccggccactcgccgctgaagcgccccctcgccgagcatctccgctacggcgtcatcaacctcgacaagccgtcgaacccgtcctcccacgaggtggtcgcctggatcaagcgtatcctccgagccgagaagaccggccacagcggcacgctcgaccccaaggtcaccggcaacctcatcgtctgcgtcgaccgcgccacgcgcctggtcaagtcgcagcaaggcgccggcaaggagtacgtgtgcgtcgctcgcttccacgccgccgtgccggacaccgcgcgcgtggcccgcgcgctagaggcgctgacgggcgccgtgttccagcgcccgccgctcatctccgcggtgaagcggcagctcagggtgcggaccatctacgagagcaagctcctggagcacgaccctgagcgccacctcgcggtgttctggatctcctgcgaggcaggcacttatgtccggactctgtgtgtgcaccttgggctgctccttggcgtcggcgcgcatatgcaggagctgcgccgtgtccggtcggggatcctcggggagcaggacaatatggtgaccatgcacgacgtgatggacgccatgtggtcgctcgacaactacaaggacgagtcctacttgaggcgcgtcgtcatgccgctggaggtgctgcttacaagctacaagaggcttgtcgtgaaggattctgccgtgaatgctatctgctatggcgctaagcttatgatccctggcttgctccggtttgagaatgatatcgagaccggggaggaggttgtcctgatgacaacgaagggggaggcgattgccattggtattgccgagatgaccactgctgttatggcaacctgcgaccatggcgcggtcgcaaagatcaagagggtcgtgatggacagggacacgtacccgaggaagtgggggcttggtccagtggcactcaagaagaagaagatggtcgccgagggcctccttgataagcatgggaagccaaacgagaagaccccagctgagtggctccgcaatgtggtgcttcccactggcggcgatgtatcgatcgctagcatcgcagctgctcctgagccagagaaggtgaaggtggaacaggatgcagttgccggtgaaaaggtcaaggagaagaagaagaagaggcagaaggatgaaaacaatggcgacgatgcttccgttccggctaagaagatcaaggtcgaggaagatgccgaggtagtggaagtggaaggggacaagagcgagaagaagaagaagaagaagaaagaaaaggtagaatcagaatcagctgatgccgccgaagcgaaggaggtggagaaggctgatgatgcagctggcgagacgggcagcgaaaagaagaagaaaaagaagagcaaggaaggaagcgccgcggcggcggatgcagagagtgctgagcatgtagacggggcgggggtggagaagagcaagaagaaaagggagaagaaaaaggagagtgtggagacagagcaggcatagtaattagaacttacaatggacggggttgtctaatctgttttgggttgcaggggtaaggggcggtatttccaattttccggctgtatttttgtttctgtgagtacgagacaatgcgatgagttttggcctcttgcaac

SEQ ID NO: 27990 - DNA, 2009 bp, Zea mays
  Clone ID: LIB4743-005-A11_FLI
agggacttgcaacctctcctgaatcccaccgatcacgcgagctccccgccgcgatgtccgatcaccgagcgaagcggccgtccgacggcgcagccactgtggcatcgccggcggcgaagcgcgcccgcgacccgcccgcgccggcgttacccacgaacaaggaagctcccgacatggcccccaagacccgcatattctgcgacatcctggcctcccgcgccgacgacgaggaactgaatgccgagctcgacaaggccgacatccgcgtaagcatcgctgacgtcgagcaggtgctccgcttctcctacgcgcacccgcgcgccgccgccgccttctttcgctgggcgggataccggtacctcggccacgagcactccccctactcgtggaacctcctcgtcgacatccttggtaagaatcgcctcttcgagcccatgtgggacacagtcaaatctatgcagtcgcagcagctgctctcgctcgccactttcgcctccatattctcctccctggcggcgacccccggcggttccccgctcaaggcgttcatggacatgccccgctacggcatgacccgcgacacgccggcgctcaactcgctcctctccgcgctgtgtcgtgccaaccgcctcgacgacgctcgcgccgcgatcccagtagcccgcgccgaggctggcacgcgcccggatgccgactcctacgccatcctcctcgagggcagcgaggccgccgccgacctgcgggttgcgcgcgaggtgttcgacgaaatggtgcaggccattggattttatcctgacaacgtgcctgcctatgactccttcctcactacgcttgtttcaagtgactcctccacggcgctaccggaagcaatggagtacctaaatgtcttgagcaggcacggctgttcgccaggagagaagttcttccgtgctgctcttgctgcacaccttgatgcacgacaattgcgcggagccatgaatctctgggatgactttgttgggcgtcgaggactcgtcccagatatggaaatgtacaacacaatgatcaagctgcagggcggtctcgggcatgctgagctgatagtgggttatctcgacgacatgatctccaatggagtcttccctgataccaacacatacaatgtggtcctccagcttttgttgaagggaaagaagcaccgagaggcagcggcaatatttagcgagatggtcaagaacgaatgttggccaaacgagggaaattgttcacttgcacttcgcatgtttttggatacacactattgggagactgggatcaaagtctggtgctgcatggtggagaatggcttgccacctttacaggagtgtgggaacatgcttgtagcaaagctgaaggatgacaggctacctgaggcatgcaaatatgcagaagacatgattgatcggggtatcaagttgagttcagcgacactgtccaagctgaagcagcgcctgcagaggattaagaaaggagagatccatgatcacctgcttgcaaaatggaaggcacattagtttgttgtgctccctcgtatgggtaacctggtgcgatctcagtgttgacaatgaggttgagccttttatcactctgcaacgtttcaaacaacagttggaagtccctttctagtttctacattgaaattatcatattaatcagctggagcatttgggtctcaaggagtgagctggaacatcttccaagaaattctaccgtctgtatcaaatggctaagcctttttcaagaaagagtttgcccaggttatccatagagcatagaagaaatatttccttgaagaatgactagagcgtcagttgtggtctttttttaatatcttttgtgtcctttttttgtttcatgaattttgttgcttgcagctgtctggctgcaatttaggtagatgatccttttatgcatttgcagaactatcaatgcaacactctaggcgtaaaagtgcattctgacgtaccaggtgaaaattgtttggtatctcc

SEQ ID NO: 27991 - DNA, 2055 bp, Zea mays
  Clone ID: LIB4743-005-F3_FLI
ctcgaggccggccggggcagcccgcccgcccgagtcacactcacacagagccgagcccaggcaggcggcccagcccaccaccacccccccgcgtcgcgcggcgccgccggagcgggagccagagtgagagcgagcgatggacgcgctgccggaggcgtggtcgcaggtgcgcgcgccggtgatcgtgccgctgctgcggctggcggtggccgtgtgcctcaccatgtcggtgcttctgttccttgagcgcgtgtacatggccgtcgtcatctccggggtgcgcctgctccgcctccgccccgaccgccgctaccgctgcgaccccctccccgaggacgacccggagctgggctcctccgcgttccccgtcgtgctcgtccagatccccatgttcaacgagcgcgaggtgtaccagctgtccatcggcgccgtgtgcgggctgtcgtggccggcggaccggctggtggtgcaggtgctcgacgactccacggacgaagtgattaaggagatggtgcggatggagtgcgagcggtggactcggaaggggatcaacataacgtaccagatccgggaggaccgcaaggggtacaaggccggcgcgctgcgggcggggatgaggcacgcgtacgtgcgcgactgcgagtacgtggccatcttcgacgccgacttccagcccgacccggactacctcaagcgcaccatcccctacctcgtccacaacccggagatcgccctcgtccaggcgcgctggagattcgtgaacgcggacgagtgcctgatgacgaggatgcaggagatgtccctggactaccacttcaccgtggagcaggaagtgagctcctccgtctgcgccttctttggattcaacggcaccgccggcgtgtggcgcatctccgcggtgaacgaggctggggggtggaaggaccggaccacggtggaggacatggatctggccatccgggccagcctcaagggctggaagttcgtctacctcggtgacgtccaggtgaaaagcgagctgccgagtaccttcaaggccttccggttccagcagcacaggtggtcgtgcggcccggcgaacctgttcaggaagatgctcatggagattgtgacgaacaagaaagtgacgatctggaagaagatccacgtcatctacaacttcttcctgatacgcaagatcatcgcgcacatcatcaccttctcgttctactgcgtcatcatcccggcaaccatcttcgtccccgaggtccgcatacccaagtggggctgcgtctacatcccctcggccatcaccctcctcaactctgtcggcactcccaggtctttccacctgcttttcttctgggtcgccttcgagaacgtcatgtccctgcacagaacaaaggccacgctgatcggcttgctggaggccggcagggccaacgagtgggtggtgacggcgaagctcggcagcgccatgaagatgaaatcggctaacaaagcggggctcaggaagcagttcatgaggatatgggagaggctgcacgtcacggagctcggggtggcagccttcctcttctcctgcggctggtacgatcttgcgtacgggagggaccatttcttcatctacctcttcttccagtctgtcgcgtttttcatcgtcggcgtcggctacgtcggcaccatcgtcccgcagtcgtagcggaagcgtgtccagatcatccgcttctctctggttttcgcattgtgtcttgggtaagtttcgtagtggatgaccggtttgaggtaaagatcatgcatgcggtcctctcttccatcgtctttttttggggaccggccgtgtgtgcttcgtcgaccttcggctgcatgcgcggtgttttactgtaaaataggaaagcagtgttgcaagatcgctgcaggagaatttagagattggtgccacatgggcaggagatgtcctggtgtttctgcttatatgctatatcaactatgtgatgtgttttaagggggggtgcaggatggctgcttccaatgtactagtaacatacagagaaacaggttcagacatgtgttcag

SEQ ID NO: 27992 - DNA, 1861 bp, Zea mays
  Clone ID: LIB4743-006-D7_FLI
aagtggttcacccaccccctcttatctccttcccccagccgccctccgcctccgcgccatcgacacgctcgagagcgtcgctgcctgctgctcgcgcggctacacgcaagtaataaacatcatatggcgctagtacagttcaacggtgccttggttcctcaactcggtgaaaagcctcggctgctatcctcatcacctgcaatcgcaaaggctacctattctgatgcaagattcctgacaccaaaaactggttcaagaggtagaggtaaacacctgctatcacctagttatagtttgcattcacagacctcttctgaacaactaaaccatgtaccatcgtcaagatttcgccagaaaaggggttcacgttttatcgtcagagctgaagctgatttctatagtgtacttggtgtctcaagaaatgctagtaaatctgaaatcaagagcgcctatcggaagcttgctaggagctatcatccagatgtaaacaaagatcctggtgctgaacaaaagttcaaggatatcagtaatgcttatgaggttctgtctgatgatgagaagcgatcgatctatgataaatatggagaagcaggtctgaagggtgctggcatgggcacaggagattactcaaacccgtttgatctctttgagtccctgtttgaagggtttggtggaatgggtggaatggggggtggccgtgctgctcggaacagaccaatgcaaggtgatgatgagagctacaatctggtactcaatttcaaggaagctgtgtttggtgtggagaaggagattgagataaccagattggaaggctgtaacacctgcgacggaagtggtgccaagccaggtacaaaggcaaccacatgtaaaacttgtggaggtcagggccaggtagtctcctccacaagaacaccgcttggaatattccagcaagtctccacctgcaatacttgtggtggcaccggtgaattctccactccttgcaacacctgtgggggtgatggccgggtgcgaaggacaaagaggatcagcctaaaggttcctgctggagtggattctggaagcaggctgagggtccggtctgagggtaatgctggccggcgaggaggccctcctggggacctttatgtcttcattgatgttctctctgatcctgttcttaagcgagatgggacaaacattctctacacatgcaaggtttcttacattgatgcaatccttgggacaaccgtcaaagtccccactgttgacggaacggttgaccttaagataccctcagggactcagccaggcacaactctggtgatgtccaagaaaggtgtcccgcttctcgggaagtcaaatgcccgtggagaccagctggtgcgtgtccaggttgagattccgaagcgtctgagcagcgacgagaagaagctaattgaggagctgcaaacctgaacaaggctcaaacagccaatagcaggagatgattatcgcatatggcttcgtaggacagcgtgcttgtgtgataggcaattttgatgcaaactgcagtggtgattggatgaaaagagttggtagtgataaactcttctacgaactacatacaacaaggggtacacaggagcaaaaaatatgtcgttcccacatctgtaacctcgtttttaagctattgaaagttgagtcagtgaactggacgtttttgcaatagcttagcatatgcactaggcgactttattagcctttttttttgttgttatacggcttttgtattcttggaagccttaggcaagatatctgatggtggaatcaggtttagacttgacatttcttgcacaaatgctgcaccatgcattcatggaagctgtaagctgtaccatgg

SEQ ID NO: 27993 - DNA, 2013 bp, Zea mays
  Clone ID: LIB4743-006-F2_FLI
ctcgaggccggccggtcagcagaggcactagctggaacaaggcaaccagagggagcgcgagccgggccactcccctccgtctctctcgaccatggcgaggctcccgctggccgcctgcgccgtcgccgccgccttctacctgtgcctccaccttgcgtcgtcgtcctcttccgctcctcgtcttgcgcctgccccgagcgaccccggccgccgtgcaggcaggaccgcctaccacttccagccggccaagaactggcagaatgatccgaatgggccgatgtactacaacggcatgtaccatctcttctaccagtacaacccgcacggcgcgctctggggcgttggcaacctctcctggggccactccgtctccggcgacctcgtcaactgggccgctctggacacggcgctggacccgacgtcgcccttcgacgccaacggctgctggtcgggctccgccaccatcctccccggcggcaccccggccatcctctacacgggcatcgacgccaacggggagcaggtgcagaacgtggcgttccccagggacccggcggacccgctccttcgccggtgggacaagcccggctacaaccccgtcatcccgctccccgccgacgtcccgggcgacaagttccgggacccttcgacggcgtggctcggccgcgacgggctgtggcgcgtcgcggtgtccgccgaggtccgcggcgtggcgtccacgctcgtgtaccggagcgcggacttcctccgctgggagcgcgcccccgccgccgcgccgctgcacgcctcgcgcgccgcgggtatggtggagtgcccggacctgttcccggtgagggaggagggtgacgatggcgacggccaagggctcgacgcgtcggcgagcggcgccggggtgcggcacgtgctgaagctcagcgtgatggacacgctccaggattactacatggtggggcggtacgacgacgcggcggacgcgttcgtgccggcggagcccgagcgcggggacgacgtgcgcggctggcggcggctggactacggccacgtgtacgcgtccaagaccttcttcgacgcgcgcgggagccggcgcgtgctgtgggcgtgggccaacgagtccgacagccaggccgacgacgtcgccaagggctggtccggcgttcagacgttcccgcggaagctgtggctggacgaggacgggaagcagctgcggcagtggccggtggaggagatcgaaacgctgcggaggaagcgcgtcgtcctgcgccgcggcacggcgctggccaccggaggcatgaacgagatcgtcggcgtcgcgggctcgcaggcggacgtggaggtcgcgttcaaggtctcgagcctggcgggggccgaggcactggaccccaactggctgctggacccgcagaagctgtgcggggagaagggcgcctcggtgcccggcggcgtcgggccgttcgggctcatcgtgatggcctccagcgacctgcgcgagcacaccgctgtcttcttccgcgcgttcaggtaccatggcaggtacaagcttctcatgtgcactgacctgacaaggtcgtccacgagggcaggcgtgtacaagccgccatacggaggattcgtggacgtcgacgttgaggagcacgagaccatcaatttgagaaccctgattgatcactcggtggtggagagcttcggagctgacgggcggatgtgcatcacggctcgagtgtaccctgagcacgcggagacgagcaacagccacatgttcgtgttcaacaatggcagcggcacggtggaggtgtccaagctcgaggcatgggagctcgcggcggcgaccgtaaattccgttgggggcaacgacagcttggttatgtctgaatctaataaccaaagtgaatcctattaaaatcttcaggttaatgtgtcaaaaatggggtccgtttgatttgattgctatactttgttatggagaggggggaaaggtgtatttcaaataagaaatattggccgattgctgttgac

SEQ ID NO: 27994 - DNA, 1134 bp, Zea mays
  Clone ID: LIB4743-007-E2_FLI
cctcgaggccggccggggaataaactcccgctactacgtcgctctcgcacccgcctccgttcccaccacgacggcccttcgtcaacatcaacgccggccgcagctataataggctatagcatggtggcagcgacgctagcactactactagtgacgctggcggcgctgcacggcgcggcgccagtactggccgtggccggggacccgccgttctcgtgcggcccgtcgtccgcggaggcgtcggagggcctcgcgttctgcgacgtgacgctggccccggcgcagcgcgcggcggacctggtgtcccggctgacggtcgcggagaagatcgcgcagctgggcgaccaggcgccgggggtcccgcggcttggcgtccccgggtacaagtggtggaacgaggcgctgcatggtctggccacctcgggcaaggggctccacttcgacgccgccgtccgcgccgccaccagcttcccgcaggtgttgctcacggccgccgccttcgacgacgacctctggttccgcatcggtcaggcgatcggtcgggaggcccgtgcgctgttcaacgtcgggcaggcggagggtctcacgatctggtccccgaacgtgaacatcttccgggacccgcgctggggccgcggccaggagacacccggcgaggacccggccgtggcgagccgctacgccgtcgccttcgtccggggcatccagggaaacagctcgtcctcgctcctgcagacatccgcgtgctgcaagcacgccacggcctacgacctggaggactggaacggcgtggcgcgctacagcttcgtggcccgcgtgacggagcaggacctggaggacaccttcaacccgcccttccgtagctgcgtcgtggaagcaaaggccagctgcgtcatgtgcgcctatacggccatcaacggcgtgccggcgtgcgccaactctgatctgctcaccgggaccgtcaggggggactggggcctcgatgggtacgtcgcctcggactgcgacgccgtggcgatcatgcgcgacgcgcagcggtacgcgcccacgccggaggacgccgtcgccgtctcgctcaaggctggactggacatagactgcggctcctacgtccagcagcacgccgcggccctc

SEQ ID NO: 27995 - DNA, 1932 bp, Zea mays
  Clone ID: LIB4743-008-B5_FLI
ctggttttcttccgcaagctgttatctctcgcacgcaaacgactagcgcagcaaacaccccacctcgctcgcgatcgcggcacggcggcggcaatccaccgcggctcgctgccttcgccagtgatctggcctcttcgagtctcgccatcagataatcatccccagccactcccctcatctcccatcccctcccttccccttccgctgaatcggcgcggagaggatggcgtcccggcggggcagcagcagttgcgcgctctgcgagggatccaacctgccgtcttgttgcgcctcgtgcgtcaacgcgaggctggtcgagtaccacacgaggctgcgcatgatgaggagcctccgcgactccctccacggccgaatcgccgcacgccccgaagccaagagaaaaacagatgagcagcggatctggagaacaagcgaagaacaggatatcatggagttgaggaatcggctcactgaattgaagagaaaaactgccgtagacaagaccgaggtcgagcaggcatcgagtgatcttaaggcaaaaactgtgccattgaatttggctcttgccacgctaaaaaagagacgagctgatgcagtggccatgcacaccaatgccatgaaagttgctcagatgaatctcatggcaaccacctcaaattgtatgaaaatgcaatcaaaatctgtaaagcaactttgcagattgtttccaatgcgacgagtaattaaagagggagaaaagaaagatggctacaatggtccgtatgattcaatatgtggggttcgtcttcctcgtggtcttgatccacattctatttcatcagaagaactgtcggcatctttggggcacatgctacatttcatcaatatagcagttcgtatcttatcagcacctgctcttcatgtatcaggctgtaggggctcatgctcaaatatatggcagcggagttcctactggagcacacgacagtcccagagcaaggtttaccctctttttatacctaggaaaaatgtttgcacaggtggtgaagaaacttcattgacagaaagtggctcgagtaactttggggttgactctgtggattctgtcaagaaaccgtcttttgatcccaagagaagcaatagctttaacttttctggtgcatcttcccactccatggagaggcatcaatatttgcagagaggaatatcactattaaagacaagtgttacagccattactacctactattacaactcactgggcttggatgtgccatccaatctttctacttttgaggcgtttgctaagttgctccatatgttgtcgtcatcaaaggcccttcgaactgcttttgaattggacattgcttcaaggtcagagaagcaagcgcagcagctgaacagatcgatttggaaggcaagttctgccatatcatcggacagcagttttatggacagcatgcacacaaccattatgcccagcactctggacaacctcctcatgaactcagacgagagcctgtacactggtaagctggtgaagcatggtggcgtgccagatagcatattcgacagctgggacatggtagagcgtgaggttctaccaccaccaccctcgcgggttgaagacgtcgctcagtgggaatgggccatgtatgctggcagcaccaaaaagaaatgacctctatttacaaatcctccgtgaagcccaaactgttagacactgcaagagcttcagtttagatatgtaagtacttgatcactaggctcttagaaaccgggaatgtggaacttggccacgttcctcatttctggaacgtgggaataatctcgttcccatagttttaaaacctaatttaaatagcgtactgtgtacaatgttcctatttctcgatccattcattgattcgatctggggacctggttactaagatcaggctccggtcccatgtg

SEQ ID NO: 27996 - DNA, 2353 bp, Zea mays
  Clone ID: LIB4743-008-G7_FLI
ctcgaggccggccgggcagcacacccaaacccagcagctgattcgcccggccgcatcgcccgagccttctaacagctgactcgtcctcgtcgctccggcgcggcgacaaggcacgcagccaccgcgcgatggccgacggcgccagcagcagcggcggggcgcagaacgggggtgagtcggtggtgattgactacggccggcgccgcactacctgcggctactgccgatcctccgggcccacgagcatctcccacggtatgtgggctaacagtctgaaagctgatgactatcaagctcttcttgatcgtggttggaggagatctggttgttttctttacaaacctgagatggaacggacatgctgcccctcatatacgatacgcttgaaggcaaatgatttcatttgttccaaagagcaagctcgggtacttaaaaagatacaaaggttccttgatggcgagctcgatccacagattggaagccctcagtgtaaggcaagtccaacaaagcgctcactgggtgaacctctgaattcaccaacctcgaaagtatcaaaggtatcagcggaagagtttcaaaaaggcacaagtccaaatatattgaaagaagatgacatcatttgttgcctggcaaacaaaatcaatgaggccacagctacatgcttccgaggtggggtatttggttctgttcaactccccaaagctgttgtgaagaccgttaaacctcaagtcaaaaggaaagttggagaagcagtgcaagaaaagaaagtaggagaagcagtgcaagctttggtttatacgtgtaatataagtttccaaatagtggcagcagttagacgggcattgcctaaagaaaatggtgctactcaaactgaagtaccagcagatctttctccaaattctgttgcagaaaagctatccgtggcaatggaacgtcttggagaactagctggttttgaagtaaaagcttgtaatgggcatctaaatttctatttggcctccaatcaggcaatgcagaaccataccagcgttgttgtacctgtgcaagcttcagacaaatctagtggttcaaagccaagctctgtgaaccaaactaatgcaaaatatcctctgaaaaggaaaaacctggagattaggttgagcacatctcattttgatcctgaggagtttgctctgtaccgaaggtatcagacaaaggtgcataaggagaaggcagttacagaaagctcatacaagagatttctagtagatacaccaatcctgtttgtccccccaaagactggtgataatacagttccaccgtgtgggtttgggtcttttcatcagcagtacaggattgatggaaaacttgtggctgttggtgtagttgatatccttcctaaatgtttgtcaagcaagtacttgttctgggatcctgaccttcctttcttatctcttggaaagtatactgctccgaaggagatagattgggtcaagacgacacaggagcactgtcccagccttcagtactactatctcggttattatatacattcttgcaataagatgagatacaaagctgcatatcgaccatcagaacttctatgtccactccgttatgagtgggttcgctatgatttagccaagcctctactggatgccagtcaatactccgttctatctgattatgctacaatgcaaggtgaagtgccccagcctcagatttgtggtccctctgatgactcttcagcaaaagttgaccaccatgagtctcccagcgatgaggatgaggacgacgacgatgaagatttcgacaactatgaatcagatatgatggtcgatgaagagacaattcattcagaaaaacccgatacagctgaaggcagttccgagataaatgacataaacaacatcaccctggacctgaaaggctcgagggttaaatttaagggccttcagcaagtttttgggccaatcgagaggcgacacctcaatgcgctagaaaggcaactgagcagatacgtcaaggttgttgggaaggagctgtctgatcgaatggtgtattgtctttcttgatatgcagccggtcccgagatctcaattctactgtgaaaggtgcacatgagagttaaactagtttcattcagaaagaaaggtcatattgctgcgtgtttctgcatggttttcgttgtaaaggtacgagagctgaggctgacatagaacattctccggtcgattttgtatgtgtattttagcactaaagtcttcatggatggcttatactgaagagaagtggcgattcggtacgcctaattgtgcttatagggcaattgaaccggcacagtaataaagttgcagcgaatgggcttctgtcg

SEQ ID NO: 27997 - DNA, 2012 bp, Zea mays
  Clone ID: LIB4743-008-H10_FLI
ctcacggccaccacctctaactctaagcatgtaacgtacctcgcgcagctgaactcggccgagcaatttctgctctgagtttgtcaggtccgtgagatgggatcactcagtagtatggctgaaaaagctcccggcgctgcgctgccagagtcttcatgtgcatacttgcttcaagaactcaagatgatatgggatgaagttgggcaagagcagagtgaaagggagagaatactcgaagagctcgagcaggagtgccaggaagtttaccgaagaaaagtaaacagtgccaacatgtccaggatccagctgcaccaagccttagctgaatccgaggctgaattcaccaacctgctgctatccctcggagaaagatcgttcccggcacgacccgagaaaatggcaggcaccctgaaggagcagctgaattccatcacgcccgccctacaagaaatgcagatgagaaaggacgccagagtaaagcagttcgtggaggttcagactgaaacacacagaatcgcttctgaaatcgctggacggttagcgggtggagctgtcgctgtgaatgaagaggacctgtcgctaaagaagctcgaggagttccaaagcgaattgcgaaggctgaagagagaaaagagtgaccgcctctgcaaagtggaagaatacaaagttctaattcacaattttgcgaaagtgatgggaatggatccttcagagatacttgctagtgttcacccaaggttgttagatggaccaaatgagcagcagacgaagaatatcagtgatggcatcctcagcaagctcaatatgactgttcaccagctaaaagaagagaagagcaatagaagggaaaagctccaaaaccttgtaaaagcattaacaaacttatggaatactctggatactcatatggaagagcgtcaaccttatgggcaaattaaggtactcgcaatgacttcagtaaacggtatgctaggtcctggaagcctcacacttgagacaattcaacaggttgaaactgaagttcagcggctgaatcagttgaaggcaagcaaaatggaagagctattcgtaaagaagagagcagaagtcgacgaaatttgcaagaaatcacacatgggcatgccttatcaaacagaaatggacaagataatgaatctgataatgtcaggagatgtggtccatgatgatctattaaagacaatggatgaatatatatacagagcaaaagaggaggccacaagccggaaagacataatggataaggatgaccgaaggtactcagtaagcagaggagcgcacaagcacttgaaaagggcagagcgtgctcgaattatagttagcaaaattccaggcttggtagaacagttaatggtcaagacacaattctgggaacaggagagaaacaagatcttctactatgatgagctcccgcttctggcaatgctgaaagactacatgttcacgctcaaagaaaaagaagaagagaaatacaggcaacgggagaataaaaagatacagactctacttgtaaagaggcatgagaattcaataatgttaaggcccaacacaagcttcagccgtccatcaagcagaggcttcaatacgagtcctggctccacatccatctggagcagccaagtttctgcaaaagttcagctgcctgactcagagaactccccagctgaaaaagatatgcgtgcaaaaataattaggaacagaggtatgcagggcattgggaaataacagaagctgttcaatctctcatgaagataaagcagaagtctccacagtgaagcaagacatttcaccaatttaattttttctcactttaaatttctacagaaatttgtctgcctgacgtgaagttgcaacagcccccttaatctattagataagtgaagaaaaatatgtttgtatgcagcttacaccatattcatatatttatttatgtatgattcattaaaatgttatttcggtgccgaagtactaacagagatcatcgaatgaaaagc

SEQ ID NO: 27998 - DNA, 2211 bp, Zea mays
  Clone ID: LIB4743-011-G4_FLI
cctcgaggccggccgggattgtgtggcctggcttccgttccgcccgccgaggccagtgtggcaggcagctcccgcgcgagcgccagcgcgatccagaggctggcgcacctgcgtcactcgctccgcgctgccgcgatctcctctgacgtcgaagtcgcccgggggatgacacagggggaaggggtggtgtgggaggggtgaacaggagctcggtgacttttgtgaggggcgcctgatggaggagcgccggctcgacacgccggcgatgaggagaatcagcgagtggattctttcactagagttcccaagcgatattaccatccaggttggggaggcgaccttcaacttgcacaagctcccgttggcatcgaggtgcggctacataagggagcaggtgtcggggatcaatggctccagggtcacccacatcgacatcacgggcttgccgggcggcgccgcggcgttcgagctcgtcaccaaattctgctacggcgagaacttcgagctcacggaggacaacgtcgccatgctgcggtgcgccgccgagcacctggagatgaccgacgacgacagcaggggcgggaacctggccggcaggaccgaggcctacctggaggcagtggcgctcatgagcctcgcgggcgcggtcaccgtgctccggaggtcggaggacctcctcccggtgtccgaggaggtggacctcgtcggcaggtgcgtcgacgccatcgcctacttcacctgcaacgacagtcagttcagcatgtccaacggtaacggcatggacgtgtcgtcgtccaaggtcatcatcgatgattggttggctgacgagctgacgtcgctgcggattgacacgttccagagagtcgtaattgctatgaaggcgagggggttcaagggcattgctctgggcacgctcatcatgctctatgctcagaagtcgctgcgaatgctggacacacacggaagggagaagcaaaagatggagccgaggcaggaacacgagaagcgtgtggtgcttgagaccatcgtgactctgctgcccaaggagaggaactccatgtccgtgagcttcctctcgatgctgcttcgagcagcgctgtgcctggacacgaccctggcgtgccggctcgacctcgagaagcggatggccgcgcagctcgggcaggccgtgctcgacgacctcctgatcccgtccttcttgcccgacgccggcaacacgttcgacgtcgacgcggtccagaggatcctggtcgggtacctggagcacgaggccgaggcggaccggctggactacaacaccgacgacgacttcacctcgacggcgtcgccgcccaacgacgtcggaatggtcggcaagctcatggagtcctacctggctgagatcgcctcggacgtggacctgcccgttgacaagttcaccggcctcgccgagatgatcccggaacgcgccaggttcaacgacgacggcatgtaccgttccatcgacatctacttgaaggcgcatccgtatctgagcgaggccgagcggaagacggtgtgccgggtgatggactgccagaagctgtcgcgcgaggcgtgcgcgcacgcggcgcagaacaatcggctgccagtgcagacagtggtgcaggttctccaccacgagcagcggcgcctgcgcgaggcccctacgtcgtcgttctacggcggcgagtccccgaccccggcgccgagcctccagggccggcacggccggagcgtgccggacgagatgtcgcagctgcagcgcgagaacgaggagctcaagatggagctgctgcggctgaagatgaacctgagggacccgtcggcgcccccgcagcccagcggcgctccaccatcggggcgccgcccgctgccgaagaaggcggcaggcggcagcggggggttcattaacaacgtgtccaagaagctcgggcggctgaacccgttcctgcggcctgacgccgtgggtggcggcgccaaagtgcgcaccaagccgtccaggaccaaggatcggaggcactccatcggctagtgattggaattggctcatgctcattgccggcttctttcatcttgaatcttcttgacggctatttcactcgatgaacgtaaaaaatcgctcgttgatattcattgattgaatggccgagtcgtaagtaaagatgtgtagctatacatctcacgaacataaataagatgctaagttatatg

SEQ ID NO: 27999 - DNA, 1883 bp, Zea mays
  Clone ID: LIB4743-011-G9_FLI
gggcccttccctccggcgtccgccgccgtcaccactcgtcgttttcctagttcgcacacccatccggcctcccccccgtctcgatagtcgataccaggttctaaatggcgatggcgatgatggctatgcgacgcgcggtggcgctcggcgctcgccacatccccgccgccgcagcctcttcgttccgagtcgtctccctccgccacatgagcgcggacgcgggcgccgcgatggagaagatccgcgccgccgggctgctcaggacgcaggggcttatcgctgggcagtgggtggacgcctacgacggaaagaccattgaggtgcaaaatccagcaactggtgaggtcctggcaaacgtgtcctgtatgggcagcagagaaacatctgatgctattgcttctgctcacagtacattctattcttggagtaaattcactgcaagtgagaggagcaaggcactaagaaaatggtacgatctaattatttcacacaaggaagagcttgcacttctcatgacactggagcaggggaaacctatgaaagaagcccttggtgaggtcaattatggtgcaagtttcatagaatattttgcagaggaagcaaagcgtatatatggtgacatcattcccccaactttatctgatcgcagattgttggttttgaagcagcctgttggggtagttggagctattacaccatggaattttccattagcaatgataacccggaaggttggaccagctttggcctgtggctgtactgttgttgtcaagccatcggagttcacacctctgacagcattagctgcagcagatcttgctcttcaagcgggaataccagcgggtgcattgaatgttgtgatgggtaatgctgctgagataggtgatgcgttgctgcagagtacacaggtcagaaagattacattcactggatcaacagctgttggcaaaaaactgatggctggatctgcaaatactgtgaaaaaggtctccttggaacttggtgggaatgcaccttgcattgttttcgatgatgcggacattgatgttgctgttaaaggcagtcttgctgccaagttccgtaacagtggacagacatgtgtttgtgcaaacaggatattggtgcaagaaggtatctacgaaaagtttgcaaaagcattcatccaggctgttcagagtttgaaggtcggtaacggtctagaagagagtacatctcagggtcctctgattaacgaagctgctgttcaaaaggtggagaagttcataaatgacgcaacttcaaagggagcaaatgtcatgctaggtggtaaaagacacagcctgggaatgtcattttatgagccaactgtagtagggaatgtcagcaatgatatgcttcttttcagagaagaagtttttggtccagttgcaccccttataccgttcaaaactgaggaagaagcagtccatatggccaacgatacaaacgcaggcttagctgcatacatttttaccaagagcatacctcgttcatggcgtgtatctgaatctcttgagtacggcttagttggggtaaacgaggggattatttcaacggaggtggcgccatttggcggagtaaagcagtctggtctagggagagaaggatcgaagtacggcattgacgagtacttggagctcaagtacatctgcatgggcaacttgggttgagtcctgaagtcggcctctagctcgaaacactcggcagatgatgaacggagaaaccaggcgtgcttagaagggcgtgagttgcgtttagctgcaagatcggtcatgatggctgtgggagagcagttttagaataaatcgaataagccgcggagcattaaataaaagaagtggaaatgagatgtaaatggcgtggac

SEQ ID NO: 28000 - DNA, 2125 bp, Zea mays
  Clone ID: LIB4743-011-H7_FLI
ccggatatagctagctagctatcttgctgcgaccagccggccatatataacaataatcgtcctctcgatctctcgtccgagatcgatctgcgtgccaagggaagggagatgggggcggcgccgccatcgtcgtggcttattgcgttcatcctgttcttcagcacgttggtagcgttgccgcagtcgtcacacgccggcggcacaaccagacactacaccttcaacgtgacgatgaagaaggtgacgcggctgtgcaccacccgcgccatcccgacggtgaacggccagttccccggccccaagatagtcaccagggagggcgaccgcgtcgtcgtcaaggtgctcaacaatgtcaaggacaacgttaccatccactggcacggcgttcggcagctgcgcacggggtggtcggacgggccggcgtacgtgacgcagtgccccatccagacggggcagagcttcgtgtacaacttcaccatcacggggcagcggggcaccctgttctggcacgcgcacgtctcctggatgcgcgccacgctctacggggccatcgtcatcctccccaagcgcggcgtgccatacccgctcccggttaaaccctacaaggacgtcccagtcatcttcggagagtggttcaacgcggatcccgaggcaattgtcgcccaggcgcttcagactggagcaggcccaaacgtgtcggacgccttcaccatcaacgggctcccgggccctttgtacaactgctccagcaaagacacgttcaagctgaaggtgctgcccggcaaatggtacctgctccgtctcatcaacgccgcgctcaacgacgagctcttcttctccatcgccaaccacacgctcaccgtagtcgacgtcgacgccgcctacgtcaagccgttccacacggacatcgtgctcatcacgccgggccagaccaccaacgtgctcctgcgcgccaagcccgacgcggggtgccccgcggccacgcacctcatgctggcgcgcccctacggcacgggccagccgggcaccttcgacaacaccaccgtcgccgccgtgctcgagtacgcgccgccgggccacatcaggagcctcccgctcttccggccctcgctccccgcgctcaacgacacggccttcgccgcgaactacagcgccaggctccggagcctggccaccccggactacccggccaacgtgccccgcgccgtggaccgctccttcttcttcgccgtcgggctcggcaccaacccctgccccgtcaaccagacgtgccaggggcccaacgggaccatgttcacggcgtccatgaacaacgtgtccttcaacatgcccaccaccgcgctcctgcaggcgcactacggcagcgtcgccggcgtgtacacgcccgacttccccgtcgcgccgctcgacccgttcaactacacgggcacgccgccgaacaacaccaacgtctcccacgggaccaaggtggtggtgctggactacaataccagcgtcgaggtcgtgctgcaggccaccagcatcctcggcgccgagagccacccgctgcacctccacggattcgacttcttcgtcgtcggccaaggcttcggcaactacgactcgtccaaggacccacccaagttcaacctagtcgacccggtgcaaaggaacactgtcggcgtgccggcagggggctgggtcgccatcaggttcttcgcggataatcccggtgtttggttcatgcattgccatctggaggtgcacacaagctgggggttgaagatggcatgggtggtcaacgatggcccgttgcctgagcagaagctgatgccgccgccggccgatcttcccaagtgctgaagatccaccgcgcgttgacagtgtccaacattatatatgattcgtttctattgcataaacatatcaatggagatacacattgtcgtcgtacatatagtgtcgtacacagcgtttaaagaggctttgtggattttctatgcattgtttcttcttcattcttctaaaggttttaaaagttgtgttttgtgataggaaatcattgttttactttcacatacatttttttttcatctggagtagtttgaaatcctttgttgcaattcgaactcaataaatatggttt

SEQ ID NO: 28001 - DNA, 1028 bp, Zea mays
  Clone ID: LIB4743-012-G8_FLI
ctcgaggccggccgggctcacgatcacacaccactccacagcagtagcaagagggatagagcaaggccacacacacacacacaccactaggctagcctagccttttagtcgtcgaggaggagcaagaagggcgcgcacgcaagcaggcaagcaagaagagagccgatcgaccgagagctagcacgcgatggcgaggtcttccaagatgatggtggcggcagctctgctggccttggccctggccgtgtcgatcgccgaggcgaggaacatcaagaccacgacgacggagaagaaggacgacgcggtggtgcagccgcagaccttcccgcccttcgaccgcctcggcggcggcgcgtccccggcgttcggcggcctccccggcggcagcattcctggcagcagcattcccgggttcagcatgcccggcagcggcagcagcctacccgggttcagcttgcccggcagcggcagcatgcccctcttcggcggcggctccccgggcttcagcggcttcggcggcatgcccgggtcccccaccgccggccccgtccccgagcacgccaacaagccctgaacgccaacaagcgtggtagtagagtggtgctactgttactgtagtacgtcgtcgtcttcatgcatgcgtggttcgtggtttcccctagctccatacgagcagtagttgggccttgcacgtaccgtacgtctagctagctatatatatagcttgtgttctactgccttttagtttaattacctgcctgcattggacagttggatccgtttcatctgctgtttgctttactatcaggtcagtatctgtttgtggagatttggtgtttaatttatttagccgtttgtgactggttgtagctagcggtggtgcggtggtgatgttcttgaggcatgaataatgctacatgcatgtgatgtatccatgttttgtgtgtggtaaacctgttgtctgtataagctgtatgcatgtgggtctttaatttgttttgaagcagggttcacgttattaatttgtc

SEQ ID NO: 28002 - DNA, 1853 bp, Zea mays
  Clone ID: LIB4743-014-C11_FLI
ccgggctctttcatcatttcccgaagcttcgcatccgtccttcggtccttcctcacccgttcgtctgtctcgcctcacccacccacccacagcatcagaacggagggaattagggagcttcggccggatccgcaacatcggggaacggcgggaaccagggagctcccgccgcctagaaccggagctcccaatcgatccactggccgttgagccgacacttcaatggaagcccacgcctcgcggggccgccgcaccctggaggagattcggcagaagagagccgcggagaggatgcaacacgccgtcccgatcgcggcgtctcacgtcgactctcacgggaaccaaagagctggagctgagcatcttgctcgagttcaagaacttgaaaatggcaacacggaattggagagggaaaacaaaatgctcttgtccaagatcgctgagaaggaagttgagaaggacgcccttgtaaaccgtttgaatgatctcgagcggaatgtagtgccctctttgaaaaaaagcttgaatgacatttatttggagaaagatgctgctgtagttgctaaggaggatgctctagctcaactcaggagcatgaagaaacgactcaaggaagcagaggaagaacagtatagggcagaagaagactcggcctccttgagagcacagctaaataccctgcagcagcaaatgggccacacttacagtggatatacaatgggaacatcaagtgaggaatctgttgccatggaaaaggagatacaagatttacaggcacagctaaagcaagagtcactgctaaggcaacaggagcaacaacaattagctgaacaatcccagctgaggcaacaagagcaagaaaaactagccaaagagcaaacccgtattgcttctctggaggctgaaaagcaacagttggaagaccaaattactatgttgacaaagaaagctacagaggacgcttctgagtttgctgcacgcaaggcattttcaatgcaagatagggaaaaacttgaacagcagttgcatgacatggctttgatgattgagaggctagaggggagtcgtcaaaaactgctaatggagattgattctcaatcgtcagaaatagagaaactgtttgaggagaactcagccttatctgcttcttatcaagaagccattgatgttactgtacaatgggaaaaccaggttagagactgtctgaagcaaaatgaagagctccgttctcacttggagaaactaagacttgaacaagttagcctgttgaaagtaagcaatatcgctacccaatcagatgggcaaactgaaaacagtatctcaaacccaccacaaatggtcatcgagaatatttctctaaaggatcagcttataaaagaacagagcagatctgaggggttgtcggcagagataatgaaactttcagctgagcttaggaaagcagtccatgcacagaataaccttgcacgcttatacagacctgtattaagagacattgagagcaatctgatgaaaatgaaacaagaaacttatgcgacgatccagtgatacatgttgacatgttgtgaaactcagtcctctggcatggccgcatgggctccacgttactgattttcgtcgtggatgtatttatctcatgccatcttcaagatgctggtgcaaagcagttcttttcgtggccaccatttataagtagagttcagtcgagatcgttgtacttgtatcatactcatgtatacccgattcccagactggttcatctcgtaaattggaagcgatgtttggatgcctatgtatcaagtggatcataaacatccaaacaacgccttaaaatagatcgtttcgacattatt

SEQ ID NO: 28003 - DNA, 2314 bp, Zea mays
  Clone ID: LIB4743-014-E2_FLI
ccgggctcgtcctccctcctgcttcgtgcttccccttccccttctcgtctgcggcgccaagctcgagctcatcgccaccgaggtcgtttcgatctgggttttagcctatccgcgaggaaggtaaattagttggagacttcgtgatggctgctgcgaagtcgggcgtagacgtggaaacgagggacggcggcggcggctccttcagcgaggagaggtttgttgataagctcaacaagctcaacaacacaacagcgagcattcagacactttcacattggtgcatttttcaccgcaagagggccagaaggattgtggacacatgggaaaagcatttcagtactgcaacaaatgataagaaaatatcattcctgtttctatcaaatgatatcttgcaaaatagtaagcgcaagggaggagattatgtgcatgagctctggagggttctacccagattattgaaacatttctacgaaaatgggggagaagaagcaaagaaactggttgcaagactaataggaatttgggatgaccgcaaagtttttggaacccgtattgaaagtctgaaagacggcatttttggtgacaaccctcctatattcgatcacagtgggaatactaataattcaaatcctagctctaaccccttaaattccaaagttggaaggaaagattccagtacagtactaaaaaaactggctgttgatggtatgcctgaaaagattgtgactgcataccaatctgtgcttgatcagcattttgatgaagacacagctttaaacaagtgtaatagtactgttagtgttctggaaaagctaaagaaggatatagacgatgctagtagcgaaggtgatccacctgcctcaacaatgatttctgacctacaagaacaggaaacaatcctgaaacactgcattgcacaacttggaagtgtagatgcagcgaggatatcactgataaaccaattaaaagaagctctcaccgaacaggagtcaaagtcagaggttcttcgcagccagttgcaagttgctcgagcagaggcagaacgtgccattcaacttaagcaacggtttggtggtgccgttgtcgcaaatggcacaggatctagttctagtccgctgctgatgtcttctcctcggttacagtcgctgaatccagcaccctcactcgcccctccaatcggtgcagccggagatgagcccaagagaacggcagcagcaatggctgacaagctggcatctctgtcagcgccggtgcaggtcctgagctccatcttctcatctttcgtcgccacacacggcgcttcgctatcttccatgaacagcggatctcctcccagagaccaactctccggggcaccgccgggcttccaggtcgaaaagaggcccaggcttgagagaaccgtgctggccagcgacatgggcgcgcctccattctccgtgcaagcaccacggctgcagcagccggttggagcgatgcccacacaagcagcggcacagatgaaccaagcgccaggcccattcgcaccaccgcctccaccaccaccgttgccgcctcttctgccaccgctcctgcaacagttcggtcaaagcgctggaggaatgatggggatgggaccgttcgggatgatggctggctccatgccgcctcctccgccgatgtccagcatcatgccagcaggttttccagcgccaagcggtccacctccacctccgcttccaccggctcagacccaaccccagcagcagcagcagcagtctcctcctcagccaccagcgccgcagcagtcagcagggttcttccagacatcagcaggcatggggtacttcccagcagtgcaggtgcagcaatttccgtccgcccaacgacaatgactcgatggtggcatggcatccatcggggcgggcttataaaaggcagcacctcgtgctaaattttgtacattagacataattacctggtgtcgagcttatacgtgactggccctgctgcaagataagcaggaccaatggtcacgatagaaaaaaaaaagattgtagaataggcatgggggcttttgtttagtccgagttgttttaactcttccttgttgtgtcgtgtgtgcagtagttagactttgcattgatcccctgaggcgcaagaaagtggtgctggaattgttgcttaatagagctgccctctgttatagcagttcccttttaggggctgagctgaagcagtgttagaacttaactggtcatagtgtcatagatatgatgtgaactacaaatacttgtcctttttgtgacttaaatttatttattatggttattatcgg

SEQ ID NO: 28004 - DNA, 1944 bp, Zea mays
  Clone ID: LIB4743-015-H8_FLI
ccgggctcttcactctctcctccgtcgtctcgtcactcgtcagtcctcgctctcttcactcgctgaaaggcaggctggtggagtggaagcgcttcactccccttcgtgccagcccaggccatccgcccatcgccttccactggactcatctgcttggcactcctcgcccagtgcttggattcttgcacttggtgcttcccttcgcctacctcacatcaccagcccagatccaatccacacgagatttgcgacgctccggcctcccggcacgaagcctttctagggatcgccacacgccggccggggcgaaaaaagctcttcttggagcccttctgcttggcctctccctctcttctctcccggcgtcattctcgccgctgcctgcgagcaacaacaattatggccgccgcgacgtcgcgcgggccatcgtcggtcgccatctgcgcgctcgccgtgctccacgcaatggctgcgctgtgcgactccgccaccgcggcggcggcgacgtgcgccggcctggccccggccaagcaccggccggaggtgatatccatcgccgacttcggcggcgtgggcgacgggcggacgctgaacacgtgggcgttccgcaaggccgtgtaccgcatccagcaccagcggcggcgcggcggcacgacgctgcacgtgcccgcgggcacctggctcgccggcagcttcaacctcaccagccacatgacgctcttcctcgccagaggcgccgtgctcaaggccacgcaggacacgaggagatggccgctggtggagccgctgccgtcgtacggccggggcagggagctgccggggccgcggtacgccagcttcatccacggcgatggcctccgcgacgtcgtcattacaggtgacaggggagtcatcgacgggcagggtgaggtgtggtggaacatgtggaggcggcggaccctcgagcacaccaggccaaaccttgtggagttcatgcattccaccggcattcacatctccaacatcgtcctcaagaactcacccttctggaacatccatcctgtttactgcgacaacgtggtcgtaaccaacatgatgatcttggcaccacgtgactccccaaacacagacggagtcgatccagactccagctccaacgtgtgcatcgaggactcgtacatatccaccggcgacgacctggtggccataaagagcgggtgggacgagtacgggatcgcgtacgggaggccgagcgccggcgtcacggtccggcgcgtgaggggctcgtcccccttcagcggcatcgccatcggcagcgaggcctccggcggggtgcgcgacgtcctggtggaggactgcgccatcttcgacagcggctacggcatccacatcaagaccaacgtcggccggggcggctacatccgcaacgtcaccgtcgacggcgtgcgcctgaccggcgtgcgcagcggcgtccgcatcgccggcgacgtcggcgaccaccccgacgcgcacttcagccagctcgccgtgcccacggtcgacgccgtgcgcatcagcaacgtgtggggcgtcaacgtccagcagcccgggtcactggaggggatccgggcctcgcccttcacccgcatatgcctctccaacgtcaagctcttcgggtggcggagcgacgccgcctggaagtgcagggacgtgcgcggcgccgcgctcggggtgcagccgtcgccctgcgccgagctcgccaccagcttcgcgtccgcacggtcctcatgcagctagttagtgatgcctagctaattaatttctgaattctgatgatgggtgcgcttttaagtttgggctttgttttacttagtctatggaaccgatgtctgtctatctgtctgtccgtctgtctctgcttgctcaatcacttactttaggcttccactgctaaagtgctaatcgttcagaaaaccttaccactgc

SEQ ID NO: 28005 - DNA, 1758 bp, Zea mays
  Clone ID: LIB4743-016-C6_FLI
ccgggaggcttggttaaaaaaatctcatcgtagtcatcatcaccctcgcaccccgaaacgccccactaaaaccccacttacgcgcgcaaacaaagcctaagcgcgcacacacacaccgggagccgcgcaccccacggcacactatctcgtggcgtcgtgggtgtggtcgtgtggctaaacctgttcgcggcgcgccactcgccgtgcgacacggctgcgcagcgatgtggcagacgcgcagcttattgctactcgttgcggtggtcgtcgccgccgccctccccgacggggcggtggccgcggcggcggggcggtgcacgacgtccacgccagtcaagacgtacgacaagtgcatcgcgctgccgacgcagggcgccacgctggcgtggacctacgacgcgcggaacgcgacgctggacgcggcgttcacgggctccttcatctcgccgtcgggctgggtggcctggggcttgaacgcggacgcgccggcgatgacgggggcgcgcgtgctcgccgccttcgccgacccgtccacgggcgcgctcctggcgctgccgttcctcctctcccccgacgtgaagctgcaggcgtcgccgctcgtgtcccggccgctggacatcccgctgctggcgtcctccgcgtcgctcgtctcccccgcgcgcaccgtccgcgacggcgccagggtgacggtcgcggccaccatccggctgtccccgaaccgcaccagggtgcacttcgtgtggaaccgggggctgtacgtgcagggctactccccgaccatccaccccacggacgcctccgacctggcgtcgcacgccaccgtcgacatcctcaccaccgccaccgaggcgtcgcccatcgcctccgccgcgctgcagtggctgcacggttccctgaacgcgctctcgtgggggctcctcctccccgtcggcgcggcggtggcgcggtacctgcggccgtgcgcgtccacggggcccgcctggttctacgcgcacgcggcaatgcaggcgaccgggtacaccctgggcgccgccggcttcgcgctggggctggtgatgggctccgcgtcgcccggcgtcacgtacaagctgcaccgcgggctgggcatcgcggcggccacggcggggagcctgcagacgctggccatgttcttccggcccaagaccaccaaccgctaccgcaagtactggaagtcgtaccaccacctggtcgggtacggctgcgtcgtggtcggggtcgtcaacgtgttccagggcttcgaggtcatgggactcggcgcctcctactggaagctcggctactgcctggcgctcgccacgctgatgggcgcctgcgtggcgctggaggtgaacgcgtgggtggtcttctgccggaggcagcaggaggagaagcttatgaggagggaggtggaggacgtcgtcgtcaaggatagggcagccgccttctagttctagtgcttgtcttgctaccctccgccctccgctccgctgccaggacatgctggagcctagaggtttcggccgacgggggacccaggggctggtgggagcgacgtctcgaggatgcgggcacgctcacagtcacagccactgggtggggacaaagtgcctcggcgtgctctattttgtcgcatgataagagtgtggttttttcagatccttctcaatcaatatatatacagtagaaattcttgtacaattaacaccattggcttccaccagtttactcaacgaaatatatatttgtgaatgttgtact

SEQ ID NO: 28006 - DNA, 1651 bp, Zea mays; identical to SEQ ID NO: 25976
  Clone ID: LIB4743-017-A1_FLI

SEQ ID NO: 28007 - DNA, 2168 bp, Zea mays
  Clone ID: LIB4743-032-H1_FLI
agacctcttcgcatcccgaggcggcgcttttggggtcggaagcgacacgggcgcccggcgggtccgcgggtggtggtgctactgctagcaagcagcagcaggcgacgctaggcgagagccccagtcggagcaggccaccatgtgcggcatcctcgctgtcctcggcgtcgctgaggtctccctcgccaagcgctcccgcatcattgagctctcgcgcaggttacggcaccgagggcctgattggagtggtttgcactgtcatgaggattgttaccttgcacaccagcggttggctattatcgatcctacatctggagaccagcctttgtacaatgaggataaaacagttgttgtaacggtgaacggagagatctataaccatgaagaattgaaagctaagttgaaaactcatgagttccaaactggcagtgattgtgaagttatagcccatctttacgaagaatatggcgaagaatttgtggatatgttggatggaatgttctcctttgttcttcttgatacacgtgataaaagcttcatcgcagctcgtgatgctattggcatctgccctttatacatgggatggggtcttgatggatcagtctggttttcttcagagatgaaggcattgagtgatgattgtgaacgcttcataacatttcccccagggcatctctactccagcaagacaggtggtctaaggagatggtacaacccaccatggttttcagagacggtcccttcaaccccttacaatgctctcttcctccgggagatgtttgagaaggctgttattaagaggctgatgactgatgtgccatttggtgtgcttttatctggtggactcgactcttctttggttgcatctgttgcttcgcggcacttaaacgaaacaaaggttgacaggcagtggggaaataaattgcatactttctgtataggcttgaagggttctcctgatcttaaagctgctagagaagttgctgattacctcagcactgtacatcatgagttccacttcacagtgcaggagggcattgatgccttggaagaagtcatctaccatattgagacatatgatgttacaacaatcagagcaagtaccccaatgtttttgatgtcacgcaaaatcaaatctttgggtgtgaagatggttatttctggcgaaggttcagatgaaatttttggtggttacctttattttcacaaggcaccaaacaagaaagaattccatgaggaaacatgtcggaagataaaagcactacatctgtatgactgcttgagagctaacaaagcaacttctgcctggggtgttgaggctcgtgttccattccttgacaaaagtttcatcagtgtagcaatggacattgatcctgaatggaagatgataaaacgtgacctcggtcgaattgagaaatgggttatccgtaatgcatttgatgatgatgagaggccctatttacctaagcacattctctacaggcaaaaggaacagttcagtgatggtgttgggtatagttggatcgatggattgaaggaccatgccagccaacatgtctccgattccatgatgatgaatgctggctttgtttacccagagaacacacccacaacaaaagaagggtactactacagaatgatattcgagaaattctttcccaagcctgcagcaaggtcaactgttcctggaggtcctagtgtggcctgcagcactgccaaagctgttgaatgggacgcatcctggtccaagaaccttgatccttctggccgtgctgctttgggtgttcacgatgctgcgtatgaagacactgcagggaaaactcctgcctctgctgatcctgtctcagacaagggccttcgtccagctattggcgaaagcctagggacacccgttgcttcagccacagctgtctaaccttatgtttatcacccagcaatgcttgaaacagcaaaggttgtccattgcttgtttcagtttccttccgatcatgtttttagttccatcaatcaagcaatggagacatgcttgtgcttcatacttggcagcatcgtgtttgggttttcactgggcagtactgtttaatttttatggactgaaaagactcagttttgtaaatattcgtcactgtgaccaatccctgtggtggtttatgtgatttgcagattgc

SEQ ID NO: 28008 - DNA, 755 bp, Zea mays
  Clone ID: LIB4743-039-F9_FLI
ccgggacatatctccatctcacccgcgcgcccacgcacctccaccacgccatccatcgcaatggccgccgccgccgccgccaccgcgctcctcctcctcctgtgcgccgcatctctcgcgtccgcagccgccgacgacgggttgacgaccttcaaggtgtacttccacgacgtcgtggcggggacgaacccgacggcggtgcgcatcgcgcaggcggcgtcctccaacacgtcgtccaccagcttcggcgcagtggtggccatcgacgacccgctgacgacgggtcccacgcgcgccgcgggcacggaggtgggccgcgcccagggcacctacacgttcgcggaccagcagacgttcggcctcctcatggtcatgaacttcgtgttcacggccggcgagcacaacggcagcacgctctccatccttggccgcaacgaggtgctcagcgacgtccgcgagatgagcatcgtcggcggcagcggcaagttccgcatggcgcgcgggtacgtgcaggcacacaccatcgactccggcgccacctccgggaccaccgtcgtccagtacaccgtcaacgtcaaggcctagctacatcgatctccggctgctttgtacacaccttgtcattcttctgtgttagtactctacatctacatgacaacttgtcgtctttgagcgggattcggatttacagagcccaattactactaaagtttcaaaatttcacagagatatagggtcgagaattaaatgtgtag

SEQ ID NO: 28009 - DNA, 1157 bp, Zea mays
  Clone ID: LIB4743-041-H8_FLI
ccgggagactggtcataccttcgttccaaaaagctctcctcttccggtcttccccccttctgcagctgtgctcccctgccccgcggcgccgccgctagcctctcgtgcgccatgccaccgcgaaagcgcccggcgctgccgccggatgagccctccccttcctcgaagcatcaacctgaagcacagccgtccgaaccctccaaaccctcccccgattccgagcagccgatcatctcggcggcgatcctcgcccaactgcccccccaggagcgcctggcttacaagctcatcttcgaggcgggcaacaagggtatgtggatgctggatatccgcaagaagttgttgatgggccccaacatcgccaccaaggtcgtgcgtaccctcgtgacgcggcggctcctcaaggaggtcagcgatgtgcgccaccgtagcaggaagatcttcatggccaccgacttccagccctctgccgagatcaccggcggcacctggtaccacgacggccgcctggacactgacgccgtaaccactgcgcgccgctgctgccaggcgcaggtcgagaggctcggcgccgccaccgtgcagatgatccaccacggtattctgaaggacgatcccagggccgggtacactatcgacaagatcagggatatcatcaagaccatggttctcgacaaggtcctcgaggaggtcaagagcaccggcacgggggagttcagggatgtcagggccggcacaatgtgctatcggctggtgactggggctccgcagggagggatgatggagggaattccttgtggggtttgccccaggattgatgagtgctcgccggaggggataatctcaccgagcacgtgcgtttactacaagaagtggctgcagatggacttctaggcggttagccgtcttctgctgtacctgtatatgtgtatatgatggagtgttggagtccattggagaactcagtttcatattgaccaattggggctgttggatcacactcatcacacgctaggctggattcaaatgttcaattggaacctctgaaaggatagtcatagaagcgcagtttcagattctggtactcatattaagaatcatctctgtatttatttctactcagtccttttagcttgtcataatcttccatttgtatt

SEQ ID NO: 28010 - DNA, 1964 bp, Zea mays
  Clone ID: LIB4743-047-C4_FLI
ccgggacacttcacaagcagctcaaagctctagttctagctagctagcaaagggggggaaaatggctccgcttctcgctgctgccatgaaccacgctgcagcccatcctggccttaggagccacctagtaggacccaacaatgagagtttctcacggcaccacctgccgtcttcttctccacagagcagcaagcgaaggtgtaaccttagctttactacacgatctgcaagagtaggcagccaaaatggagtccaaatgttgagcccctcggaaatcccacaaagggactggttcccctctgacttcaccttcggtgccgccacttcagcgtaccaaattgaaggtgcttggaatgaagatggaaagggggaaagcaactgggatcacttctgccacaatcatccggaaaggatactggacgggagcaattcagacattggagcgaattcgtaccatatgtacaaaacggacgtcagattgctcaaggaaatgggcatggacgcatataggttctctatctcttggcccagaatactgccgaagggaaccaaagaaggaggtattaacccggatggcatcaagtactacagaaacctcatcaacttgttgctggaaaacggcatagagccatatgtaacaattttccactgggatgtacctcaagcactagaagagaagtacggcggcttcctagataagagtcataagagcattgtagaagattacacctacttcgctaaggtgtgctttgataacttcggcgacaaggtgaagaattggttgacctttaatgagccccagacatttacttccttttcctacggaactggggtctttgccccagggcggtgctcacctggactagactgtgcctacccaactgggaattcactcgtcgagccttacactgctggccataacattctcctagcccacgctgaggctgttgatctttacaacaagcattacaagcgcgacgacccgcatagggcttgcgtttgacgtaatgggtcgtgtgccatacggaacatcgtttctggataaacaggccgaagaaaggtcatgggacatcaacctaggatggttcttagagccagtggttcgtggtgactaccccttctccatgagatcattggctagggaacgactacccttcttcaaggacgagcagaaggagaagctcgccggttcctataacatgttggggttaaactactacacctcacggttctccaaaaacatcgacatctcaccaaactactcacctgtgctcaacactgacgacgcctacgccagtcaagaagttaacgggcctgacgggaagcccattggtcctcctatgggaaatccatggatctacatgtaccctgagggcttgaaggatctccttatgataatgaagaacaaatacggaaacccacctatctacatcaccgagaacggaatcggggatgttgataccaaagatacacctctacccatggaggctgccttaaatgactacaaaaggctagattacatccagcgccacatcgctactcttaaggaatcaatagacttgggatcaaatgtgcaaggctacttcgcttggtctctgctggacaactttgaatggtttgccggcttcaccgaacgttatggcattgtctacgtcgaccgcaacaataactgcacgcgctacatgaaggagtctgccaagtggttgaaagagttcaacaccgcgaaaaagcccagcaagaagattcttacgccagcttaaaaatcgggggcctcatgatgtgggtgcagcccataaaaactgtgtggtttggaaccgaagattttctcttttttttttctgccacgagaggttctctggaggcatactctccagcaccgtggctaataacgcgttgttccaattcagtctggccttgtcatgcatgcaataaataaagtgatgggtttccctgtttcaatatcc

SEQ ID NO: 28011 - DNA, 1691 bp, Zea mays
  Clone ID: LIB4743-047-F5_FLI
gtcagtgaaagagaggtaggtggccggacggtggtggcatcgccaattcaactccgcatctgaatcggcactcggcagcgcgccagctccataggaggagatggcgctcacaagaatcggtcttgctggccttgcggtcatggggcagaaccttgccctcaacattgcagagaaagggttccccatctctgtgtacaacaggacaacctccaaggtggacgagaccgtgcagcgtgccaaggcagaaggaaaccttcccgtctacggcttccatgaccccgcgtcctttgtgaagtccattcagaagccacgggtggtgatcatgctcgtcaaggccggcgcgccagttgaccagaccatcgcgacgctcgcagctcacttggagcagggcgactgcatcatcgatggggggaacgagtggtacgagaacacggagaggagggagaaggccatggaggagcgcggcctcctgtatcttggcatgggtgtctctggaggagaggagggtgcccgcaacggcccgtccttgatgcccggaggctcgttcgaggcttacaagtacgtcgaagacattgtcctcaaggtggctgctcaggtccctgacagtggcccgtgtgtcacgtacattggcaaaggtggatcgggcaactttgtcaagatggttcacaacggaatcgagtatggcgatatgcagctgatttccgaggcatacgacgttctcaagtcggtcggtaagctcaccaacagtgagctgcaccaggtgttctccgagtggaacaagggcgagctcctgagcttcttgatcgagatcacggccgacatctttggcatcaaggacgagcatggcgatggctacctggtggacaaggtccttgacaagaccgggatgaaagggacagggaagtggacggtgcagcaggccgccgagctgtcggtggccgctcctacgatcgaggcgtccttggactcgaggttcctgagcgggctgaaggacgagcgggtggaggcctccaagatcttccagggtgactactactccaccggctcgccggtggacaaggcgcagctggtggaggacgtgaggcaggccctgtacgcgtccaagatctgcagctacgcgcagggcatgaacatcatcaaggccaagagcgcggagaaaggctgggggctcaacctcggcgagctggccaggatctggaagggcgggtgcatcatccgcgccatcttcctggaccgcatcaagaaggcctacgacaggaacccgggcctcgccagcctgctcgtagaccccgagttcgcgcaggagatcatggacaggcaggcggcgtggcgcagggtggtgtgcctcgccatcaacaacggcgtcagcaccccgggaatgtccgctagcctggcctacttcgactcctaccgcagggacaggctgcctgccaacctggtgcaggcccagagggactacttcggggctcacacctacgagagggtcgacatgcctggctctttccacaccgagtggttcaagattgcgcgcaacatctccaacaactgatgagctgctcaacggatggcatgcccggtgttgactactccagtcggtaatgagatttcctgcaggaacttgtctattgatctttgtaagttaattatttatatgaataaaataagagcagacatgcttgtgtttgggcatt

SEQ ID NO: 28012 - DNA, 738 bp, Zea mays
  Clone ID: LIB4743-049-F3_FLI
ccggggtttccccttcttccccatcgcgtgccctcgccgcagccatcttccatggcggaccagctcacggacgagcagatcgcggagttcaaggaggccttcagcctcttcgataaggatggcgacggctgcatcactaccaaggagcttggaactgtgatgcgctcccttggccagaaccccactgaagcagagctgcaggacatgatcaacgaggttgatgctgatggcaatgggaccattgacttcccagagttcctgaacctgatggcaaggaagatgaaggacaccgactccgaggaggagcttaaggaggcctttcgcgtcttcgacaaggaccagaatggtttcatctcggctgctgagctccgccatgtcatgaccaacctcggcgagaagctgactgacgaggaggtcgacgagatgatccgtgaggccgatgttgacggcgacggccagatcaactacgaggagttcgtcaaggtcatgatggccaagtgaggagcgatccccgttatctatgaatgaattgaagtgaaatatcaggcacacaagctgtactttgccatgtcccttttgagtacacatcagtatcatgcaggaggtaatgtctagtagtggtcggtttaggtggtgtagtcatgggaactcgacatcagatacctggtctcttttgattgtgatgttatcttgcattattgctcctgctggagcttttaggatttgttgtaagctcat

SEQ ID NO: 28013 - DNA, 2188 bp, Zea mays
  Clone ID: LIB4743-049-G9_FLI
ccggagtatggatccccaccgccgctcaccggaatacaactccctcctcctcgccggcccgcgcctgggtcctctgaagcaagcccacgcgcgcctcgtcgtctccggccacggcgattccttgccgctcatcaccaagctagccacgctcgcggttgcggccggcgccgcctcctacgcccgcctcctcgccgcctcccacccggcacccgactcctttctcttctgctccctcacgcgcgccaccgcgcgccgcgggctccccgccgccgccctcgccttctaccgctgcctactcgccgccgccctccccttctccagcttcgcattcacctccgtcgccaaggcctgcgcggacctgtccgcgatccgcgctggtatgggcatccacgcccacgccgtcctcctcgggctcggctccaaccggttcgtgcagacgtcgctcgtcgtgctgtattccaagtgcggccagctggatgttgcgcgcaagctgttcgacgcgattcgtgacaagagcgtagtcgcttggaacgcgatgatttcagggtacgagcagaacgggctcgctggaagggcgatcgaggtgtatagggagatgcaaatggccggggaagctccagattccgcgacgtttgtggccacgctctctgcctgtgcgcaggctggcgctttggacttgggacgtcaggtggacaagctcattgtttctgagaggatggagatgaatgtggttcttggtgctgcacttgtgaacatgtatgccaggtgtgggcttgtgaacaaggctcgtgagtggttcaatatgctccaggaacgcaatgtggttacgtggacctccatgattgcaggatatggcatgcacggacatggcggcgaggcagtcaagctattcaatttgatgagacagcaagggccaccacccaatgatgtcacttttgttgcggtgctgtctgcgtgcgcacatgctggattggtaagcgagggccgggatgcttttgcttcaatgaagagtgtctacggattggtccctcgtgttgagcactattgctctatggttgatatgtatggaagggcaggacttcttgatgatgcgatgcgatttatacatgattcgatacccggagagcctggacctgaagtttggacagctatgcttggtgcatgcaagatgcacaaggatttcaatcttggagtggaggttgctgagcgattgatcgccctcgagcctgagagtccatctcaccgtgtgctgctttctaatctatatgctttgtctggtaaaatgaaccatgttgagaaggtgagggatacaatgattaagagaagattgaagaagccaataggatatagcttgattgagattgctggtgttgctcatttgtttcgcatgggtgagaagtctcaccccaaaacttcagagatttaccaatatttggagaaactgatcgaaaagattactgatgttggttatgtgcctaaaactgactcagtgttgcatgagttggaagaagaggaaagggagtttgcattaagataccatggtgaaaaactggctgtagcctttggactcatgatgacttctgggtgcaccactccaatcaggataattaaaaacctgcggatatgtgaggattgtcatctagctatcaaatatatgtcagccgtggagaatcgagagataattgttagagatatgcaccggtttcaccatttcaaagctggaaagtgttcctgtcaggaatattggtgacgaggcctctctcgcaagctaaaaatctgaggaacaagagctgcaactcagcaacattgggagtgggacaccagcaacaacacctttactacccatcaaaattcacaagagcaagaggacgatgtcgaaaacatttcatttccaaaaagtttggtggagagcaactagattatccttttagttggagacttggagtaggactgatgatttttgtaatggattgttggatggagtctacatggctgaacctgaatggcctggacctgaatggacatcatggtcaattggtcatggctgaacctgaatggacatcatggattcatggtcatggttctcttatttgtatttgtttatgttctatttttggtggacaacaagcatggatgaactgttctgtaatctactttttagtttttggatgaagaaatgcaactatgc

SEQ ID NO: 28014 - DNA, 1935 bp, Zea mays
  Clone ID: LIB4743-050-D5_FLI
acacagacacacaaacacaagtcgtcgtaggcagcgagcgtctctcctctcccacgcatcgcgccaaggaagagagagagatcgccgctccccttctcggcgtcggtggtgcgggtgccctccctcctcgagcgagatctgtctggtcacagatctatctgacaaaatggtgaagatctgctgcatcggtgctggctatgtcggtggcccaaccatggccgtcattgccctcaagtgcccagacattgaggtcgtcgtcgttgacatctccaagccccgcattgaggcctggaacagtgacaccctgccaacctacgagcctggtctcgatgatgttgtgaagcagtgcaggggcaggaacctcttcttcagcactgatgttgagaagcacgtcgctgaggctgacattatctttgtctcggtgaacacccccaccaagacccgtgggcttggagctggcaaggctgccgacctcacctactgggagagcgctgcccgcatgattgcggatgtctccaagtctgacaagattgttgttgagaagtccactgtccctgtcaagaccgctgaggctattgagaagatcttgacccacaacagcaagggcatcaactaccagatcctttccaacccagagttccttgcggagggcactgccattgaggacctgttcaagcctgacagagtgcttatcggtggccgggagacccctgagggcaggaaggccgtccaggctctcaaggatgtgtacgctcactgggttcccgaggacaggatcctcaccaccaacctgtggtctgctgagctctccaagctcgctgccaacgcgttcctggcacagaggatctcctctgtgaacgccatctccgccctctgcgaggccaccggcgcgaatgtgactgaggtggcttacgccgtgggcaaggacacgaggattggccccaagttcctgaacgccagtgttgggttcggtgggtcttgcttccagaaggacatcctgaacctggtgtacatctgcgagtgcaatggcctgcccgaggtggccaactactggaagcaggtgatcaagatcaacgactaccaaaagagccggttcgtgaaccgcgtcgtgtcgtccatgttcaacaccgttgccggcaagaagatcgccgtcctcggcttcgccttcaagaaggacaccggcgacaccagggagaccccggccatcgatgtctgcaagggcctgctgggtgacaaggcccagatcagcatctacgacccccaggtgacggaggaccagatccagcgggacctagccatgaacaagttcgactgggaccacccgatgcacctgcagccgacgagcccgacggccgtgaagcaggtgagctgcgtgtgggacgcgtacgaggccaccaagggcgcccacgggctgtgcatcctgaccgagtgggacgagttcaagaccctggactaccagaagatcttcgacaacatgcagaagcccgccttcgtcttcgacggccgcaacatcgtcgactccgagaagctgagggagatcggcttcatcgtctactccgtcggcaagccgctcgacgcctggctcaaggacatgcccgcggtcgcctaatcccacccccctcacccatggattggattccgggaaggaagaggagagaagctggttgaccgttctttattacagtttgtttttgcaggctacgctaccgattttctcttgtgtcaggcataaaaaaaggttggacgggctgctagtattccctgctgtttggtgttttcgtatcggaggacgtctgtagatgtacaattcctcaggccccttgtgttcggcttgaggaagtttccgttgtaccctggacctgctatagccggttgattcttcaattgtattcctaaaagttactacacagtcgatatgttccttttcttttttgc

SEQ ID NO: 28015 - DNA, 1991 bp, Zea mays
  Clone ID: LIB4743-052-A6_FLI
aaccaaggaggaggagaagatgtcattccaccaccaggggcctcccctttccacctgttcgtcgcgtgcgcattcgttcgcgcagccagccaccaccggcccccatcgatcgatatcctcctcctgctagctctcgcagttccgtccgatcgactatactgatccagctcctgctatgcgcggcggcggctagctcctcgacgacgacgagcagctgatcaatccgagtccgccggcgcggatcgtcgttcgatcggtcaccagaccatggggactccggtgaacatcatcgtcggctcgcacgtgtggctggaggaccccggcgaggcgtgggtcgacggcgtcgtcaccgagatcaaaggcggcgacgccaccatcgccaccaccaacggcaaaacggtcgtggcgagccttggcagcgtataccccaaggacacggaggcgccgccggcaggagtggacgacatgaccaagctggcctacctccacgagccgggcgtcctgcacaacctctcctgccggtacggcctcaacgagatatacacgtacaccgggaacatcttgatcgcggtgaatcccttccagaggctgccgtatctgtacgacgtgcacatgatggagcagtacaagggcgccagcttcggggagctcagccctcatctcttcgccatcgcggacgcctgctacagggcgctcatcaatgaccaggcgagccaagcgatcctggtgagcggcgagagtggcgctggcaagacggagaccaccaagatgctcatgaggtacctcgcattcatgggaggacggtccggcaccgagggacggaccgttgagcagcaggttctagagtctaacccggtacttgaagcatttggtaacgccaagacagtgaagaacaacaactcaagtcgattcggcaagttcgtggagatccagttcgacaagaatggcaagatatccggggctgccgttcgcacgtatctcctcgagcgatcgcgagtgtgtcaggtctccgatcctgagaggaactaccactgcttctacatgctctgctccgcgccccccgaggacgtgaagaggttcaaggtgggggacccaaggtcgttccattacctgaaccagacgaactgctatgaggtggccaacgtggacgacgcgagagagtacatagaaactagaaacgctatggatatcgttggcatcgatcaagatgaacaggacgcgatcttcagagtagtagcggcgatcctccacctaggaaacgtcaacttttccaaagggcaggagatcgactcgtccaagctgagagacgataaatcggtccatcacctgaaaacagttgcggaactgctaatgtgtgacgagaaggccctcgaagactccctctgccagcgtgttattgttacgcctgatgggaacatcacgaagccccttgatccaggctctgcggcgttaagccgagatgccttggcaaagacagtgtattcacgactgtttgactggatcgtagacaagatcaataactcgattggccaagatccagatgcgaccaatataataggcgtgcttgatatctatggatttgagagcttcaagatcaacagtttcgagcaactgtgcatcaatttgacaaacgagaagctgcagcaacacttcaatcagcatgtgtttaagatggagcaagaagaatacacaagggaggaaatagactggagctatgttgaatttgtagacaatcaggatgtgctggacctgattgaaaagaaacctggaggaataattgcactcctggatgaggcatggtatggcttgtggtacttcgagagattcgttttacttaaaaaaatggagaagagctttgagaaacatgtagctttgtgtacaaactgacacaaaacttaaaacatatttaagtatattttgttgttactaaatattaacatatagcatagttttttcctagcgaacatgcaatttgaaggaaaacataagtg

SEQ ID NO: 28016 - DNA, 2291 bp, Zea mays
  Clone ID: LIB4743-053-E1_FLI
ccgggtacaaagcttttacagattttattatttttctctagtcgtgtatgatgattgataatgaaaaacagtacgtggctcctttttgtttagttcacaagtaaactcactagctgtctctattatcaagcttaaaactggccattttcttgacacgcatagcagtatttatgttgtgttaatcagacttctatgcatgttagccttgtttgaagcttctattctttttttaactatgactatattttcttgttccagatattggaaggtcttctacggcatcctgagaatagagaatgcgcagactgcaagtcaaagggtcctcgatgggcaagtgtgaatctaggtatctttatatgcatgacatgttctggcattcatagaagcctgggggtgcacatatctaaagtaagatctgccaccctggatacatggctgccagagcaagttgcatttattcaatgtatggattactagctgcaatgggaaacgaaaaagcaaatagctattgggaagcagagctgcctcctaactacgatagggttggaatagagaatttcatccgtgcaaaatatgaggacaagagatgggtaccaaggaatggaacatcaaaatcttcgtccagtgttcgagatgagaagagccaagagtctccggctagtgctaataggagtggacatggtcatagatcttcatttgagcaaaaccgtgcttcaccagctcttccgagcaaagttgcacatgcagcttcaaggatatcctctcaggtaaccccctcactaccaaaactttcctaagcaatagtcagttcatcattgtgaaactagcggatgtgtcttcatacatagctcttttgaagttttagcccttgttctttaactcaggctgagtaatccatattgcagaattcttaattatgaatcactttaagacatcagtaataaccacttctaatctggcatgattgcgtttgaagtaggcatcacctcagcccccgaaggtagaaacaccagttccaaaggtggttttacctcctcagtcacagaaatcccccgccaaagttgatgcaacaccgcctaaagttgagaagccatcggttacaccacctcctaaagttgattatgccactgatctctttaacatgttgtcaatggatggaacaacagagaaagagtcagcgtcatcttcaaacgacgataatggctgggatggcttccagtgtaagttattgtaactattcaactgatgaattattctatttatttacgtgggcactttattgtgcctttctcacgttcttggagcaactatgttagtaagatgttgatgggtttccatgtcactttttttattgttgatcatggaatattaaaaaatttcagctgcacaaccagtacctagttcagagaaaaaagattctgccaaaccagcagaaagcaagacccagtctacatctggaatggaagacttatttaaagactcaccagctgtgccattatcctcagctccagctgtttcccaagtaaacgctaagaatgatatcatgagtttgtttgagaagtccaatatggtatcacctttcgctgcccatcaacagcagctggcgctcatgtctcagcagcaagctcttctaatggctgctctcaaagctggaaatgcaccacaaatgatgattccagggactgccaatcagctaaatgctaacggaaccttgcctttccaaaactggacaaatctttatcaaaattctgggtcgactccagcagcagcacagaatggtgccaccaaggttgctaacaacaatcaggacttctcttctggtaccttcggttttggcacacctggggtgtacaacattagcccaactgtcccagcaaatggggccacgacagcaggtgctatcaacaacggcactgcatcaactgcctcttctactctcccctcacaatctggcaaagactatgatttttcgtccttaactcaaggatttttcaccaaacgatgagcgcctagtgagcttgaaaaccaaacagaccacaggatcatgttggacgaggcatattgatttagggagcacaaggggcttacacatgcttatttcgaggcagattttcttctggtggatatattgttgtttcatgaccttgtagctgtcggacaataagagtggaaatatgccgcaaaatagctttgttgtttctaaaagcgaagaatacattgccggttatgtcaacggcttttactcgaggaccaccttgtcagttatacaagtctaatgcagtcttttcact

SEQ ID NO: 28017 - DNA, 2187 bp, Zea mays
  Clone ID: LIB4743-055-D9_FLI
aataattgattgccactgattccagcaaggttctaataaatcttgtagatgcaacctcgctttgcctgccgccgccagtcttccgcctccgccacacacaaatgtccagtttctttgctgtagctgtagctttggtgctctcatctctcatccatggaaccacgatggccacagcgagcagcgaagagagcttcttccagaagtgcccagcgtccagctgcagcgaaggagggccagagatccggttcccgttccgccttgcgaccagccctctgtcatgcggtgcgcccggcatggagctggtgtgctccaaagcagacaccgtcctggttcacccaaaccttggcttgtgtaaggtaactgccatctggtatggcggcagcactataaccatcgtcccactcgcagcagaaccagaacccaagtgccctttccagaagatcatctccaccaatctatcaaccgatgtgtatagaccttatggggatagggcaaccttagtgagctgttcagcagagttcatagtaccaagccatccggccagccttgctggtcccatctcttgccttaccaacgctagccgccggttcacttacttggtgccgtcttttcgaccaatggatttccttcccttagactgcacggttctttcgaatagcatctcggtaccttaccctgcttctgtcaacgcgggcttcaacggaactgcaagaggagccgtcgcatttggcgagacaatgttagaatggagagttcctaacattaccgatgtctgccgagactgcgaagctgaaggaaggctctgtggatttagctctgagagtaggcaagcattctgtaagagtaagaatcacagttcacgtctcaaggtcattgcagtaacgacgccagtagccgcagtcctggttctttcagcaatggcaggtgctgcattattacacctggccctgaaatctaaatacgacgacgagatacacaggaaagtggagatgttcctcgagacctacaggacgctgaaaccgagaaggtacacattctctgaagtcaggaagatgacaagacggttcagcagcagacttgggcaaggcgggtttgggagcgtgtacaaaggcgagctgccgaacggaggagtgcctgtgcctgtggcagtcaaaatgctggaggactcgacgggggaagaggagttcatcagcgaagtcgcaaccattggaaccatccaccacgccaacgtcgtccggcttctagggttctgctccgagaggtcaaggcgtgctctggtatacgagttcatgcctaacgcgtcgctggagaagtatatacgctgctcctcccaagaacagtcgttaataccaacggccagtaagatgctggaaatagcgacagggatcgcccgaggaatcgagtacctgcaccagggctgcgaccagcgcatcctccatttcgacatcaagccttccaacatcttgctagactacaacctgaacccgaagatctcggatttcgggctggcgaagctgtgcgcgagggaccagagcgtcgtcgcgctgaccgcagcgagaggcaccatgggctacattgcgccggagctatactctcggaacttcgggacagtgtcatgcaagtcggacgtttacagcttcggcatggtggtgctggagatggtggtggtgagtgcaaagaggaggaagtacagcccagcagagaccgaggaccagaacgacgacgtttgcgttccagagtggatatacgaggaaatagtcaccggacaagagcccagggaaatggcacgaggagagagagacatggtgaggaagctggctatcgtggctctctggtgcattcagtggaacccaccgaaccgcccgtccatgactacagtggtgaacatgctgacggatagcttgcagagccttaagataccccctaaaccatttgtttcatcctttgttggccagtaaccatgaagaaaaagctctagagaccacatggtgaccattcagatagatattcgtgtctatcacttgtcggcatatgcatgtatcagtgatgatgccctgtgtctgtcgtagttttgtgtcatacccttttttttcctccttgtaaccactagattgtatacattgcaattttctggtggtttaaccatgttcacgaatttgtaatgacattattagcaggacgttacat

SEQ ID NO: 28018 - DNA, 1283 bp, Zea mays
  Clone ID: LIB4743-055-E5_FLI
ccgagcatcggacgttgtacggtagcttcttcttcctcgatcttcttcttttgcttgctgcttgcgttcatagtcaagcacgaggaggaagaagagataagagaaaaaagaagaggcaggagcagctagtcccatcgatccatccatccagtcgttccaaccatcatccatagatctatagcttcaccgacgaaatgacgacgacgtcgagagatgagatagtcttcttggacgtggagacgacggctccgacgtcggcgggacggtggtggctgctagagttcggcgccatcctggtgtgccccaggaagctggtggaggtgggcagctacgacaccctcatccgcccgggcgacctctccgccgtctccaggcggttcacggacggcgtcgaggccatcgcgtcggcgccacctttcaaggacgtggccgacaagatattcggcatcctggacggccgcgtatgggctggccacaacatccagcgcttcgactgcccccgcatccgcgaggccttcgccgacatcggccgccccgccccggagcccgccggcgtcatcgactccctcaacgtcctggccgcggagttcggccgccgcgccggggacctcaagatggccacgctcgccacctacttcggcatcggcaagcagaagcacaggagcctcgacgacgcgcgcatgaacctggaggtgctcaagcactgcgccaccgtcctgctgctcgagtccagcctgccacacgtcctctgcggcaggcaccagtctcgccaagccgacggcgccgtggtcaccaccaggaggatggcggcgcagcagacgcctccgcctaaacatgaagtacaccaacaccggcccggcgtcttgaccaagctgccgccgtttacccctgtgcacgaccgagcagctacagctacagctgcacctgcacatgcggccacccccacccccaccactccatgcggcaagaggaatagcctgggcaaggtggtggcgagggccgtgacggcgaccactgctccattgagtagcagtaatagcacaagcacaaacaggcgccccgtgacggcgaccacgcccttccacatgatcctcaggcactcaagggccatcctcagatgatccatctttctttctttcttctttggatgatccatgacaatgggtgagaagaagattcttatttaatttgcttcggctcaaacatgtctttccctagctcaactggtgtagatatatagtttggtgttgtaaattcctctgaataaactgttcattcgtatt

SEQ ID NO: 28019 - DNA, 1918 bp, Zea mays
  Clone ID: LIB4743-056-H8_FLI
gatcgagtcacatgctagcgtgcgtgtgcgtgtgcaacggctataccacctgcgcgacccaccgcgagcgcccgcagctaagctagctctcgctcgcgcgctctgggagaggagagatcaatggcgtcccgtggcagcatgacctgtagtcttcagctcgccgtcctcgtttccgccgccatcgcgctcgggttcggcgtccgggccggcgaggcgcagctgtccagcgagtactacggccagacgtgccccgtcgtgcaccgggtcgcgcggcgggtgctgaagaaggcgcacgaggccgacgtccgcatctacgccagcctcacccgcctccatttccacgactgcttcgtgcaaggctgcgacggctccatcctgctggacaacagctcgagcatcgtgtcggagaagttcgccacgcccaacaacaactcggcgcgcgggtaccccttggtcgacgccgtcaaggcggcgctggaggaggcttgcccaggcgttgtctcctgcgctgacatactggccatcgccgccaagatctcggtcgaactggtgagtttttctacctatcgatccaccgttggtcatccccagtctactgtctccatccgcagaagaacataattctacctcagtacagtaggctcgatgtcaccgttaatgagttgatctcgacggaacgccattgtacaacagcaagcaaacaaactgtcggactggcattgtaccttctaccttgccttgaccgggaggcagtagctgtagctctagcctctaggcctggagacctggagcaatagtccgaacaaaactcccgtcggtgcaaaataattgaactagtagctagtatggccattagagagatctacgagaagatgacaaaactgcacgccttttttttaagattaaaattaaaagcatgcagaaacagatagataccctagtacagtatgacgtgcatattcacacacgtcaacgtcacgtcacgtcggctgccatcagcaggacgttcgagggtcataggcgcccgtcagtgtcctctccgtgccacgctttaatccaacacggccacatgacgcgtggtccctcccttctcaccatgcgcgcagtccggcgggccaaggtggcgcgtgcctctcggccggcgcgacggcaccacggccaacatcaccgccgccaacaacctcccgagccccttcgacaacctcactacgctccagcagaagttcggcgccgtcggcctcgacgacaccgacctcgtcgcgctctcaggtaaaaaaaaaagggggggagagaaaaccggcgatgcatgcctcgtgattcttgcacctgcacagcacgacacatggcgtcacaacgacggcggatgcattgcaggggcgcacacgttcgggcgcgtgcagtgccagttcgtgacggcgcggctgtacaacttctgcgggacgaaccggccggacccgacgctggacagggggtaccgggcgttcctctccctgcggtgcccgagggccggcaacgcgtcggcgctcaacgacctcgacccgaccacgccggacaccttcgacaacaattactacaccaacatcgaggcgcgccgtgggacgctgcagtccgaccaggagctgctgtcgacgcccggcgcgcccacggcgccgatcgtcggacggttcgccgccagccagaaggagttcttcaggagcttcgccaggtccatggtcaacatggggaacatccaggtgctgacggggagtcagggtgagatcaggaagaactgtaggatggtcaacggaagctagacccgtcgacggcacaagttactggtgaactgaaagcagttctgctgtatgtacgatgcctcaaacatgttgatgggataatggtgcgccgatcgatttatttgtctaaaagaaaaaaaaaaagc

SEQ ID NO: 28020 - DNA, 1736 bp, Zea mays
  Clone ID: LIB4743-061-B7_FLI
aattgagcatcgcagagataggcgtcttcgtactcgcctacctccgcggctcaaacctttcccccttctcccaattcccgccgccgctccatcccgtaacgcgacaccatgagggagtgcatttcgatccacatcggccaggccggtatccaggtcggaaacgcgtgctgggagctgtactgccttgagcatggcattcaggctgacggtcagatgcccggtgacaagaccattgggggaggtgatgatgctttcaacaccttcttcagtgagactggtgctgggaagcacgtgccccgtgctgtttttgttgaccttgaacccactgtcatcgatgaggtgagaactggcacctaccgccagctcttccaccctgagcagctcatcagtgggaaggaggatgcagccaacaactttgcccgtggtcactacaccattggcaaggagattgttgacctgtgccttgatcgcatcaggaagcttgccgacaactgcactggtctccagggcttcctcgtcttcaacgctgttggtggaggaacgggctctggccttggttccctcctcctagagcgcctgtctgttgactacggcaagaaatccaagcttgggttcactgtgtacccttccccccaagtttctacttcggtagttgagccatacaacagtgtactgtccacccactccctcctcgagcacactgatgtggctatactgctggacaatgaggccatctacgacatctgccgccgatcccttgacattgagcgcccaacctacaccaacctcaacaggcttgtgtcccaggtcatctcatcccttactgcctccctgaggttcgatggtgctctgaacgtggatgttaacgagttccagaccaacctggtaccctacccgaggatccacttcatgctttcttcgtacgctccagtcatctctgctgagaaggcctaccacgagcagctctctgtggctgagatcaccaacagtgcctccgagccatcttccatgatggccaagtgcgacccacgccatggcaagtacatggcctgctgcctcatgtaccgtggtgatgtggtccccaaggatgtgaatgctgctgtggccaccatcaagaccaaacgcaccatccagttcgtggattggtgcccgactggcttcaagtgcggcatcaactaccagcctcctagcgttgtgcctggtggcgacctggccaaggtgcagcgtgccgtgtgcatgatctccaactccaccagtgttgtggaggtgttctcccgcatcgaccacaagttcgacctcatgtacgccaagcgtgccttcgtgcactggtacgtcggtgagggtatggaggaaggtgagttctctgaggcccgtgaggacctggcggcgctcgagaaggactacgaggaggtcggtgctgagttcgatgagggcgaggatggcgacgagggtgacgagtactagagaagtttgctgatgacgcagcatcaggccagtgtgctgcccttatcccgtgatctgccgagagttgctcctgctatcgtgttatgtgtgtctgttctgaagtattgtgtggtttacaacacctgatgttgtaagagttgttaattcccctgcattgctaccgggttattgagaataattatggctgtttacgttgttgcttcatctcggagatgctttacatttaccaccttgttcatcttttgtcatcagtaaaatcgagtcggcggatg

SEQ ID NO: 28021 - DNA, 583 bp, Zea mays
  Clone ID: LIB4743-062-H10_FLI
taccctcgaggccggccgggactgacgagctcgccatggcctccctctcctctgccgccgtcaccgccccttccttcgccgcaccagcgccagcccgcgccgtggtcagaaggaggtccttcaccgtgcgcgcctctctccgcaaggccaccggcaccgccgccgtggcaatggctgccagcgccctgcttgccggcggtgccatggcccaggaggtgctgctgggcgcaggcgacggcgggctcgtcttcgagcccagccagttcaccgtcaaggccggcgacaccatcacattcaagaacaacgccggcttcccgcacaacgtcgtcttcgacgaagacgaggtgccgagcggcgtcgacgccaccaagatctcgcaggaggagtacctcaacgcgccaggcgagacctactccgtcaccctcaccgtgccgggaacctacggcttctactgcgagccgcatcaaggagccggaatggtcggcaagatcaccgtcaactaattaagctagctatcgatcgatatccattcatgtattagctgttgcttcctgctttgtactccgccgatctgtccatctcc

SEQ ID NO: 28022 - DNA, 2028 bp, Zea mays
  Clone ID: LIB4743-063-B10_FLI
ccgggaaaccattcaccattctaaaaaaaatccccgatcttactacctttctcctcctctctctcacggtctcacctctagtttccaggatgacaaattatgagatcagattcgattcgtgagcctgtagaacaaggatgctcctccaatccatactaaattgaacccacgcagcagacatccgcgcgcagtacgtccccttcgcgccgtgagctggctgctacagctgcagctttctcgaagttgactgtacaggatttgaggaagctcatcccacccgagttttatccatcatgggtttcattcacacaaaagcagaagcttaaatggctgaatcaagagctgacaaaaatctggccatttgtcaatgaggctgcatcagagttgatcaaaacttctgtggagcctatttttgagcagtacaagtcattcatcctggcctccctccatttctcaaagttgacacttggtactgttgctcctcagtttactggtgtttcaatcttggagagtgatgattctgccatcatcatggaacttgagttgcaatgggatggcaatcccaatatagtacttgacatccaaacaacacttggaatttctcttcctgtacaggtgaaaaatattggattcacaggagtacttcggctcatatttaaaccgctggtgtctgaattcccctgttttggagctgtttgctgttctttaagggagaagagcaaggtggaatttaccctcaaggttattggtggcgaaatgactgctattccaggaatttctgatgcaattgaggggacaatacgtgatactattgaggatacactgacatggccgaatcgcataattgttcccattgtacctggagactatagtgacttggagttgaaacctactggggtattagaagtaaaactggtggaagctagggacctaaagaacaaggatcttgtgggaaagtcggacccttttgcattgatatacatacgtccattgcatgataaaacaaagaaaagcaaaacaattaacaatgatttgaatcccatctggaatgagcactatgaatttgtggttgaggacatatctacgcagcacttgactgtaaaaatttatgatgatgaaggactccaatcatcagagatcattggctgtgctcgagtagacttaactgatatacagccaggaaaagtgaaggatttatggttagatcttgtgaaggacctggaaattcaacgagacaagaaacctcgtggtcaggttcacctggagctcctctactacccttacgctaagcatgaaggggttcctaatccttttgctaatcagattcaactaacttcattggagaaggttctcaaaaccgagtctaatggatatgatattaatcagaggaaaaatgttattatgagaggagtccttttcggtgacggtcatatctgcagaggagttgccacctatggacattggtggcaaggctgacccatttgtggtcctgtacttaaagaagggagaaaccaaaaagaagacgagggttgtgacagacacgttaaatccaatatggaaccagacatttgatttcatggtagaagatgcactgcatgatttgctcatggtggaagtatgggaccatgatacatttggaaaggattacatagggaggtgcatcttgacactgacgagagttatactcgaaggtgaattccaagatacctttgtcttgcaaggtgccaaatcgggaaaactaaacttgcatttcaagtggacgccacagccaatctatcgtgatcgtgacagggatcagtgagacttgtaaacgaaaaaggccgataaacacttatccccaacgatgctatgtatattagtcgttctgtatttacacaaatcccacggttcttgtagccacgtgaccaaaaagagatcaacccaccgacctgtattttctcctatctcctttgtgatgcaagtcagcaagtgcatggacctgtatatttgacagtcgtgaatgaataggaaatgctgttactatgctgc

SEQ ID NO: 28023 - DNA, 1246 bp, Zea mays
  Clone ID: LIB4743-106-G11_FLI
ttgcctttgttctgttctccattcgcgaaaggctcgcagcaaaaccacgccatcgatcgccgccaccagtccagcatcctccgatcgactacgtactcccacccactccggcagcagcgaggcctctctgtctgtgcgcggcgtggctgtcgtcgatccctgcctggcgggcggccggcatggggaggtccccgtgctgcgagcaggcgcacaccaacaagggcgcgtggaccaaggaggaggaccagcgcctcgtcgcctacatcaaggcccacggcgagggctgctggagatcgctaccaaaagccgcaggtctgctgcgctgcgggaagagctgccggctgcggtggatcaactacctgcgcccggacctcaagcgcggcaacttcaccgaggaggaggatgacctcatcatcaagttccacgagctcttcggcaacaagtggtcgctcatcgccgggaggctgccgggcaggacggacaacgagatcaagaactactggaacacgcacatcaagcgcaagctcctcgcccgcggcatggacccgcagacgcaccgcccgctcgccatcgcgaccgcggggcagcagcattaccagctgcaggagccgcagaagcgagcggccggcggcggtccagcaggccatccgcaccaggaccacttggaggtcgtcgtcatctccaactcgccggacgaggcctacagccgtagcagcgacgacgagccgcggtccgccacgccgccgcggcgccacctcgacatcgacctcaacctgtccatcagcctagcggcctaccagccgccggaggaagccggcatcatgaagcagccgctggtgatgaagcaggagcaggaaacggcggcgggcggcacgggcaccaatgccgcggcggtgtgcttgtgcctcaacagcctcgggtaccggccgggcgtcgagtgcgtctgcggcgacggcagctcctcctcctcctcctcgcactcccactcccactcccaccaatgggctctgaattttttacaggcggcggcgccctgctacagaggccaatagtgtagtaagagcgatcagtgacatcattaaagtgggagcgttattacgatcgagactgagggtgagggaggaggggcagagcagggatagtagtagttaactacagctagtagtagtatagtacgtaaaagccacacatgtttaggctttaacagctctctgaaacacgcatcatgggttatgagttgtgctcc

SEQ ID NO: 28024 - DNA, 1420 bp, Zea mays
  Clone ID: LIB4744-001-H5_FLI
ctcgaggccggccgggaaaaaacattcttgtccgccccggctccaggctgcaagtctgcaaccccccatccagccgcgaagtctcccaccaccgcgccgttccggggggctggcggcgggggggcctcttgctctctactccacccactcgcggcctcacccgtggatctacgcggtggccggcgggcgcgatggcggaggcggagcgggagcagcgcccgctgccggaggtggagcaatctgtcacgtccataccggaagatcatgaagcaacatgttggggctgtgggcttcggcttgtctttgcgagctactcacctatctacaagtgtgggtggtgtggagccgtcacgcagagcaacaaccagactgcaaggaaacctgatagtatatggttttcccactggaggcgcctacgggacaggctcttcgtggctgtgctcgtcctcttcatgctcttcgttatatgtggtggggtctgggcggtatatcctgttgttttctcagtcagcaagttctgtggcgtatttcactgcacggtagcagctgtgttggctgtatgtaccgtcacaagctattgcttggcctctttgaaatgtgcaggcgcaccaacagacataaggtggggcagctatcccgtggttgggaaaggggatcttgagaactataccttttgtacatactgtagcaaaccaaagccccccagagcacatcactgccggtcgtgtaaaatgtgcgtggtggacatggatcatcattgcccatttattggcaactgcgtgggagcatcaaaccatcaagtgtttgtggtttttctcatttctgtggttatcagttgctcttatgtcgctgggatgaccatatacgcgagctaccagatatggccctccattgaattcccagacctagcatcatcatctcgtcactcgatgagttcttggaaaacggtgctggagatgatcactacggttgcaggctccgccttcttcttgtcagccaggggtctagtcctggtgtatctggcgtttgctagctcgtcagtgaatgctggtatagctgtgttgctgtgccagcagctgagctatatctacgaagggaacacgtacctcagccgtctgagctcaccaccgaatgccttgcagcatggagagaggggtttgcagaacatcgttcggtttttcgggtgcccgtatccagtctccagagctgtgttgcgactgcggtactccaacgctgccaagttgcaggatgattcagggtcgaaacttctttagagaggtatggatcaatagatcagtcaaaatcctctgttttttttatgttccttcttataaatcagtcatggtgtaacagacagtttcgtttacattacatgtcggtttcagtgctatactctcgattaagacgccgtttcgagtcg

SEQ ID NO: 28025 - DNA, 839 bp, Zea mays
  Clone ID: LIB4744-002-E12_FLI
ctcgaggccggccgggatctcgcacttgagttgagactactgttgtgactattgtgtgcgtgagagagaaacagaagaggaaaaggaatccatggcggcgacgctggcgaggagggcggggcgctccgcggcgacgacgctatggggcgcggcgaggggcttcgcatcggtggggtccgacatcgtctctgcggctcccggcgtgtcgctgcagaaggcgcggtcctgggacgagggcgtcgccaccaagttctctaccacgcctctcaaggacatcttctacgggaagaaggtggtcatcttcggcttgcccggtgcatatacaggggtttgttcacaagcgcacgttcctagttacaagaagaatattgacaagttgaaagcaaaaggaatcgactctgttatctgtgtagctgtgaatgatccgtatgtcctggatggatgggcaaaaaagctagacgctaaagatacaattgagttctatggtgactttgatgggagtttccacaaaagcttggatttggagatagacctttctgctgctttgcttggccgccgttctcacaggtggtccgcctttgttgacgacggtaagatcaagtctttcaatgttgaggaagcaccgtccgactttaaggtttctggtgcggaggtgatcttggaccagatctgagctcctcaatgaacttcggccatcctcagtttgtgcggcatacttcctctgcagcagccgaataaaattaaatctcttacgacccgtgtaagatgttaaagatacgatgcgccccagactgtatggcctcggcctcggtttttctggaatgaattgatcagtgttc

SEQ ID NO: 28026 - DNA, 589 bp, Zea mays
  Clone ID: LIB4744-005-F12_FLI
ctcgaggccggccgggagcagcctcccaaatccccaagcctccgacccccttcctctctccctccgccgccgctgcgcacgcagggaacaagcgacatgggcgtctacacctttgtgtgccgcaacaacggcggcgagtggaccgccaagcagcactccggcgagatcgaggcttccgccgctaccccatacgagctgcagcgccgcctcgtcgctgccgcctccgcggccgactctgcctacggcgtccagtcgtccttctccatggtcacccccagctccgccgtgttccaggtgatcgtcggtgctgtcggtggtggtgcaatgatggtgagcggaggtggcggcggcggtgctgctgcatctggtggtgctgctgccgaggctcccaaggaggagaagaaggaagaggagaaggaagagagcgacgacgacatgggattctccctgttcgactagagttgtgtgtgtcatctggatctcagaagtggtggtttggtcctgttgccgtagttaattttgctgtcctgtctgtgaacctgaagaactcttggtaattgttacaagcgacctgttccagtttaaaaag

SEQ ID NO: 28027 - DNA, 1801 bp, Zea mays
  Clone ID: LIB4744-005-H3_FLI
tctccctaggtccctacctctccaatcttctccttccttgaccccagcggaggaggagccagggcgtgcgagtgcgaactgcgaacgcagcagcagcagctcacgcgcgcacggcacaccagtgagtgacaccacctctcgcctcagcgccgcccccctataaataatggcgccactctcccctacccccgcctccgctcccgtgtcctcctcccctcgttcccttgtcccggacgcctccgccgagccgatgcgccgcgcctcgccgccgcaggagctccccgtcgccaggggcgagatccaggcggcgctggcccccgccaatgcctcctccgcgggcgcccacggaggcggaggctccttcacggcgctgctgggactccccacctcgcaggccatggagctgctcctcccccgcacgacgccccccgccctagccacagcgcccgcgccaaccttcccctccgacccgcacctcgtggaccgcgccgcgcgcttatccacgttcgcgcccccgtccccgtccccatcctccacgtccccggccccgcccctccccgccgccgctaacgccggcaagcgcaaggccgaccccgtcgaccgtgcccccaaggggaaggcggcgaagaaggggaagacggcggaggagaagctcgcgggcggcgacggcgacgacgagaagccggcgtacgtgcacgtgcgggccaggcggggccaggccacggacagccacagcctcgccgagcgggcgagacgcgagaagatcaatgcgaggatggagctgctcaaggagctggtccccggctgcagtaaggtatcaggaacagcattggtgctagatgagatcatcaatcatgttcagtctctccaaaggcaagttgagtacttgtcaatgaggctcgcagctgtaaacccaagggtcgattttggtgggctagacagctttctgaccacagagtgtggaaggatagcaggcttcaactgcaagaacggaatcgacttggagcaggtaacctggccagaaatgggtgttcatggagcaaggcagctgatgcaacttcaacagcagttctggcatggcgatttagcacatccacaccaagtggcttcacagtgggaaaagcgtggggatggccatcctcccgtgtttagcaactccagtccctctctcttcggctatgatctaacaagctctggagcccagcaaaccccggcgagcaagctaaagacggagctttgagcgacgatggatggtagatagcattgtcaggagagcaggctgaacatatgcggtgggggcgcagcagcgacatgatttcagcaagttgaccaggtcaggctacaaacgggctgggaatgttgatgtgaagcgcatggagaccaacattttcagagacagagaggatgtacatatagcgatagagaatactattggtgttgagctgaagacgggaataccatagttgtattgtagagatgggcacgccctgctgctatcgctgaagagatgggagggcgagcgatactccggtctagttgctggtattcttggtgtatttcttactataatggcccaatcttaaggttatatgagcagcaatttttatgaaccaaaacccaaaaaaaaccatcatgggtcatcatatacccttctcgaatgcatttcaacaaaacatgaatgtagcacagtataactacatgtaacacacgtgcttgttacaatcctactgttccaagccattctaggttttctttaaggcatacggattttgttacatatttatatatggcttttgttatg

SEQ ID NO: 28028 - DNA, 864 bp, Zea mays
  Clone ID: LIB4744-007-E1_FLI
ctcgaggccggccggggtggagttctggtaagccaaacaagtggcagttaatacttcggcccttgtggatacaggcgacagcaacagggaaactccccgctccccagccggcaaacgccagccccgcgacggcgccgcgccgtcctctcccgaccgacggcaacggaaaccccggtgacttctgatacaggaagattacttttatctatactccaccttctttcgtggctatggcactagcagctatctataaccttttcatcattaacaaatctggcggccttatatactacaaggactatggttcagcagggaggatggataccaatgacagtttaagattagcaagcctctggcattcgatgcatgctatctcgcagcaactgtcccctaccactggctgtactggcattgatctcttacaagctcataactttgatctccattgctttcaatccctcacagggacgaaatttttcgtcgtatgcgaaactggagctccaaatatggaaatgctgctgaaagcgatttacgagctgtacacagacttcgttctgaagaatccgttctatgagatggagatgccgattcggtgcgagctgtttgatcacaacctggctcaggtgatccagaaggaccgtgttgcgctcctgggtcggtgaaattggaaagcttttggtcctaaccataccatgtatcttgtacaccccccccccctttttctacattatgctcggacttcctgtgcaattgtctcggtcggcaattcggcataagacagctggtgaccaacaactgtttggtcctgactatcagcaccgtatttggaacagatctatggacgatccgccgtgtgttcttccc

SEQ ID NO: 28029 - DNA, 884 bp, Zea mays
  Clone ID: LIB4744-009-H5_FLI
ctcgaggccggccggggaaacccgtctcgcaccacaagcgagcgagggacccggggcggaagaagagagagaagacgtctctctcctctcggcgtccccgttccccaacctctcgtctgctgcctgcctgcctgcctgcctgcaaaaaggagtttgtcatggcgtctaagcgcatcctcaaggagctgaaggacctgcagaaggacccccccacatcatgcagtgcaggtcctgctggtgaggacatgtttcattggcaagcaacaattatgggaccacctgacagtccctatgctggtggtgtttttttagtgaacattcatttcccgccagattaccccttcaaacctccaaaggtttctttcaagacaaaggtcttccatcctaatatcaacagcaatggaagtatatgccttgacattctcaaagagcagtggagccctgctttgacaatttctaaggtcctgctctccatctgctccctgctgaccgaccccaacccggacgaccctcttgtcccggagattgcccacatgtacaagacggaccggccgaagtacgagtcgacggcccgcagctggacgcagaagtacgcgatgggctgacgaacgctttcctgctcgtccacccgactggcgtctcaagaaagtcgttcctgggcgccattgttcccttggatttgttgttggtcgtcgtgtgtatccctgatccatctaggatcatcgtattgtattgtagtgtatgtatatcgtcggcctaccatcgttgccattcaccatagtgaggtggttggacatgcttcgcctatatgcacctgtgcttgccgtccttcgggtcggtgctctttggttaatgttcatcgaagacgttgatttcgttgcccc

SEQ ID NO: 28030 - DNA, 1224 bp, Zea mays
  Clone ID: LIB4744-011-B2_FLI
ccgggattcttttggcaccaaaaccctatttcatgtgacgtgaacccctttcgctcgctgcgagtgcggagaaaggggagctcgacgcacccgcaagtcgcccgcccacggaacgcgccgccgccgccatcacatcacagaggcctcgccgtcgtctcggatattccccgccgtaggaccagtttccctccagctgccggagaccatgtcgggcggcctggacatgtccctggacgacctcatcaagcagtccaagtcccgacccaaggacaacccggcgtccttgtcggggcctgcccgccgcgcgccacaccccgcccgcgccgcgccctacccaccggccgctcccaaggcccgtgccgccgccgactcgccctacggggtctactccaagcacatcgccgcgatagcgccgcccccgctggccaaagcaaggtcgcttgagacgggaacgaagctgcacatctccaaccttgactccggcgtcaccatcgaggatgtccaggaactcttctcagaagttggggagctcaagcgttattctatgaattatgacaaggatgggagatctaaggggactgtggaagttgtctttgcaaggaaagtggatgctttggatgctatcaagagatacaatggtgttctacttgatgggaagccaatgaatctagagctcattggaaacaatgtcgaacctcctcccatgccaccagtaatacacagtcgtcctttgcagaactataatgatatccatagcagtatgcctcaatcccaaagaggtggtcagcgaagagcaccccaaggcaacggtcgcggtggacgcagtagtcaaagcagtggtggccggggacaggggaaaggccgaggccaggaccggaatcgcaccaccatttctgctgcagatcttgacgccgaacttgacaagtaccatgcagcggcagtgaaagaggaatgaggctctggcgttctgtttactacacagctggtaaggcgccgggacagtgtggccttttgctttggaagcatgaagtttgctatcttagtcctagtgttttatgctagaatttttttttggcccatgtacaaccgcgtctctgcgccaagattcctggtgttttatgtgtagcatgaagttgtggtcctactttacaggaactatcaatcatatctacagctctgtgggcacgattgagaacaattggaaactaaggagtgtttggtttt

SEQ ID NO: 28031 - DNA, 1121 bp, Zea mays
  Clone ID: LIB4744-011-F5_FLI
ctcgaggccggccgggataccatacgccgcgccgccgccacgaacagcgaccgccgcgagggcgacacgaccggcaaccggccgaggggagatacgataggcgagtgcggacggcctatcgccgtgcgacagcggcaccccggtgtggtcgcgtgcgccgccggcgccgggccaaggcgtcaagcgctgcccagtcccgattccgccctgcactgcctctcgccctgtcctgtctgactgtccgagactctgactccgccctggtgagcgttcttcactcctccgattcttcacctcgcactggtccgatggagtccgacgccgaggaggaagcggcggcgaccccagcagcggcggcgaccccaggcgctgggcgtctgaaggggaacccggaactgactgtggacgcggacatgcgagagatggcgaagacggccgcgtggagcgtcagttcctgcaaggccggcaacggcgtcgcggccctgcgcgacgacaacctcgacacctactggcagtctgatggggcgcagccgcacctggtgaacatccagttccagaagaaggtgcagctgcagctcgttgtgctctacgtggatttcaagctcgacgagagttacacgccgagcaagatctccatccgggccggggatggcttccacaacctaaaggagattagaacggtggagcttgcaaagccagttggatgggtccacatatcattatccgggattgatccacggaatcctgttccccaccagccgtttcattttacttccagggagttcatcacatactctactattagatgacagtggatgagcaatcaagataggatcggcagctcatggctctggatgatcgcgccatattagtatatttgcctgcttgtgtgctgtctatcgggtcttggacgtgtatgtgtaatgaagttgttaagttagctcagcagcatccacatctcatattttaaaccccactacataaagagtgcagtgcaaaatagtgatttgcagggcacatgtacctgctggccatagccttaggtagcaataacatacttttgaatttgtttcgcggcctctgttggcttgcagtgtttgcttggttcattggttggtccc

SEQ ID NO: 28032 - DNA, 1134 bp, Zea mays
  Clone ID: LIB4744-014-H5_FLI
ctcgaggccggccgggcattctatttcacaaaccaaacaaagtggcccattaatcaggcccttgaacggttaaaccctagacggcctagagagaaaggaaagaagtgctccggggaagcaccgtgacacccttgctcgcccgcatctctctaaccgccggcgccggcgccggcgccggccatcgttcacatggctgcgatgccaccggccttcacgggcaacctgaagaaagcacttgcaggtctgagaagaatcaatttagatgggcttcgatggcgcgtatttgatgctaagggtcaggtgctgggacgattggcttcccaaatagccgttgtgcttcaaggcaaggataaaccgacctatgcgccacatgtggaaaatggagacatgtgcattgtacttaatgcacaggatatcagtgttacaggaaggaaaatgacagataagatttactactggcatacagggtatgttggccatttgaaggaaaggaggctcaaggaccagatggagaaagacccaactgaagtgattcgcaaagctgtgctgcgcatgcttccccgcaacaaactgcgtgatgatagggatcgcaagctgcggatattttctggaattgagcatccattccatgaccgccctcttgaagcttttgtgatgccaccacggcaagtacgggagatgcgaccccgtgcaaggcgtgcaatgttaagggcccagaaaaaagagcattcaaacagggccaaggaggaagaagatgctaagaatgccacagctgaggtcactgcataggctcctcatgtgaatttgcatgatgcaaatttgctcgatgctgttttaggcctatcttttttgcttggtagccttttccagtggaataggcactagaggctcggaatgtgccaacctcgttctgaatcacctttttatttccattgcaatttgtaactggaaccctgcctgtcacagctgctttcttttgtaagcgaataagaccgtctgaattgttgaacttctgatctcatgagtgcacaagaatgtctccagggacatcttctatcctttctttacgtgtcactaggtgagtgtccgtacgttgcaacggaaacatatataatactaagataatttatgtgc

SEQ ID NO: 28033 - DNA, 1531 bp, Zea mays
  Clone ID: LIB4744-015-G5_FLI
ccgggatataacgaccacttcctcccaccgcttcttcccacgcctcccaacctcctctgcttccgagatctctccccacctcccggtccgctagcagatagcgggggccagagagatcgagatccggaggcgctagcgccacccatcagcgtctgcggcaatggcgggcacggtgacggtcccggggtcgtcgaaaccctccacgccgctgctcaaggacgagctcgacatcgtgatcccgacgatccgcaacctcgacttcctcgagatgtggaggcccttcttccagccctaccacctcatcatcgtgcaggacggcgacccgaccaagaccatcaaggtgcccgagggcttcgactacgagctctacaaccgcaacgacatcaaccgcatcctcgggcccaaggcctcctgcatatccttcaaggactccgcctgccgctgcttcggctacatggtctccaagaagaagtacatctacaccatcgacgacgactgcttcgttgccaaggacccatcaggcaaggatatcaatgctcttgagcagcacatcaagaacctcctcagcccgtccacaccgttcttcttcaacaccctgtacgacccctaccgtgagggtgctgactttgtgcgtggataccccttcagcctcagggagggtgcccacactgctgtctcccacggcctgtggctgaacatccctgactatgatgcacccacccagctggtcaagcctaaggagaggaacgaaaggtacgttgatgctgtcatgacaatccccaagggaaccttgttccccatgtgcggcatgaaccttgccttcgacagggatctcattggccctgccatgtacttcggtctcatgggtgatggccagcccattggtcgctacgacgacatgtgggccggatggtgtgtgaaggtcatctgcgaccacttgagcctgggagtcaagactggcttgccatacatctggcacagcaaggctagcaaccccttcgttaacttgaagaaggaatacaagggcatcttctggcaggaggacatcatccccttcttccagaacgtgaccattcccaaggattgcgacaccgtccagaagtgctacatctacctctctggacaggtgaaggagaagcttggcaagatcgacccctactttgccaagctcggtgacgccatggtcacctggatcgaggcctgggatgagctgaacccggctggccccgctgccgggaaagacaaggccaagtagatgggagtccctgggggtgcattcacttccctgctgaagtgaaaagaaagtatgattgggtccagcctaggctcccccatagatatagctccttttgagagggaagagggattaattcagcagcaggttctttttataaattctttgttgttatgaagcaggcggtacttttgtagttgatgaaggggatttgtcgccactgtcatttacataattcggacaataatttatattgtgtaatcttgagaatcaaagcgctgtttgtgttatagcatg

SEQ ID NO: 28034 - DNA, 813 bp, Zea mays
  Clone ID: LIB4744-016-C3_FLI
ctcagcgagctctcccgtacgtgcgcagttctcggcacgctaccccttatatacccccccggccgctctcgctctagatgcacaggcagtgacacgcgcgcataccgacggactaggtagctgctcatcagctatccagatcgttgctcctcccttccctcgccatcggccgcgcccgtgtcgggcggcgggaatgggacgccacgcggcctccggcggcggcgtgcagcagaagctgcgcaagggcctctggtcgcccgaggaagacgagaagctctacagccacatcatccactacggcgtcgggtgctggagctccgtgcccaagctctcagggctgcagaggtgcggcaagagctgccgccttcggtggatcaactacctgcgccccgacctgaagcggggcagcttctcgcagcaggaggaggacgccatcgtcggcctccatgagatcctgggcaacagatggtcgcagatcgcgtcgcacttgccgggccgaacggacaacgagatcaagaacttctggaacagctgcctcaagaagaagctgcgccagcgcggcatcgaccccagcacccacaagcccatctccgccgacgcggcggcattggagcagccggcgtcgcgagaccgcaagccgtcgttggccacagccgccgctggtggcggcttcgacgtgaagcagcagcagcagcagcagcaggtgttcgacccgttcccgctgaccgacagcttcggcggcggcttcgacgacgcggccggcgccgcaatgtacggccacatgggcggcggcggcggcaagcagcaggacgc

SEQ ID NO: 28035 - DNA, 780 bp, Zea mays
  Clone ID: LIB4744-018-C1_FLI
ctcgaggccggccgtgagatccagatccagatccagcaaccagcatgggccgtggcgtggcgtgcttgcagctgcagtcctgcacgtcttgccgctttgattgccttctccttcccgcaactactcatcctttccatcaaaactgagcaaacccctcatcctattctcgcgcccggcgtctcccttctccaacctccgtttctaatccgcgctgctaatcccactcccagtcccagctcgtccgctgagatggacagtagcagcctcaaatccgcgcagctcctggagctgatgcgccagcacctggccaccgatgccggcaaggaggtcaccaagaaggtcggcctcgtctaccagctcaacatcgcccccaagaagatcggcgttgatgaggagatcttcgtggtcgacctcaagaagggcgaggtcaccaaagggccgtaccagggaaagccggatgccactttctccttcacggacaacgatttccttggaatcgccaccggcaagacgaatccgcagattgcattcattcgaggggcgattaaaatcaaggggagcatcagtgcggcgcagaagttcacccctgacatcttccccaagcctgctaagctgtagaaggttagattgtgtattacttggtcgaggtgaataataatgtttgcaagcttcaattactatgtacgagatacaatgagtggaacatgaaaagcacgttctcggtgggaatttggatatggttgaacttccacttaaatcaagctcaatgttcgtttctct

SEQ ID NO: 28036 - DNA, 1055 bp, Zea mays
  Clone ID: LIB4744-019-A12_FLI
ctcgaggccggccgggtcgccatcgccgggcatcgcgggcatcgcacacaaacgcaacctgcagccatggcacagaagctcgcgccaccgacggcggcggtcgtcgtcgtcctgctggcgctcgccttgtcggccgccgcgcagaactgcgggtgcgcgtcgggcctgtgctgcagccggttcgggtactgcgggacgggcgaggactactgcggcgccgggtgccagtcgggcccctgcgacgtgccggagaccaacaacgcgtccgtggccagcatcgtgacgccggccttcttcgacgcgctcctcgcgcaggccgccgcctcgtgcgaggccaacggcttctacacccgcgacgccttcctcgccgccgccggctactacccggcgttcggccgcaccggcaccgtcgacgactccaagcgcgagatcgccgccttcttcggcaacgccaaccacgagaccataaagttctgctacatcaacgagatcgacgggccgagcaagaactactgcgaccggaacaacacgcagtggccgtgccaggcggggaaggggtactacggccgcggcccgctgcagatctcctggaacttcaactacgggcccgcggggcagagcatcggcttcgacgggctgggcgaccccgacgcggtggcgcgcagcgccgtgctcgcgttccgctccgcgctctggtactggatgaacaacgtgcacggggccatcgtctccggccagggcttcggcgccaccatccgggccatcaacggcgcgctcgagtgcgacggcaagaaccccaactccgtcaacaaccgcgtcgcctactacaagcagttctgccaggatttcggcgtcgacccgggcaacaacctcacctgctgaatgatctctctctcattgggttgttgtcctgtacttacacatgtgttggttgatggatagatggcgattgcgtggtgcggatgtttcggtttggcggtgtcaattctgatatgcgcgtcggtgctgttctgatactgactatatacggaaataaaaatctgatttgcattaac

SEQ ID NO: 28037 - DNA, 1355 bp, Zea mays
  Clone ID: LIB4744-020-B12_FLI
ctcgaggccggccgggaaccgaacgacatcttaatcttcccaacgcatttccgtcttctcctccgacgagttcccccaatccgcgctgcctgagcccaccctgcctgcctcgccgcgatccctccgcgctgctcgaggctcctgtcctgaaccaatcgagaacgccgacttccggggacgggatcatctaaagccgcctccttcccgttgaatccgccgagattcggcgtgaggcgaggttaccgacttcccttgcgcgtagggccggcaggagcgcccgctggccatggcgtgccggggcttctttgagtgcgtcctcaagctcctcaacctcgtcgtcatggcggttgggctggccatggtgggctacggcgccttcctgctcgtgacctggcttcaggtcgcgccactcccgccgccttcgtcgtcgccggacgccgtgccacccagcggggagctcgtgcagctcgggaggccgctgctgctttttgttgatgcatccctgtcggatgggaccgcggagaggctctccagtgcctggtttatttttgcgtttattggtgtcggtgctatactctttgtcacatcgatctttggttgtgctggagctagaaatggatgctgcttgtctatttactcattcctcattattttgttcatactggtcgagcttgctgcaggaggcttcattttcttcaaccatagctggaaagaggttattccagttgacaaaactggaaactttgacatgatgtacagctttttgaaagagaattggagaattgcaaagtgggttgcacttggagctgttgtatttgaggcattgttgttcactgtagctatcatagtacagtcaggcaaccaaaccgactatgacagcgacgatgagtacatcggcgcaaggtccggaatacagcagccattggtgaaccagcaagctgctgctgctgctgctgatcctagggtgcccaatctcgactaccgcccaatccggaacgacgcatggagccaacggatgagagagaagtacggggtggatagcttcgatccgaacaggtttcagccggccaccatatctcctggagaacaaagaaaccgatgcacgattctctgaggcaagttctacatatatccaaccgcgcaattaacaccgagttgcagagagtatgcgcctgggttattcggtgttgcctagctgtgtggcatccggagggcttcacattctcgtctgtatttttttttttttttttggtttacatagtccaaactcagcacaccagtgctgtttttgtaataagtattgaaccaagttcgtgttctagataacgttccaatgtgcataaaaactttccccg

SEQ ID NO: 28038 - DNA, 1013 bp, Zea mays
  Clone ID: LIB4744-022-A2_FLI
aacccctcacactcccatccagccgccaccaggtgcagagtctttcgtcatctcttctccggcgaagaacccccagtcgcccaccagatcacttgttaaactttgttgaggggtgatggcggtttctttcgcaaacctcaactccgaggcagggcttaaaaagcttgatgagtaccttctcactcgcagctacatcactggctaccaagcttccaaggatgacttggctgtctacacttcgttttcggctgctccctcgtccaagtatatcaacgtagcaaggtggtttaaccacattgatgcgctcgtgaggctgagcggaattactgcagagggccaaggtgtgaaggttgaatcctcagcagttccttcagccccaactccagatgttgctgaagcacaggccccagttgctgaggaggacgacgacgatgatgttgacctttttggtgaggagaccgaagatgagaagaaggctgctgaagagcgtgctgcagctgccaaggcttctggcaagaagaaagaatctgggaagtcatcagttttacttgatgtgaagccatgggacgatgagactgacatggccaagctcgaggaagctgttaggagtgtccagatggaagggctgctctggggcgcatccaagcttgtcccagttggatatggtatcaagaagctgcaaatcatgatgaccatcgtcgacgaccttgtctctgtcgacactctcattgaggactatctgtgcgctgagccagtgaacgagtacgtgcagagctgcgacatagttgccttcaacaagatctaggcgtgacttccgatcagtccttcccctggggtgctggcgatggtggtggctgggcaatgcaccagcctaatttatccatagctatatgtctgctttgtgtggccagtgatattgccgtgagtatttttggatcctattcgagtcgaatgtaccagtaccagagttaatttgctttaattcgaaacaccgttccagttggaattctgtc

SEQ ID NO: 28039 - DNA, 905 bp, Zea mays
  Clone ID: LIB4744-023-A6_FLI
ctcgaggccggccggggcgtcgagccccatcccgttcccgcgcctcgccgagagatctgcgccgtcgtcggcaccaatccgtacacccgtcagtccgtccgtcgtcggcgccggcgaacgagtagagatggaggagacggcggcagcggcaccggctgagaaggcgtcgtcgtacaggtactgggtgcgggaagccaccggcgacgccgcgccgctccccgtcccgcgcaagctcgaccccgccgccaatgggaacgggaacccgccgcccctcgggtccgtctggaatcaggctggaacttgggaggaaaagaacctcaactcatgggctaatagtaggataaaggatttgctgggctctctaggttcattgaagttccctacagggaatgcatccgttgatgaagtgtccaagtgctcaggcgatgcctttcaggtcactgtccgcaacaagaagagagtaggatataactacgaactaagcttgagatttaaaggtgaatggttagttaaagaagaaaacaagaagatcaaaggacacttagacattcccgagttctcgttcggtgagatcgatgacctggaggtgcaagtaaggttcagtgacgacaagggcctcgcatccgacgacaaggcacggatctgcaaggatctcaagtcctttatggccccgattcaggagaaaatgcgcgtgttcgaagaagagctcaagggtagatagcgagcattagcgagaatcggcagtgctaggtgggcgctgccgtgcccgtgctggaatgatgagtaaaacatgttgacgtcttgtggtgtctccacgttctaaagtcgtcttcggatgactgggactgtctgtgtactgatgctatgcacttccggagatgagtatgtacggttacgaactgccc

SEQ ID NO: 28040 - DNA, 807 bp, Zea mays
  Clone ID: LIB4744-024-C2_FLI
ctcgaggccggccgggatgcgtcttaagtccctgctctctctctctctctctctctctctctctctctctctctctctctctctcttgtctacaaatcagcgtcttcgacctcatgtgtacagcgatggacgacgccgtgcaggtcgcggagcactacgacagcgtggtggccacggacgtgtccgcggaacagctgcggcacgccacgccacaccccaaggtccggtacctgcacacccgcgacgccacgccgggggaggaggacctcgtcgccatgctgggctgcggcgaggccagcgtggacctcatcacggtggcacaggccgtgcactggttcgacctcccggcgttctacggcgccgcgcgccgcgtcctgcggaggcccggcggggtgatcgcggtctggggctacaactaccgcgtgagccccgtggaggacatgatggcgcgtttcttcagcaccacgctgccctactgggacccccgagctcggtattgcactgacggataccgggacctgccgttccccttcgaggacatcgggctcgggaaggaaggagagccggcgagcctcgacgtggagcacgagatgtcgttcgagggcctgattggcatgctgaggtcctggtcggcggtgacgacggcgaagcagcagggcgtggacctgctgggggcccgcgtcgtgaaagagctggaggaagggtggggtggggcggagctggtgcggaaggtcacatacaaggccttcctcctggcaggcaccccggggcccatggctgatgagtaatcaatgaggacctgtttgc

SEQ ID NO: 28041 - DNA, 1187 bp, Zea mays
  Clone ID: LIB4744-024-D1_FLI
ccgggaattctagacaccaaagaatctagtcatctatgcatgcatcctccgtcacccgcgcctgcgccttataaataggcacgcccgtgagcggagcggagagcatcaaagcaagccatgtggaggagggctttagcgatggtgctgttcatggctggcgccgcgctgctcgccggggccgccggcgccagcgcgcagcagggcgtgtggagcatcatcacccggcccatgttccagagcatgctgagccaccgcggcgacagcgggtgccagggcgccttctacacctacgacgccttcatcgaggccgccagcaagttccccggcttcggcaccaccggcgacgagcagacgcgcaggcgggagctcgccgccttcttcggccagacgtcccacgaaaccaccggtggatgggcgactgctccggatggaccgtttgcctggggatactgccgggtgaaggaacagaaacagacggacccaccctactatggacgaggacccatacagctaactcataagtacaactacaggctcgccgggcaagcgctgaacctgaacctggtgggcgacccggacctggtggcgagagaccccgtggtagccttcaagacggccatctggttctggatgacgccgcagtcgcccaagccctcgtgccacgccgtgatgaccggcgactggaggccctccgccaccgaccgcgccgcggggaggctccccggatacggcctgaccacgaacatcatcaacggtggcctagagtgcggcgaggaccgctccaccgacggcgccaaagccgccaaggaccgggtcggctactacaagaggtactgcggtatgctccgagtggggtacggggacaacatggcatgcaggaaccagaagccttacggaggatgatgacactagtggctgatctatggttgctgcaatgcaagccttcacgtgtgtttgcctctctacctaaagaataaatcaagctagcagaaaacctaccttcggcgtgtgtctacttgcttatcatagtgtgtgtctatgtatgagagatgatgtattgtcacgtgtgtatgagaggatgtatggtaagactatcattactggaatccggctctttgccgagtgacgaacaagaaacactcgataaaaaaaacactcggcaaaagtttattttttgtcaaaaaaag

SEQ ID NO: 28042 - DNA, 645 bp, Zea mays
  Clone ID: LIB4744-037-E9_FLI
accaaaggtaccttgcaatcacaacgaacagaagctctcgatctcaccgacaccgaggaagaagagatcaatggcgtccgagcagggagtcgtgatcgcgtgccacagcaaggctgagttcgacgcccacatgaccaaggcccaggaagccggcaagctggtggtcatcgacttcactgccgcctggtgcggtccatgccgcgccatcgccccgctgttcgtcgaacacgccaagaagttcactcaccgcggcctacgaggtcgaggcgatgccgaccttccacttcgtcaagaacggcaagacggtcgcgaccatcgtgggtgccaggaaggacgagctcctggcccagatcgagaagcatgccgcgcctgcgcctgcgtctgcgtctgcctaaaggagatcagtcgtcgccgtcaataagggccagcacgtatggctgtaaatgttgtcgttatcagttctggctttgtcgtttgtgggcgattgtgaactagtagtatgtttgtttctatccgagccggaggcgatacttaaccatggatacttgttgtgagttcgtttctgttcgcgtgtgactcttgaattgaatcaaccagctcaccactgcaccaggccgtggtgagtggtgacagtgatttcctgtt

SEQ ID NO: 28043 - DNA, 1018 bp, Zea mays
  Clone ID: LIB4744-042-H7_FLI
ccgggaacccctcacactcccatccagccgccaccaggtgcagagtctttcgtcatctcttctccggcgaagaacccccagtcgcccaccagatcacttgttaaactttgttgaggggtgatggcggtttctttcgcaaacctcaactccgaggcagggcttaaaaagcttgatgagtaccttctcactcgcagctacatcactggctaccaagcttccaaggatgacttggctgtctacacttcgttttcggctgctccctcgtccaagtatatcaacgtagcaaggtggtttaaccacattgatgcgctcgtgaggctgagcggaattactgcagagggccaaggtgtgaaggttgaatcctcagcagttccttcagccccaactccagatgttgctgaagcacaggccccagttgctgaggaggacgacgacgatgatgttgacctttttggtgaggagaccgaagatgagaagaaggctgctgaagagcgtgctgcagctgccaaggcttctggcaagaagaaagaatctgggaagtcatcagttttacttgatgtgaagccatgggacgatgagactgacatggccaagctcgaggaagctgttaggagtgtccagatggaagggctgctctggggcgcatccaagcttgtcccagttggatatggtatcaagaagctgcaaatcatgatgaccatcgtcgacgaccttgtctctgtcgacactctcattgaggactatctgtgcgctgagccagtgaacgagtacgtgcagagctgcgacatagttgccttcaacaagatctaggcgtgacttccgatcagtccttcccctggggtgctggcgatggtggtggctgggcaatgcaccagcctaatttatccatagctatatgtctgctttgtgtggccagtgatattgccgtgagtatttttggatcctattcgagtcgaatgtaccagtaccagagttaatttgctttaattcgaaacaccgttccagttggaattctgcg

SEQ ID NO: 28044 - DNA, 969 bp, Zea mays
  Clone ID: LIB4744-047-B7_FLI
ggctgcacgcactgttgtgtagttattaccagcatcggtggtgcgccatccaacaagcatcagagctcggtgtcacaaaacctgaccgatggcggcccggtgctccacagctgcctccgtggtcagaacaggatcgcgagacctctccccctccttttccttcacagccgcggcgctcccctcggcgcgtctgaggccggtaggagcgtgggtccgcggtggagggtacacctgcaggctccgcgccgtctgcgccatgggctccgcgccgtcgtcgtcccaatccccgtcgccgcacacgccttcaggacaaacccaagggaaagcagattataaatcactgagtgaagaggagtggaagaagcgcctgactgaagagcagtattatgttactcggcagaagggcactgaaagagcattcactggggaatactggaatactaaaaccccaggcatttatcagtgtgtctgctgcgacacccctctgtttcagtcatcaaccaaatttgatagtggtactgggtggccatcctattataaaccaattggtgaaaatgtcaagagcaagcttgatatgtcaatcatttttatgccccggaccgaggtgctctgtgcaacctgtgatgctcatctggggcatgtcttcgatgacgggccaccaccaacagggaagagatactgtatcaatagtgcatctctgaaattgaagccccaatagttgctggatactttagcaagaagtcaactataacgctggtccgccctatgtaaacttcggggttatgtatataaactactcgagttgtagcatatttattattctctttgttatgtaatatatgtgttcacaaaccgatgaaagtatgaaacaaacagccgctacttcactctggtattctggtctagaattaaggtgttgtttggttgacgaattgtaacgtaaatggcaacggtaatggtttgcactcc

SEQ ID NO: 28045 - DNA, 559 bp, Zea mays
  Clone ID: LIB4744-047-E12_FLI
tggctggcgtcggtccgccgcccgcactaccacgcccccgctcctctcgtctctatcttcgcctcttccatcgcaggattcagcggccatgggcggcggcaacgcccagaagtccaagatggcgcgcgagaggaacgccgagaagaacaagggcggcaaaggcagccagctggaggccaacaagaaggccatgaacatccagtgcaagatctgcatgcagaccttcatctgcaccacctccgaggccaagtgcaaagaacatgcggaggcgaggcatcccaagaacgacctctaccagtgcttcccccacctcaagaactagtaagcagcagaagcatatgctctgctcagctaaaagacaagtactacatatatatatatacgctgtgtgtcaattaatgggttctaggctgctgctgatgcggctgcttcgttcgtgttgccccgtctgattatgtactgtaacccttggctgtcagcctgctgtgctaaaaaccattggttctgtgtggattcatgctgcctgcctgtgctgtgcttgctcaatattttcttctct

SEQ ID NO: 28046 - DNA, 675 bp, Zea mays
  Clone ID: LIB4744-049-E9_FLI
ggccggccgggagcagcagcagcacagtcatccacactaacgaacgaactcttgctccgatcacgagctagctgaggtcgacgatggcggctgtgctgaacagcaggaagacgccgcaggtggtggccgtgctggtggtggtggcgctgctggcttcgtccgcgtcggcggcgatcacctgcgggcaggtggggtcgtcgctggcgccgtgcatcccttacgcgacggggagggccagcgcgctcccctcgtcgtgctgcagcggcgtcaagagcctcaacagcgcggcgcggaccagcgcggaccgccaggcggcgtgccgctgcctcaagagcctcgccaacagcgtcaagagcgtcaacatgggcaccgtcgccaccatccccggcaagtgcggcgtctccgtcggattccccatcagcatgtccaccgactgcaacaagatcagctaagttacgacgaccaagctaataagcctaccgaacgtacacgtacgtcccgcgcgctgcacgagtgatgaagccagggaagaaataaaataaagctagctgtattgccaggagcagcatgcagtatcgatctatatatatactgtactgtagtactctattatatatgtatgtgtggcctgcagtgcgagttgcttcgatccacctacttgttcagacaaaaaag

SEQ ID NO: 28047 - DNA, 800 bp, Zea mays
  Clone ID: LIB4744-054-F11_FLI
ccggggttcttctaatgggccgttccgtgggcttcattgtttaacctggggctagctatatagtaataccatcccaccccgctcctcaaaaccctagctagcgccgccgccgctgcagactcctccttttcgatcccttcacaaagcgccgccgtcgccccatcgaacatggctccgaagaaggataaggccccgcccccgtcgtcgaagcccgccaagtccggcggtggcaagcagaagaagaagaagtggagcaagggaaagctaaaggagaaggtgaacaacgcggtgctgttcgaccaggctacctacgacaagctgctctctgaggtgcccaagtacaagcagatcaccccctccatcctatccgagcgcctcaggatcaatggctccctggctcggagggctatcaaggacctgatggcgcgtggcctcatccggttggtctcggttcactcaagccagcagatctacaccagggcaacaaatacctaaggatgggattcccttgtttgccctctctgtaggagctcgtcttctttagaacagttgccatctctgtcaagagtttgctaatgctatgttagatgagtttctcacgtggctgaaacgtttcagagagtttgcgttagtttggcttgcctattataccttatctggccttagctttttctatggaaatctgccttgaaatgtctgatccgtgattatgcaactctatctaaactactgttatgctgcaattctgtcaacttgtctgaccagcaagtctgatgaatgaacttctgtatagatgtgag

SEQ ID NO: 28048 - DNA, 774 bp, Zea mays
  Clone ID: LIB4744-055-C4_FLI
ccgggacttttccggcctcccattcctcgcgcggcgaccacccgattcgaagcgtgcggagagaccgaagaagcgggagagatggctcgtaccaagcagactgctcgcaagtccacgggagggaaggctcccaggaagcagcttgccaccaaggctgcccgtaagtctgcccccaccactggtggagtgaagaagcctcaccgctaccgccctggaactgttgccctccgtgagatccgcaagtatcagaagagcactgagctgctgatcaggaagctgcccttccagaggctcgtcagggaaattgcacaggacttcaaaactgatttgcgtttccagagccatgcggtgcttgccctccaggaggctgctgaggcataccttgttggcctgtttgaggacaccaacctgtgcgccatccatgctaagcgtgtgaccatcatgccaaaggacattcagctggcaaggaggatccgcggcgagagggcctaatcgccacctcaaacatcgtgacaaaaacatgaagtcctggggttattgttaatctggtgccattgtaaggacatatgagtagggtttgttttgtggatcgcaagtttctcttctgctactgttgctgctacctttgctggtgttattgctagggtcgaatacttaagttaactatgcgctgacagtctggactagcagtgttatgtgcgctgctggaccttgcgcgcaatgctgtggccgatttgttcgttaatgtcaagaattgtgttacagtgcgtgtat

SEQ ID NO: 28049 - DNA, 1301 bp, Zea mays
  Clone ID: LIB4744-055-F10_FLI
ccgggattccccgtttgccttgtttaccattcctccccaaaacacatcctgcgatcctcgaagcctccgccgagcatcgatcatgtcggcctactgcggcaagtacgcggatgagctcatcaagaatgctgcctacatcggcacccctggcaagggtatccttgctgctgatgagtcaactggcaccattggcaagcgcctttccagcatcaatgtcgagaacgtggaggagaaccggcgggctctccgtgagctcctgttctgctgccctggtgccctccagtacatcagcggtgtgatcctcttcgaggagaccctctaccagaagaccaaggatggcaagccttttgtcgatgtcctcaaggagggaggcgtcctccctggcatcaaggtcgacaagggcaccattgaggttgttggcaccgacaaggagaccaccacccagggccacgatgacctcggcaagcgccgcgctaagtactacgaggccggtgcccgctttgccaagtggcgtgctgttctcaagattggccccaacgagccgtcacagcttgccattgacctgaatgctcagggtctggctcgctacgccatcatctgccaggagaacggtctggtgccaattgttgagcctgagatccttgttgatggccctcatgacattgatcgctgcgcttacgtcactgagacagtccttgctgcctgctacaaggctctcaacgagcaccatgtcctcctggagggtaccctcctgaagcccaacatggtgactcctggctccgactctaagaaggtgacacctgaggtgatcgcccagtacaccgtccgtaccctccagaggaccgtccctgctgctgtgcctgctgttgtcttcctctccggtggacagagcgaggaggaggccaccctgaatctcaatgccatgaacaagctcagcaccaagaagccatgggccctgtccttctccttcggccgtgccctccaggcgagcaccctcaaggcctgggctggcaaggtggagaacgtggagaaggctagagcggccttcctcgccaggtgcaaggccaactccgaggctaccctcggcacctacaagggtgatgctgccgccgacaccgagagccttcacgtcaaggactacaagtactgagttgcttctctttgcgatcccgttgttttggaactcctgcctgcgagtaggttgctgagtgttgtttgcttgttagagcttttatattcggacatgaaaaaaacatgcttcctatgtggatgatggttatctttatattcgtatattaacc

SEQ ID NO: 28050 - DNA, 595 bp, Zea mays
  Clone ID: LIB4744-058-D12_FLI
taccctcgaggccggccggggagctctacgcctctacctgtgtcttggcgacgactgggcgaccgacgacgcagccgtaggacaggcgcccaggtcttcctgttggctcttgctcttcgccggcgacgagcacccgccaggtcttgacacatctatcttgactggataacttaccttgttaatgaaggtttctctgatattccggcggcctagcagttactgtggaggatattcatttgtgtttatcatttatttggtcttgttcagggccacaacgacattgggaacaagtgtatgacatacaaacagtaaaatgggaaggaaagggtcagaagtatcaccaagcaaaaggtatcccttgaggtctgcacatagtagtggtagagttcttcgctctgccttagccaataataataaggacagtgagcctctgaatgcggctgctgctacccaagcagctgtgaaaaaaagaagtggcaaccagctagatagtcctaatagcactgtcaggctacttcgttctgcatcaaaaaataaggacgaggcacatagcgggcctctaaatgacaggatcattgataagccagctgcaaag

SEQ ID NO: 28051 - DNA, 1192 bp, Zea mays
  Clone ID: LIB4744-058-E10_FLI
actcatccattccatcatcccttgcaagtatagtctctctgctaagcgaagcgaagcgaagcttcaagctagtctcggcggctctagaagacgatgggcaaggacgacgtgatcgagagcggcgctggcggcggcgagttcgctgccaaggactacacggaccctcccccggcgccgctgatcgacgcggctgagctggggtcctggtcgctgtaccgcgccgtgatcgccgagttcatcgccacgctgctgttcctgtacatcacggtggccaccgtgatcgggtacaagcaccagacggacgcgtcggcgtcgggcgccgacgcggcgtgcggcggcgtgggggtgctgggcatcgcctgggccttcggcggcatgatcttcgtcctcgtctactgcaccgccggcatctcggggggccacatcaaccccgccgtcaccttcggcctcttcctggcgcgcaaggtctccctggtgcgcgcgctgctctacatcgtggcgcagtgcctcggcgccatctgcggcgtcggcctcgtcaaggcgttccagagcgcctacttcgacaggtacggcggcggcgccaactcgctcgcctccggctactcccgcggcaccggcctcggcgccgagatcatcggcaccttcgtgctcgtctacaccgtcttctccgccaccgaccccaagcgcaacgcccgcgactcccacgtcccggttctggctcccctccccatcggcttcgccgtgttcatggtgcacctggccaccatccccgtcaccggcaccggcatcaacccggccaggagcctgggcgccgccgtcatctacaacaaggacaagccctgggacgaccactggatcttctgggtgggccccctcgtgggcgctgccatcgcggccttctaccaccagtacatcctccgggctggcgccatcaaggccctcggctccttcaggagcaacgcgtgatgagcggggcttggctgtggagcaatggcgggcgacctacgggcggggggccgtgagcgaggagaatgccatcattcatcgatcgacttgggtgccggtggttggttcgggtcgccttattttgtttcagcagctgctgcgttgcgcgcgtgcgtgagatttggtttggtttcgttcccctgcaatgtaatcatgtcgtgactctctcaagggattattccgctcg

SEQ ID NO: 28052 - DNA, 693 bp, Zea mays
  Clone ID: LIB4744-064-A12_FLI
ccgggagcagcagcagcacagtcatccacactaacgaacgaactcttgctccgatcacgagctagctgaggtcgacgatggcggctgtgctgaacagcaggaagacgccgcaggtggtggccgtgctggtggtggtggcgctgctggcttcgtccgcgtcggcggcgatcacctgcgggcaggtggggtcgtcgctggcgccgtgcatcccttacgcgacggggagggccagcgcgctcccctcgtcgtgctgcagcggcgtcaagagcctcaacagcgcggcgcggaccagcgcggaccgccaggcggcgtgccgctgcctcaagagcctcgccaacagcgtcaagagcgtcaacatgggcaccgtcgccaccatccccggcaagtgcggcgtctccgtcggattccccatcagcatgtccaccgactgcaacaagatcagctaagttacgacgaccaagctaataagcctaccgaacgtacacgtacgtcccgcgcgctgcacgagtgatgaagccagggaagaaataaaataaagctagctgtattgccaggagcagcatgcagtatcgatctatatatatactgtactgtagtactctattatatatgtatgtgtggcctgcagtgcgagttgcttcgatccacctacttgttcagacagtttaatggttttggtgcctgttatgaatc

SEQ ID NO: 28053 - DNA, 1021 bp, Zea mays
  Clone ID: LIB4744-066-A12_FLI
ccatttcgaagcccaccgaattccctgcgattcctctcccctcgcctcctcgtctccccctaggggatcgtcggagaggaatcgcaaagagggccgtctcatccgagttaaggaagccatggagcacaaggaggctgggtgccaggcccccgagggacccatcctctgcatcaataactgtggcttcttcggcagcgcggcgaccatgaacatgtgctctaagtgccacaaggagatgataacgaagcaggatcaggccaagctggctgcctcctctatcgacagcatcgtgaacggcagcgacgccgtcatggagccggttgttgctggcagcaacacggtagtagctgttgcccaagtcgagttgcaaacaatgaacgtgcagcagcccgctgatgttgccggacccagcgagggggtggcggcgatctccaaaggggggaaggtagggccgaaccggtgcagcgcctgcaggaagagggttgggctcacgggattcaactgccggtgtgggaacttgtactgcgcgctccaccgctactccgacaagcacgactgcaagttcgactaccggactgctgccagggacgccattgccaaggctaatccggtggtgaaggcagacaagctcgacaagatctagggggggttccctacggttggtgtcaggaagattgtaaaccgcggtaactcgtcatgcggaactgctgccttgccccccgcgcctttctcttccatgtttgctgctacaatcttgttgttgggcattgcagtgcacggtgcacacttgtgtagcccgcctcgagaattcctgcctctgcatctggtcagttctaaaatgatttgcatgttggctatgttgtgtaagctctatttatggtggtctcgctgagacgggtatttggcttcgcagttatctagctatgtgatgtactgttgtcttgtccctgggtattatatggtacactgcagccagtaatagtaatctgcaactgtgcgttaaatggtccgtcgttttccg

SEQ ID NO: 28054 - DNA, 741 bp, Zea mays
  Clone ID: LIB4744-072-E3_FLI
ccgggaacgccgaggagacgagaggaggggaggcgcgccagcggaagcggaaacctcgggtgtcgtcgaccaacctcgtcgatccggttgcgacgcggtgtgctagaataactaccgaccatggtggaggaggagatcaccgagggcttgaagaacctcaccgtcaccggagacgcggcggcttcgggcggagaagggcagaggaggggcggcggcatcagcagcaaccgcatccaggtgtccaacaccaagaagcccctcttcttctacgtaaacctcgccaagaggtatatgcagcagcacggcgatgtggagttgtccgctcttggaatggccatagcgacagttgtgaccgtggcagaaattctgaagaataatggatttgctgttgaaaagaagatcaggacatctactgttgacataaacgacgaatcacgagggcgtccattccaaaaggccaagattgagataatcttgggaaagagtgacagattcaatgagttgatggctgctgctgccgaagagaggggagaagttgaagaaggcgaagagcaggcttgaaagaaaaaaaaaacagtaccgacgacaagcggctgttgttgtggtctgttagttttgcttaatttaatgccatgcgcatgagagctggcatgcgttctcgctcatctacattgccatggcaatgtctgcaaactcatggattgatggatggatgctggtttcttccaattttgacagctg

SEQ ID NO: 28055 - DNA, 978 bp, Zea mays
  Clone ID: LIB4744-074-A8_FLI
agcgcccgtcgcctccctttccccttccctccctccctctccccgcgggccgccagaggcaatttcgccctcgattcgaccccgattcgtccgcccgcgaccgggattccctccgccaagcgcggatctgaacgctgcgctccgtgtcgccgctcgaatccgccatgaagggggccaaatccaagggcgccgccaaggccgatgccaagctggcggtgaagagcaagggggcggagaagcccgccaagggcaggaaagggaaggccggcaaggaccccaacaagcctaagagggctcccagcgctttcttcgtgttcatggaggaatttcgcaaggagttcaaggagaagaaccctaagaacaagtctgtcgctgcggtggggaaagctgctggcgacaggtggaaatccctgagcgagtcggacaaggctccctatgtagccaaggctaacaagctcaagctcgagtacaacaaggccatcgctgcctacaacaagggcgagagcactgcagctaagaaggctcctgccaaggaggaagaggaggaagatgaagaggagtctgacaagtccaagtcggaggtcaatgacgaggatgatgaagagggtagtgaggaggatgaagatgatgacgagtgatggagctcctcgagacaatggaccgtgcttcatccaacaatggagcggctacacaaggccccgtggcgatcacaaaaaaggagcctatatccatgtactagaatatattcagtttcactccacatcgtgatgttttatttttacttttgtcgtgctataacggatagcgctcctcgttggcgccactggcgggtggttctgcctctggtctggtgtgtttgtgtgtggtcacacttgccagccagcagaggcgcctgcttgtacctagattactgtttccattgtcgtcatcatcggctaacattgtcataatgtcagtttgggtaatgttagattaagc

SEQ ID NO: 28056 - DNA, 803 bp, Zea mays
  Clone ID: LIB4744-074-F8_FLI
ggattttgtggacctatagcatattcccgtggtctccccccttttgctttgcttgccgagacggcgaccatggcgaagcagcagaatcctatccccatcccgatgccgctgtcgctgtcgctgcccctcgtcctcgtcgcgctgctcctgccggccgcccgcggcgccgcggagacgccgcagtacacgacggtgcacgcggagtcggacttcgaggtgcggctgtacggcgacaccgtctggatgtccgcccccaccccggacatcccttccttccacgtcgccaccaagctcggcttccacagattgttccagtacctgatgggcgcaaacctcaactcttcgaggatcaggatgaccacccctgtgctcacgagtgtggttccaggtgcagggcctctgcgctcctcggcctactccgtccggctgtacctgccggcgaagttccaggcttcccctccggttcctctcccagagctgaacctgcatccagatcggtggccaggccactgcgtcgcagcgaggagcttctcgggtcgtgcacgggacaagaacgtggtcgaggaagccgagaagctcgccatgagcctgagccggtcaccatgggctaactccacagactactccagcaagagcgcttactcggttgcacagtacagcagtccattccgcatcattggccgtgtcaatgaggtgtggttcgacgtcaactgcagatctacatctactgctgctggtgttgagtcctactgaaaaaaaaacctgccagatgtgatggataataataatttgcatgtaaaccc

SEQ ID NO: 28057 - DNA, 708 bp, Zea mays
  Clone ID: LIB4744-080-C4_FLI
ccgggcttcgctgcgccgccgcctccgacatcgtctcttcgtccccacgagcaaccgataatccgccggcgctgagatgttggtttatcaagacctcctatctggcgacgagctcctgtcggattcattcacctacaaggagctcgagaacggcgtcctgtgggaggtcgagggaaagtgggtcacccaaggtcctgttgatgtagacattggtgccaatccatccgccgagggtggtgaggatgaaagcgttgatgacacagccgtgaaggtggttgatattgttgacacattccgtctacaggagcaacctccttttgacaagaaatcatttgtctcttacataaaaaaatacatcaagaatctcactgctgtgttggagccagagaaagcggatgagttcaaaaagggtgtcgagggtgcaaccaagtttctccttagcaagctgaaggaccttcaattttttgttggtgagagcatgaaggacgaagcgtccgtggtattcgcctattacaaggatggtgccactaatccgacattcctctatttctctcatggtcttaaggagatcaagtgctagattagttacccatgttgggtactatatatgttctattgttatagccacaactatagctgccctgcctgaactgaactcaggttttttttaagaaaaaactgtccaagattggattgcttgttaaagcc

SEQ ID NO: 28058 - DNA, 1110 bp, Zea mays
  Clone ID: LIB4744-081-A2_FLI
acacccactgcgccccggcctgctgcccggctcccatatgtatgccctccgttgcacttgcactgcaccccctgtctgtccccacccttctgccctggcttatctctttccgcttccccctgttataatagcaaccaaaccaaaccaaaccagagctcaggaggagcttccacgcaaactcaggggaggcgcgcgcaagcaagcacacgagggagaaccaggcatggggaggtctccgtgctgcgagaaggcgcacacgaacaagggcgcctggaccaaggaggaggaccagcgcctgatcgcctacatcagggcgcacggcgaagggagctggcgctcgctgcccaaggccgcgggactcctccgctgcggcaagagctgcaggctccgctggatgaactacctccgcccggacctcaagcgcggcaacttcaccggcgacgacgacgagctcatcatcaagctccacgccctgctcggcaacaagtggtcgctcatcgcggggcagctgcccggccggacggacaacgagatcaagaactactggaacacgcacatcaagcgcaagctgctcagccgcggcatcgacccgcagacgcaccgcccgctcagcggcggcgcgggcagcgcgctcaccaccacgtccagcaccgccggcttcccgtcccccgcgccggcgtccaggtccaggcccacgcccacgcccccgcccaccgtcgtcgtcccgcccaatgcgatcttcgtgcgcccggcgccgtcggaggacggccacagcagcagcggcgcgagcacggacgcgccgcgctgccccgacctcaacctggacctggacctgtccgtgggcccgccgcccaagacgccggcggccacgcagcagcagcggcggcggacgaccatctgcctgtgctaccacctcggtgtccgcggcggcgaggcctgcagctgcgagaccgcgtcgtcgctggcgggcttccggtttctccagccgctggaggagggccagtacatataggtaaaggtaggcgtcgttaaatcactgtaggcaggcagaggcaaccctcgcaaacctgtaaagacagccaggggaaaaaaatggagagtttctaatgg

SEQ ID NO: 28059 - DNA, 950 bp, Zea mays
  Clone ID: LIB4744-081-D2_FLI
acaaaaaaaaaaaaaaaacttgtctagctcagtaaacttacgctgtgcttttgggagagttgagctcatggagcaggacaagagagccaaggtgctgtgcctgcacggcttccgcacaagcgggagttttttgaagaaacagatcagcaaatggcacccttccatatttcagcagtttgagatggtcttccctgatggcctcttcccagctggtggaaagtcagagatagagggcatatttccaccaccatacttcgagtggttccagttcaataaggaattcactgaatacacaaatctggacgagtgcatttcatatctatgtgattacatggtgaaaaatgggccttttgatggcctgctcggattctcccagggcgcaacactttcggcccttttgataggctaccaagcacagggcaagttgctgagcaatcatccaccaattaagttcatggtctcaatatctgggagcaagttcagagacccaatcatctgtgatgtcgcttacaaagacccgatcaaggtgaaatcagtgcacttcattggagaaaaggactggctcaaggtaccttccgaggagctggcttctgcctttgatgagcctctcatcataaggcatcctcagggtcacactgtccctaggcttgacgacgtgtctgtgaaacagctttctgaatggagctcacacgtcctggaagacctcaagagtgcagatgttcctgaggccttagattcaggcaaaccatctgataaggaggctgctggtgcggaattcacagaaaacctggtgaaagcttgaggcatgctcactagtcacttcagccttgttcgattatttctatctcacatggattgacatcgaaacgaacaatcccttccatggcatggctgcatctgggacttgtaccgtttttactatgatctgagtagtgcgtggaacttgtttg

SEQ ID NO: 28060 - DNA, 1249 bp, Zea mays
  Clone ID: LIB4744-084-F10_FLI
agtgtatgattttggtgtagtgggcaaagcccgcttctgctcttccagtggtcgccagccgccaggacaggactacaggaggacgccaggacgactcaccgtcacgccagccgccctaccgccaccgcccaccgcgcgcaccgcgcagtcgcccagccgcccactcccagccgccaccgcccagcgcgcagttgcccagccgccgcctcgccgcgcgcagcgcgctgcaggaaatacgaaataggccgacaggcgcccaggcgcccgcagtgcctgtccggctgtccattgaaaggtaattcttcttagaagtcaaagatgaggacatcattgctcaatttcaaagcatgaaggatcgaaaagttagattgtgatttttgagcagttcaagcagagctgatggctacatcagagccagtacaagagagtttggtggtgcactactcacaacctagtaggccccgggtcctccttgctgcttcaggaagtgtagccgctataaaatttgagagcctttgccgtagcttctctgagtgggcggatgtccgagctgtggccaccacgtcatccttgcacttcgttgatagatcatctctaccaagtggcatcgttctttacactgatgacgatgaatggtctacctggaagaagataggagatgaagtcttacacatcgagctgcggaaatgggcagacgttatggtgatcgctccattgtcagcaaataccctggctaagatcgccggtgggttatgcgacaacctcttgacctgcatcgtgagagcgtgggactacagcaaaccgctctttgttgccccagccatgaacacgttaatgtggaacaacccattcacggagcggcatcttcacacaatcaaccaactgggcatagccttgatccccccagttaccaaaaggctggcctgtggcgattacgggaacggcgcaatggccgaaacctcgcagatccatactgccgtgaggctcgcgtgcaagacgcaaccgcacgatgcgagcagttcactcgcgggtcctgtcagtaataaccggccatctagctgatgcagcggttggccacttgattgtcaagcttaggaatttgttttatctgcagtgtgcatgtggagtgttgtaccaaaatttttttccatctagtgtttgtgtgtattgaaattgggggggaaaggctgttgtcacaggataacaataacttcctccctgctcagtaattatgactctattcagtttg

SEQ ID NO: 28061 - DNA, 1240 bp, Zea mays
  Clone ID: LIB4744-132-G9_FLI
ggctccttgcctttgttctgttctccattcgcgaaaggctcgcagcaaaaccacgccatcgatcgccgccaccagtccagcatcctccgatcgactacgtactcccacccactccggcagcagcgaggcctctctgtctgtgcgcgcgcgtggctgtcgtcgatctctgcctggcgggcggccggcatggggaggtccccgtgctgcgagcaggcgcacaccaacaagggcgcgtggaccaaggaggaggaccagcgcctcgtcgcctacatcaaggcccacggcgagggctgctggagatcgctaccaaaagccgcaggtctgctgcgctgcgggaagagctgccggctgcggtggatcaactacctgcgcccggacctcaagcgcggcaacttcaccgaggaggaggatgacctcatcatcaagttccacgagctcttcggcaacaagtggtcgctcatcgccgggaggctgccgggcaggacggacaacgagatcaagaactactggaacacgcacatcaagcgcaagctcctcgcccgcggcatggacccgcagacgcaccgcccgctcgccagcgcgaccgcggggcagcagcattaccagctgcaggagccgcagaagcaagcggccggcggcggtccagcaggccatccgcaccaggaccacttggaggtcgtcgtcatctccaactcgccggacgaggcctacagccgtagcagcgacgacgagccgcggtccgccacgccgccgcggcgccacctcgacatcgacctcaacctgtccatcagcctagcggcctaccagccgccggaggaagccggcatcatgaagcagccgctggtgatgaagcaggagcaggaaacggcggcgggcggcacgggcaccaatgccgcggcggtgtgcctgtgcctcaacagcctcgggtaccggccgggcgtcgagtgcgtctgcggcgacggcagctcctcctcctcctcctcgcactcccactcccactcccaccaatgggctctgaattttttacaggcggcggcgccctgctacagaggccaatagtgtagtaagagcgatcagtgacatcattaaaatgggagcgttattacgatcgagactgagggtgagggaggggggcagagctgagcagggatagtagttaactacagctagtagtagtagtagtacgtaaaagacacacatgcttaggctttaacaagtctctgaaacacgcatcatggac

SEQ ID NO: 28062 - DNA, 943 bp, Zea mays
  Clone ID: LIB4745-005-D9_FLI
ggccggccgggtatggatgggtgtatttatttccatgcgcctgcgaatgaataatcatcagcaacaacttcaggcttggagaaagaagaaaggcatagcagcgggcagcggcatgggcaccagccccgtcatccctgcgacgatgctcttcgtcgctcttcttgtcgctgtctgcttcggcgccaccgccgccaggtccagccacgcccgccacaccgacgccgacgacgcgattcgtctccccagcagctttggcgctggtggtcgaccgtggaattgctgcgactccgctatcaaggacgcctccctgccggcgtggcgctgcaacgacgtggtggacaagtgctccgccgactgccaggactgcgaggcgtcgccggccggcgacggcttcgtctgcggtgactttatcttaagcctgaccgagcccccggtctgcacaccgaggccgtgggactgctgcgacagcgtggcctgcacaagggactacatccccaactgcatgtgcctggacaaggtggagtcgtgctcgagcaactgcgaacggtgcgagtttctgtatcattcggaccctcctcgcttccaatgccgagacatcttccacggctatcctggtcccaagtgcaggacatggatcagtacgagcaactagctcagctcagctacttgctaaaagtagcgtagcgcagcgcgcgcggctacttgctagtatacgtacgtccacaaataaaaataaaagtggctagcgtacaaagctaacatctggttgttcgtcccgacatggacgattagcctagctcgatcgctagctgctgccactctcgttcgatttaatttcatccccatgtgtggcggtgtagggagtgtggatatgatcatccaataaagtagtctactgaaaatgaatagtcgttgatcatattaatatacatccatctcattc

SEQ ID NO: 28063 - DNA, 1694 bp, Zea mays
  Clone ID: LIB4745-008-D10_FLI
gtgccacacatccatccccgttcgcctcttctcctccctcctgccgggtccttaataaagagcagcagcgcaaggtgagccgccagcttgccccaggttggtagagcgagcgagaagaaggcaatggcggcggagagcttcctgttcacctcggagtccgtgaacgaggggcacccagacaagctgtgcgaccaggtgtcggacgcggtgctggacgcctgcctggcgcaggaccccgacagcaaggtggcctgcgagacctgcaccaagacgaacatggtgatggtgttcggcgagatcaccaccaaggcgagcgtggactacgagaagatcgtgcgcgacacctgccgcgagatcgggttcacctccgacgacgtggggctcgacgccgaccgctgcaaggtgctggtgaacatcgagcagcagtcccccgacatcgcgcagggcgtgcacgggcacttcacgaagcggcccgaggagatcggcgccggcgaccagggccacatgttcgggtacgccaccgacgagacccccgagctgatgccgctgagccacgtgctggccaccaagctcggcgcgcgcctgacggaggtccgcaaggacggcacctgcgcctggctcaggcccgacggcaagacccaggtgacggtggagtacgtgaacgagggcggcgccatggtgcccgtccgcgtgcacaccgtgctcatctccacccagcacgacgagaccgtcaccaacgacgagatcgccgccgacctcaaggagcacgtcatcaagcccgtcatcccggagaggtacctggacgagaagaccatcttccacctcaacccgtcggggcgcttcgtcatcggcgggccccacggggacgccggcctcaccggccgcaagatcatcatcgacacctacggcggctggggagcccacggcgggggcgccttctccggcaaggaccccaccaaggtggaccgcagcggggcctacgtcgccaggcaggccgccaagagcatcgtggccagcggcctcgcccgccgctgcctcgtgcaggtgtcctacgccatcggcgtgccggagcccctgtccgtgttcgtcgactcctacggcaccgggaccatccccgacaaggagatcctaaagatcgtcaaggagaacttcgacttcaggccagggatgatcaccatcaacctcgacctcaagaagggcggcaacaggttcatcaagaccgccgcatacggccactttggccgtgacgacgccgacttcacctgggaggtggtcaagcccctaaagaaggcatccgcttaagaatgtattgggaagttcactggacatgaggttcatcttcgtctggctctgctgatacctgcaaggattgctgctgctgctgccgcccctggatgtgtgtttgatcagtgactggctgctctgctccatagaagatgaatgaagagagagatggtgaagaaggctttggcaaatggcaattgccgcagcaagccatgtcggcgccactgaccggcttagtgattggtataatttggtgtggcagcagccaggattaatgcgctggtcttttatctttactactagtttggtctcgtccggtatcttatttttctttccccttttcgagtctgtactgaaactgctgagagatttgcagttttgatctatcatatcctttggtaatactgttc

SEQ ID NO: 28064 - DNA, 2223 bp, Zea mays
  Clone ID: LIB4745-008-H7_FLI
attaaacaaaaggtcaaacggctaatctgccgaaggaatctcccaatttcttaggacttcgatctcgtgcaactttttttacttcacgctgttcttgtttatagtccacttgtacctgatgtctgcagctaaccccattcatgtctcgatgcccagtgtttatcccaagttcagattgtaacaaaaggttcgagcaaacttttgatctgattgataccttcaggagcgtgcgtagaatccaagaaaccccaaatctgtgcctggagcatcgagcatccattatccggatcatggagaggttcggtaaagcccagtgaagaaatccgagctctgtcgcagtctcctagcgggctgcgggccataggagatctcgcgcgcgacagcacaagcgaccacggaaatgtcgccgcagccggcccccgacctcgccgaggacaaggagagggacaccaatgtcttcatcgaggcggccccggggtcgccagctaaggtggccgagggcgacggccatggccacggcagccccccaacgtcgccggtggcgtggttccggatgctggccagggagctgcactggagcttcgtcttcggcgtggtggccacgtacggcatcagtcagggcctcggtggcggcatctcgcgcgtcgcgtccgactactactggaaggacgtgcagcgggtgcagccgtcggtggcgcaggtgtaccagggcgtcacgtccatcccctggatggtcaagccgctctggggcctgctcaccgacgtgctccccgttgccggataccgccgccggccctactttattcttgcaggcttcatcggagtgattgcaatgcttatactcgctctctacagcaagcttcatgcattgttcgctttgttggcattgatgaccggaagcgctagcgtggcgatagctgatgttactatagatgcttgcgtggcagaaaacagtatagtgtaccctcatcttgctgctgatatgataagcttaaatggattctgttcatctgttggaggtcttatcggattctcaataagtggttttcttgttcatgcaataggggctcaaggtgcccttggcctgttaaccataccctctgccttggtaattttatccggaactctgctaaaggaggttcatatccccaactttccatacgagcaggcccataagaagttcgtagaagcaagtgggaaaatgttaacagctttgaaatgtcctgaagtatggcgaccatgtgtttacatgtacatatcacttgcgttgagtgtcgacatccaagaaggaatgttcttctggtacacggaccaaagcgcagggttatcttttcatgagggatttattggcttcatgttcgctattggatcagttggttctcttgtgggtgttatactttatcagaatattcttaaggaccattcctttcgaagccttcttttttcaagccagctgttgctaagcttggcaggaatgcttgatctgatcttggtgcttcgactaaatcttaagatggggataccagattactactttgcggtgatcgatgagggggtctccaaaatgatcaaccgtatcaaatggatgcctcttctggtgcttagctcaaagctttgccccactggcattgaaggcacattctacgcattgctcatgtccatcgacaacattggctcgttaactggatcatgggttggtggattgctccttcatttgttgagaatcacaagaacagaattcaagaacctctgggccgcaatcttgattcggaatatgatgaggctgctaccactggcgctgctgttcttggtgccaagaagtgatccgaattccactcttcttccatccgatttgctgaatgagggagatgatgatgaagctcagcgagtagagaatgtcgagttaactcctctccctgcaaacagaaattcttgcgatggtaaatctctccatgacggagaacgggatgacgatgaagcttcacttcttgccaacaggagttgatactggattgaatatggagatttttcttttgtacacgagcaaatagataaaatttagaaaaatctttgacatttgtttactatagatactcatttagatgttcacgttgttaaattcattgaatttgcagcagggtagcgaaggcttgagagaagatactggggatgctttgagctggatttcccatataccaaaactataatggatcaaactttacc

SEQ ID NO: 28065 - DNA, 2326 bp, Zea mays
  Clone ID: LIB4745-009-A8_FLI
ctcgaggccggccgggagcctccgttttcgacgccatcagagcaggctccacagatgaagatgctgcggcggctcatgctgagcctgagcttcatcctcctcctcccttcctatctcgcctacccactatgcaccgatgcaagggcgccggtgctgctcaacaccacgctcaagttttgcgcctcccccagcaggaacagcagaggctgctgcgacgccaccgctgatgccgcgctcagcaagcagttcgacgccatggccatctccgacgctgcctgcgctgccgtcgtcaagtcaatcctctgcgctaaatgcagtccatattccgcggacctgttcggcgcggggccaaagatccggacggttccttccctctgcaactccacgtcgtcggcaaactctgctgagtccaaggaaaccaccaccaccaccactcaggactactgcaaactcgtctgggatacttgcaaggacgtgagcatcgccagctctcccttccaacccccgctgcaaggcaccgcgccgcctcctacttcaccgtcgaagctcaccgacgcgtggcagtcccagagcgacttctgcggctccttcggcggccggtcgtctgtatgcctcagcggcgacacggtctcgttcaacgccgccggaccttcaccctccccaagaccagaaccaagaggggtatgcctggagaggatcgacaacgggtcctaccttagcctggctcctcaccccgacggctccagcaggatcttcctcggcagccaagccgggaagatatggctggccaccgtccccgagcaagggtccgggggcgcgctgcagttcgagggcgcaggcccatttgtcgacctgaccgaccaggtgcacttcgactcggcgttggggctcatgggcatggcgttccacccgggtttcgcgaccaacggccgcttcttcgcctcgtacaactgtgaccggaccaagtcgcccagctgcaccgggaggtgctcctgcaactccgacgtgggctgcgacccttccaagcttggcaccgacagcggcgcccagccgtgccagtaccaggtcgtggtgtcagagtactcagccagaggctccgccgcggcgaatgtttctcaggcaacttctgccgccgatccatctgaggtgaggagaatcttcgcgatggggctgccttacacgtccgggcatggaggccaggtactgttcggccctgccgatgggtacctctacctcatgctgggcgacggagggaagggggaccctttcaacttcgcccagaacaagaagtcgctcctgggcaagatcgtgaggcttgatgtcgacagcacgccttcttcatcaggaggagatctcggcaacacgagtctgtggggcaattactccatcccgaaggacaacccttacgccgatgacagcgagctagagccagagatctgggcgctgggccttagaaacccgtggaggtgcagctttgactccgagaggccctcctacttctactgtggagatgttgggcaggacgcgtacgaggaggtggatctcatctccaaaggcgggaactatggatggcgtgcgctggagggtccgctcgtctatcacccgcagtgggcgcctggaggaaacacctcgctcagctccattgacgccattcctcccatcatgggatacagccattcagatgtcaacaagaatatcgggtcggcgtcgatcatgggaggttacgtgtacagagggtccgctgatccctgcctgtatggaaggtatttgtatgctgacctgtacgcctcggccatgtggaccggcgcggaggctccagagagcggtggcaactacacctccgctctgatccccttcagctgctccaaggagtctccgataccatgcgacgccgctgctgggagccctctcccgtcgcttggctacgtatactcgttcggcgaggacaacagcaaggacatgtatgtgttggccagcaaaggcgtctaccgagttgtgaggcccagcctctgcagctatacttgcccggcagagagacaggagacatcgccgcctgctgctccttcatccaacaaggcgtccatggcggagatgggaatgggaatgcttttggtgtctgtcattgtggtttgggttttggtaacataggatcatgctgtgatgagacatgtcatatgcaacgaccagtcctgaggaagaataagagtgccagtcagtcagtgagattagaatagaagtgataggcagtcagttaggctgtctccaataaattgtgtatatgatcatgtaaaatattattttatattatagactgtattgttcacgg

SEQ ID NO: 28066 - DNA, 1135 bp, Zea mays
  Clone ID: LIB4745-009-F3_FLI
ctcgaggccggccgggctactgagcaatgatgcatgccgtgccgcgcgacttcttggcttcctctccgtttcttcttccttgtccgaggccgacacagcagccgtcgtcctgctagctaatcaatctagcgactgttttgccccccttttttttcttctcagttccacttgcttgccactgtgctcggttgcttagacagccagcattgccgggaaagcaacggaggccacggcgacctgcatcagccaggcagcttgtgcgtgctataaatggcgtgaggcgaggaagagaaggaagagagaatagctaggccgcgccgacgccgaaccgcagcagacacgcgcgcggacagcgtacgagggagcgaagctgcctgaggtagaggaggaggagaacatgcagggcggcggcggcgtggaccagccgccgatgcagatggtgctgcgggtgaggcacccgtcgtcgctgggcggcagcggggcggacgaggacgacggcgaggggtcctctaggtcggcgctctcggtgttcaaggccaaggaggagcagatcgagcggcgcaagatggaggtccgggagaaggtgttcgcccacctcggacgcgtcgaggaggagtccaagcgactcgccttcatcaggcaggagcttgaagggatggccgaccctacaaggaaggaggtggagtcgataaggaagcggatcgacacggtgaaccgtcagctcaagcctctcagcaagagctgcgtcaagaaggagaaggagtacaaggaggtcctggaggcgtacaacgagaagagcaaagagaaggctctgctagtgaacaggctaatcgagcttgtgagcgaaagcgagaggatgcggatgaagaagctcgaggagctcaacaagacggtcgactcgctctactagacgccagtcggtgctccgtgctctgctcacccacctctccatccactcatccatccagagcttgcacgctcgccctctgtaatctgatccccgtgtgccgtggattcgtgacctgttcaaggtggtgcttgtagtaactgatgtttttcgttgggtgatccttttctcttctttttttcttcttctctctttggtctcttttatttcaccagttcgtacgagtat

SEQ ID NO: 28067 - DNA, 1986 bp, Zea mays
  Clone ID: LIB4745-012-A12_FLI
ccgggatcgccgccctcctcctgaggagcatccgaaacaagagcagcggcagccgccaacgcccgcgcccgccatcccgacgatgcgccgacccacactctcgctcgcgctcgggctcgggctcgggctctccctcgtcgccctcttcgcggcccggggcgcccacgcctcaatccacgagtacggcggcggcgacttcgcgccgcgggccaactccttcttcttccacggtgggagcgaggggctctacgcgtctgaccactcgtccaactcctccgcatccttcatcagatttgacaccgttgtatttcgtcgcaccctggagtcagcatctaggcatgaggagatgcaacaaaagacaggattggtggaggctataattgttgagatacaggatagaggcaaaattggaggttcatatctgcactctgatgcaatatgttgcacacctgagcttgataaggagaaatcttgtagagtaggtgaggtgatcatacgtccaaatcctgagaaccccgactggcctaagaggatccagacattctttgatggtaaaaatgaagaaaccactatggtaactcaaattgtgtcgataaacaaaactgggatgtattacctctattttatgttctgtgatcctcaacttaagggattgaagattacaggaagaactgtttggagaaatccacagggttaccttcctggtaaaatggctccaatgatgacattttatggtttcatgtcacttgcatatcttgtacttggacttctatggttcattcagtttgtgcgatgctggaaggacattttgcagctgcattaccatataacagctgttattgctcttggcatgtgtgaaatggctttttggtattttgagtatgctaactttaattcaactggaacaagacctatgggcattaccttgtgggcagttacatttacagctgtgaagaagactgtttctcggcttcttctattagtagtttcaatgggctatggtgttgttctacccacattgggtggcataacatcaagagttgctgctcttggtttcatctattttgttgcttcagaagctcttgaacttgttgaaaatctgggaaatatcaatgacttctctggaaagacaaggctattcctagtgttgcctgtcgctgtacttgatgctacctttatcatctggatattttcatccctctctagaactttggagaagctgcagctgcggagaagcatggcaaaacttgaattatatagaaagtttacaaattctctggctgtgtcagtgcttatctcaatcgcttggattggctacgagctatatttcaatgcaactgacccgttgagtgaactttggcaacgggcttggatcatcccctccttttggaatgtcctttcctatgccctcctcggcatcatatgcatcctttggtctccatctcgcaatccaacagggtttgcatattcagaggatgcaggtgagggagctgatgaggaagggctctctctagtaggcagtgcggtgaaaggaaccggagatatggtaaacatgcatatctttccggaggataagcgtgcatgataagttttggcctgaatgcagttgtactcctggcagaatgctatgtgaagtacctttttcctctggattcacgacttagctgacatcttctaaagattgcgtaagattccagatgtacaggtggtgacttgtgttgaacgatttgaccaagagatgtttacttcagttgtggctacccaatacaaaaaggtcggcaaaataaactatcactgagagcataagagggtttgtctttgtaatccttgtgatggtgacgtagctcgtaggtgattgaaatgtatcattcccagagctgagatgtactcactccgttccaaattaaaattcgtttttctttttattagatttatacaataatgtatgtgttatatatatatatattcataattatctatacgtat

SEQ ID NO: 28068 - DNA, 2158 bp, Zea mays
  Clone ID: LIB4745-012-C8_FLI
ccgggaacttggctcgtgtcgtgtctcagtgtctgccaccgagacaaaaatcgtcgtcagaaatttaacgacgcatattcgtctgactgacccgcccgtgcgccttcctcccgcctccccttccaccaccaagagtgacgacagagagacagacagagagaatggcggcgccagatgcccggccctcgtcagccggtccaccgccggcccgctccctcctcctgcctctcctgctcgtgctcctcctcgcggcctactcgctcccagccgactcagcagcgcgcccgtcctccaactccaacccacggcctgccttcacgccgccgctgctgaagcgccaccagctgcggcgcccgagcagcagcagcgccgagctcgtcgccgggcccgccaacgcgtcgaccaagcccttcacggcgcactacttcccgcagctgctcgaccacttcgccttcacgcccaacgcgtccacggtcttccgccacaagtacctcctcaacgacaccttctggcgccggcccggcgccggcgccggcgacgacggccccggcccgctgttcgtgtacacgggcaacgagggcgacatcgagtggttcgccaccaacaccgggttcatgttcgacatcgcgcccacgttcggcgccctcctcgtcttcatcgagcaccggttctacggggagtcgaagccgttcgggaacgactcgtacaggtcggccgagacgctgggctacctcacgtccacgcaggcgctggccgacttcgccgtcgtcatcaggggcctgaagcgggacctcggcgccgaggccgctcccgtcgtcgtcttcggcggctcctacggcggaatgctggcttcctggttcaggctcaagtacccccacgtcgccattggtgccctagcttcctccgcgccgatcctgcagttcgaccacataacgccgtggagcagcttctacgacgccgtctcgcaggacttcaagtccgagagctccaactgcttcggtgtcatcagggcagcctgggacgtcctggatgagaggggggccacagacaaagggctcctggacctcagcaaactcttcagagcctgcaagactgtgaagtacgcttattcaatccggaactggctgtggacagcattcacctacactgccatggtggactacccgaccccagccaacttcctggagaacctgcctgcctacccagtcaaggagatgtgcaagaccatcgacgcgttccccgcgggcgcagacgtcctggagaaggcgttcgcggcggcgagcctgtactacaactacacgggagaccaggcctgcaacaagatagaggacggagacgacccgcacggcctcgatggctggcaatggcaggcctgcacagagatgatcatgcccatgacgatctccaacgagagcatgttcccgccgtccgccttcagctacgacgacaggtccgacgagtgtttccagagctggggggttcggccgaggccgcactggatcaccactgagtacggtggatataaaatcgataaggtgctcaagaggttcggcagcaacatcatcttctccaacggaatgcgagacccatggagccgtggcggggtgctcaagaacatctcgtccagcatcatcgcccttgttacagagaaaggtgcccatcatttagacttgaggtcttcaacgaagggtgatccagactggctcatagaacagaggaggcaagaggttgagatcattcagggatggattgatcagtatcatcaggacatggcggaaacatcttcctgaagacagggcaagtcagtattcttcttcttacacatggtggaaacagggcgtgtatcatcaggacatggcggaaacatcttcatgaaaacaggacaccttcctgttacggtcatgtttggatccatggaaaaaaataaaggacaaaaaatcaataatttacacactaaacatcagaaattgctgaatcttacacaaagcaggcccctttgtgaattagtaaggggtggtgcaggtgctgggacttcaatccgcgccagagcagtgatcgactgatctcgcaggcctctggccagcggaccaaggcagtcttgagtcttgactcagtttctgttttttttaactgtattgtttcttcttttgttctcggc

SEQ ID NO: 28069 - DNA, 1277 bp, Zea mays
  Clone ID: LIB4745-013-A5_FLI
ctcgaggccggccggggtagcaatctcgctctcgctcgacgtatcaccccttctgattctcgcgctctgctcttctcgatttttgtcatcgattcagagctcacgagtcacgagtcacgacccaaatcccttttccactccgccggacgtcgagagaggcggtgggtgcgggacgcgaaggcgaagccctagccccctccctgccgcggacgccgatggacccacctcgcgccgtcgccgttcttctcatactcctgcccgtgctcgccccggtggcctccggtgtacctttcgtcgtcctacacgggattggcgacgagtgcgggaacgatgggctgtcatccttcaccaagatgcttggggagtggtcaggctccaagggttactgcattgaaattggaagaggagcatgggactcttggttaatgccacttcaagagcaggcaaatacggtttgtaagaaggtcaagaaaatgaaagagctcagtgaaggttacaatatagttggcctgtctcaggggaacttaattggcagggctgtaatcgagtactgtgattgtggacctccggtcaagaatttcatatcaattgggggtcctcatgctggtacagcttcagtgccactttgtggttctgggtttctttgtattcttattgatgatctgattaaatcagagatatattcagattatgtgcaggcgcatcttgcccctagtggttacctaaagatacccactgatatggaagattatttgaagggttgcaaatttcttccaaagcttaacaatgagatcccaagtgcaagaaatactacctataaagaaagattcagcagcttggaaaacttggtactgatcatgtttgaggacgatgcagtattaatacctcgggaaacagcgtggtttggttattaccctgatggagcctttagcccagtgctgccccctcaagagacgaagctgtatacagaagattggattggcttgaagaccctggacgaggctgggcgtgttaaattcgtgtctgtgccaggaggtcacctgcgtatcaccagaagcgacatgaagaagtacatcgtgccttacttgacgccggaggcgtcatccaagaagagcatacacatacaccggatgctgtcgctttgagcgagtatctaacaaggtttgtatcggtggccactgtgccctgacacgtgggccatgtgttgacgccttgtaaatacgctgaacatgaagggaggaaatgatagcgccgtggaagcgtggatccggacttgt

SEQ ID NO: 28070 - DNA, 2354 bp, Zea mays
  Clone ID: LIB4745-013-E1_FLI
ccgggcaagaagagcagcaccatccagtgcatcacgagctcttctgcaccagattagcaggccatcgcctacttttggcttccaaatcatttatttacggcgtacgtgccttctgttcaaaccccagccccgctgcaatggagtgcgacaacggccgcgtcgctgctaccaacggcgactccctgtgcatggcgctgccccgcgccgccgacccgcttaactgggggaaggcggcggaggagatgatgggcagccacctcgacgaggtgaagcggatggtggccgagtaccgccagcccctggtgaagatcgagggcgccagcctccgcatcgcgcaggtggccgcagtcgccgccggcgcgggcgaggcccgggtcgagctcgacgagtccgcccgcggccgggtcaaggcgagcagcgactgggtcagggacagcatgatgaacggcaccgacagctacggcgtcaccacaggtttcggcgccacctcccaccgccgcaccaaggagggcggcgctctccagagggagctcatcaggttcctcaacgccggcgcctttggcatcggcaccgacgccggccacgtcctgccggccgaggccacgcgcgcggccatgctcgtccgcatcaacaccctcctccagggctactccggcatccgcttcgagatcctcgaggccatcgtcaagctgctcaacgccaacgtcacgccgtgcctgccgctgcgcggcacggtcaccgcgtccggcgacctcgtgccgctctcctacattgcgggcctcgtcaccgggcgcgagaacgccgtggcggtggctcccgatggcacgaaggtgaacgccgcggaggcgttcaggatcgccggcatccaaagcggcttcttcgagctgcagcccaaggaaggtctcgccatggtgaacggcactgccgtgggctccggccttgcctccacggtgctctttgaggcaaacgtacttgccgtccttgccgaggtcctgtccgccgtgttctgcgaggtcatgaacggtaagccggagtacaccgaccacctgacccacaagctgaagcaccacccaggacagatcgaggcggctgccatcatggagcacatcttggaaggcagttcctacatgaagcttgctaagaagctcggtgagctcgacccgttgatgaagcccaagcaggacaggtacgcgctccgtacgtcgccgcagtggctcggcccgcagattgaggttatccgtgcctccaccaagtccattgagcgcgagatcaactccgtcaatgacaacccgctcatcgacgtcgcccgaagcaaggcccttcacggtggcaacttccagggcacgcccatcggggtgtccatggacaacacccgcctcgccgtcgcagccatcggcaagctcatgtttgcgcagttctctgagctcgtcaacgactactacaacaacggcttgccctccaacctgtccggcgggcgcaaccccagcttggactacggcttcaagggcgccgagatcgccatggcgtcctactgctctgagctgcagttcctggggaatccggtcaccaaccacgtccagagcgcggagcagcacaaccaggacgtgaactcgctcgggctcatctcctccaggaagactgctgaagccatcgagatcctcaagctcatgtcatccacgttcctgatcgccctgtgccaggcagtcgacctgcgccacatcgaggagaacgtcaagagcgccgtcaagagctgcgtgatgacggtggccaagaagactctgagcaccaactccaccggtggcctccacgtcgcccgcttctgcgagaaggacctgctccaggagatcgagcgcgaggcggtgttcgcgtatgccgacgacccctgcagcgctaactacccgctgatgaagaagcttcgcaacgtgctcgtggagcgcgccctcgccaatggcaccgccgagttcgacgccgagacatccgtgttcgctaaggtcgcccagttcgaggaggagctgcgcacggcgctgcccagtgcggtggaggctgcacgggcggctgtcgaaaacggcacggcagcgataccgaacagaatcaccgagtgccgctcctacccgctctaccgcttcgtacgcgaggagctcggagcagtgtacctcaccggcgagaagacgcggtctcccggcgaggagcttaacaaggtgctcgttgccatcaaccagggcaagcacatcgacccgctgctcgagtgcctcaaggagtggaacggcgagcccctgcccatctgctgaacagagaaaatacaaggagcagaagactgtattttctagctaatacgtattttttattcctaattg

SEQ ID NO: 28071 - DNA, 1988 bp, Zea mays
  Clone ID: LIB4745-014-D6_FLI
ccgggacggccctcccctgtagtctctcgatcgagctcggctcggtcctcccctgcgaggttccccgtcttcgtccgcgctgcaatccaacctggcgccgccgaacccttctctcgcccggtgctgccgaagccgaacccttctctcgcccggcctgccgtagtcctccactccgccggatcctctctcaagctcgagcggccttggagatccgtccgtcccgggatcatttggcgcggaggtttggcctgggaaaatggcaaacatacgtgcacttctggtcggcttatcacgggcaaggggatccttagcagaggctggacgatgtgcttccacgaggccatcaattctagcatctctgggcgcacattacaagatccccatgccagcccgctggttctcatctacagggcttcctccacatctggtggttggaatgccagcactatcccctactatggtaacatcgcgaaatggagaaaacaggaaggggacaaggtatttggccaagattttagcacctgaaggttctaaagatgttcaagttggacaacctattgctgttacggttgaagacgttgaggatattaagagtataccagctgatacatcttttggtggtgaacaaaaggaagagcaatcaacagaaagtgcactgcaaaacaaagtagttaatgtgtctgaacaaagctcaacagtgagccggatcagcccggcagctaaattactgatcaaggaacatggactggatacatcattactgagagcatcaggcccccgtggcacccttctgaaaggggatgttctggctgcattgaagtcaggtattagttcaagttccaccaaagaaaagaagtctccagctcaaccttcgtctcagccaactcgagattcccaatctcaagcatcctctatttcaaaaaaggatgatacatatgaagatgttccgaatagtcagatacgcaaggtcattgccaaaaggttgctcgaatcaaaacagacgactccacatttgtatctatccaaagatgttgtgctggatcccttgctcgctttcaggaatgaactaaaagtgctacatggcattaaagtttcagtaaatgacatcatcataaaggctgtggcaattgccttgcggaacgtccctgaagcaaatgcttactggaacaatgataaggaagaaacccaaaagtgcgattcagttgatatatctattgctgttgctacagagaagggcctgatgaccccaataataaggaatgctgatcaaaagactatatctgcaatatccgcagaggttaagcagctgactgaaaaggcaagagctgggaagcttgcacctaacgaatttcaagggggaactttcagtatctcgaatcttgggatgtaccctgtggaccatttctgtgcaatcattaaccctccacagtctggcattctcgcagtgggtagaggaaacaaggttgttgaacctgttgtggacagcgatggaaccgagaaggctgctgcagttacaaagatgagcctgacactatctgctgaccatcgtgtatttgatgggcaagtaggaggcaagtttttcacggagctggcgctgaatttcagcgacatcaggaggctgctattgtaaatgaaaggaggcaattaccgtgttttgacgtattctttgggagcgaaaaccgctcaggaaaagagaacatttggatgcaacccgtggtctgctgcttgatcggcatcccgtacaaaagtaaccaattttgtaataaatttataataagaatgcactggcaccttcacggttttttaacccgttttccattagttgggaggaggcatgtcctgagaatttagcaggtacggtgccattcaacttcgtggttccgcaacaatgaccacccttagattatgcaatctgagcggttctggatggacgcccattttgttgatgaccttgtgatacatggaagtaataacagaatgcttttgct

SEQ ID NO: 28072 - DNA, 2257 bp, Zea mays
  Clone ID: LIB4745-015-E11_FLI
ctcgaggccggccgggctctcgaaaccctagtcccctgctccattctcagccgccgccgatcccttcccgtgctccgcaaccgctgagtgagaagaagagatggccggcaagggcgatggcccggctatcggcatcgatctcggcacgacgtactcttgcgtcggcgtgtggcagcacgaccgcgtcgagatcattgccaacgaccagggtaaccgcaccacgccctcgtacgtcgccttcaccgactccgagcgcctcatcggagatgcggccaagaaccaggtcgccatgaaccccatcaacaccgtctttgatgccaagcgtctcatcggcaggaggttcagtgatgcgtctgtccagagtgatatcaagttgtggcccttcaaggtcatttctgggcctggtgagaagccaatgattgttgtccagcacaagggtgaggagaagcagtttgcagctgaagagatctcctctatggttcttatcaagatgcgtgagattgctgaagcttaccttggtagcacgatcaagaatgctgtggtcacagtccctgcctacttcaatgactcacagaggcaggccacaaaggatgctggggtgattgctggccttaatgtgctgcgtatcatcaacgagccaacagctgcagctatcgcctatggtcttgacaagaaggctaccagtgtcggtgagaagaatgtcctcatctttgatcttggaggtggtacctttgatgtctccctcctcaccattgaggaaggaatctttgaggtcaaggccacagctggtgacacccatcttggtggtgaggactttgacaacaggatggtcaaccacttcgtccaggagttcaagaggaagaacaagaaggatatcactggcaaccccagggctctccggaggctgaggaccgcttgtgagagggcgaagaggactctgtcttccactgcccagaccacgattgagattgactcgctgtatgagggcatcgacttctactccaccatcacccgtgccaggtttgaggagctcaacatggacctgttcaggaagtgcatggagcctgttgagaagtgcctgagggatgccaagatggacaagagcaccgtccatgacgttgtacttgttggtggctccactaggatccccagggtgcagcaactgctccaggacttcttcaacggcaaggagctgtgcaagaacatcaaccccgatgaggctgtcgcctatggtgctgctgtccaggctgccatcctgagcggtgagggcaatgagaaggtgcaggacctgcttctgctggacgtcacccctctgtccctgggtctggagactgctggaggagttatgacagtgctgatcccgaggaacaccaccatccccaccaagaaggagcaggtattctccacctactcggacaaccagcccggtgtcctgatccaggtctacgagggtgagaggacccggacacgcgacaacaacctgctgggcaagttcgagctctccggcatcccccctgcaccccgtggtgtgccacagatcaccgtgtgctttgacatcgacgccaacggcatcctgaacgtgtctgccgaggacaagacaacggggcagaagaacaagatcacaatcaccaacgacaagggccgtctctccaaggaggagatcgagaagatggttcaggacgctgagaagtacaagtctgaggatgaggagcacaagaagaaggtggaggccaagaactcgctggagaactactcctacaacatgcgcaacacgatcaaggacgagaagattgcgtccaagctgccggccgatgaagaagaagatcgaggacgccatcgacgcggccatcagctggctggacgccaaccagctcgccgaggcggacgagttcgaggacaagatgaaggagctggagagcctctgcaaccccatcatcgccaagatgtaccagggcgcgggtgaagacatgggcggcgctggcggcatggacgaggacgcccctgccggcagcggcggccctggccccaagatcgaggaggtggactaagcggtttgttgtcagtcttgagtgtgctgcagttgctggctggcccagttgctgccgagagttatcgtcagttggtgcggtgtgtccgcttaaatttgtggttggttggtacttttgtggtggttatttttttggacctcgtgatagtcggtcggttcaatgttatcgcggctactggcaaaccttaagtgatacggtattcttctttt

SEQ ID NO: 28073 - DNA, 1188 bp, Zea mays
  Clone ID: LIB4746-025-A7_FLI
ccaggcagcgccacacaccaacctcagcacaccaaggagagtacgtggaggagcagccatggcttcatcggtggccgccgcggcgagcacattcctgggcacccgcctggcggacccggcgccacagaacgggcgcatcgtggcccggttcgggttcgggttgggcggcaaggcgaagcctgctccgaagaaggtggcgaagacatcgacctcctctgaccggccgctgtggttccccggcgccgtggcgcccgactacctggacggctcgctggtcggcgactacgggttcgacccgttcggtctcgggaagcccgtggagtacctgcagttcgagttggactcgctggaccagaacctggccaagaatgaggccggcggcatcatcggcacccggttcgagtcctccgaagtcaagtccaccccgttgcagccctacagcgaggtgttcggcctccagcggttccgcgagtgcgagctcatccacggccgctgggccatgctcgccaccctcggcgccctctccgtcgagtggctcaccggcgtcacctggcaggacgccggcaaggtggagctggtggacgggtcctcctacctgggccagccgctgccgttctccatctcgacgctcatctggatcgaggtgctcgtgatcggctacatcgagttccagcgcaacgccgagctcgacccggagaagaggctgtaccccggcggctcctacttcgacccgctcggcctggcggccgaccctgagaagaaggagcggctgcagctggcggagatcaagcacgcgcggctcgccatggtcgccttcctcggcttcgccgtgcaggccgccgccaccggcaaggggccgctcaacaactgggccacccacctgagcgacccgctccacaccaccatcttcgacacgttcggagggtcctcttaagcccgccattgctccgccccgtccatcgaccggccggaacgtgttcttggattaattaactacgatctctatgagcctggggatggatcaacccgtcgtgcgtggtctcgttttgtgatgagtggaagagagaggatggcaagatcgatcctttgttaatggagatctcgttaattaggagagctaccgctgggacttggtggtttgtaatatatgatccaaccagtgatgaatcaatgcattcacttgtgtac

SEQ ID NO: 28074 - DNA, 1647 bp, Zea mays
  Clone ID: LIB4746-025-C3_FLI
ccggggggggcctctcgccgcgctgctactgctggccgcctgcgccgccttcttccctgccgccggagccgccggcacgccggacgggtcggaggagtggggctacgtggaagtccggcccaaggcgcacatgttctggtggctgtaccacagcccgcagcgcgtggacaacggcaagacgccatggccgacagtgctgtggctacagggagggccgggcgcgtccggcgtcgggtacggcaacttcatggagatcgggccgctggacgagaagcttaagccccgcgcaaccacatggctcgccaaggccgacctcctcttcgtggacaacccggttggcacggggttcagctacgtggacggcggcgacaagagcctgatggcgcacacggacgccgaggcggcgcgcgacctcgtcacgctgctctgcgcgctgtaccgcgacagcccgcggctccgtgccagcccgctctacatcgtcgccgagtcctacggcggcaagttcgcggtcaccacggcgctcgcggcgctcagggccgtcgaccagggccgcctcggcgtccacctcgccggcgtcgccctcggggatagctggatctcgccgctcgacttcgtgttgtcgtgggggccgttgctgtaccaggtgtcccgggtggacgagaagggcctgcagcagtgcaacagcgtggcggccaagatcaaggagcagctggagaaggggcagttcgcggacgccgaggcctcgtggtcggagctggagggcgtcgtcctcgccagctccaactccgtcaacttctacaactttctcaaggacgaggcgtcgggggacgccaccgccactgccacagcggcggtgtcgacactggcgtccttcaggcgccggggcggctactcgggctacctcagctccatggcggcgtcttcgtcgtcgtcagcaggcggcttcgacgggctcatgaacacggtcatcaagaagaagctcggcatcatcccaaaggatctcaagtggggagagcagtcagacgacgtgttcgatgctctggctggagacttcatgaagcccaggatacaggaggtggaccagctcctcaagcttggcgtcaatgtcaccatctacagcggacagctcgacctcatctgcgcgaccaaaggcaccatggactgggttcagaagctcaagtgggacgacctcaacagtttcctgagctctcccagaacgcccatctactgcgacaaggaggggcagtccggcacccaggccttcgtcaagtcctacaagaacctcaatttctactggatactcgaagccggacacatggtacccctggacaacccttgccctgcgctcaagatgctggctgacattacgcgatctcctgccgagtagcaggaggaagaaaacaaggcgacggaatggaacggcctgacaccagttcttcaagattcttctcttttcatacagtcagagaaaaataagtcattggtggtagcattcatacatgcaacaataaacacaaaggaaaaggtagtgataggatcagacagatatttaattcggcagatattattgtgtagcaccgctatagagcttgcagctgaatttccaacatgatgatctgattgacagtgcttctcctgtctcaactc

SEQ ID NO: 28075 - DNA, 1683 bp, Zea mays
  Clone ID: LIB4748-014-G3_FLI
ccgggttcgttttgtttcgtttcgtatcggatcgtgccgctcttcccttctcgtctagtcttgtctttctttcctcctctgttactccacctacagacctactactgccatcgggagggtaagctcttcggagccggagccgggtccacgttaacgccatcgagtgctgcgatgggcagcttaggagggagcgccggtgctggggacggcggcaaggtcgggctgccggcgcttgacgtgacgctcgcgttcccgcaggccacgcccgcatcgctcttcccgccagccgtttcggactactaccaatttgatgatttgctgactgatgaagagaaggcactcaggaagaaggtccgaggtatcatggaaaaggaaatcgcgcccattatgactgagtactgggagaaggctgaattcccattccatgccattcccagccttgccagtcttggtttagctggtggtacaataaaggggtatgggtgccctggactctcgcttacagctagtgctatttcgatagcagaggttgcacgggtcgatgcgagctgctccacatttattctagtgcactcctcgttggctatgtccactattgccctttgtggatctgaggctcaaaagcagaaatacttaccatctcttacccagttcaaaactattggttgctgggcattgacagagccagattatggaagtgatgcaagctccctaaggactgcagcaaccaaggtacctggtggttggcatttagatggacaaaaacgctggataggtaacagcacttttgcagatgtcctcatcattttggctaggaatgcagatacaaaccaactaaatggatttattgtaaagaaaggagctcctggtctaaaagccacaaaaattgaaaataaaattggactcagaatggttcaaaatggagacataattctaaataaagtatttgtccctgaggaagacagattaacaggcatcaattcatttcaggatataaacaaggtcctcgctatgtctcgaattatggtggcatggcaaccaataggcatatcaatgggagtttatgacatctgccatcggtatttgaaagaaagaaagcaatttggagctccactggcagcttttcagctcaatcaagaaaagcttgtccgcatgcttggcaacattcaggctatgcttctcgttggatggcgactgtgcaagctgtatgagtcaggcaaaatgacaccaggccggtctagtttaggcaaggcatggacgtccaagaaggccagggaggtggtttctcttgggcgagagctactgggtggcaatggcattttggttgattttcttgtcgccaaggcattttgtgacgtggaacccattttctcgtacgagggcacctatgacattaatagcctggtggctggcagagagatcaccgggatcgcgagcttcaagcctgctgtgtcagcaaaatcacgcctgtgaaagttgtttttttctttgttcccgaagacagtagaaatcaaccttgtacattcagatgattgggaataagaacggtaggaaagctgtaaaactcgacgtgcttcctcgtatgtactgttctgtttcaaattattcgacgttttgtcggaacggaacggaggacctgtatggctgtatatgatactcatcctatatatcacgcagcttttg

SEQ ID NO: 28076 - DNA, 1360 bp, Zea mays
  Clone ID: LIB4756-042-H5_FLI
ccgggtattattattattatatacacggtgtggtggccatagcatatggggaaaatatggtatagagcctcagctctgcaaatcgcgaactgaaacccaagctgccagtctgtggcatcttcgataggcgattctcaatccactgccaacatgtccggcagcacggcgccgccgcacgtcgtggaggacttcttaggcgtcatccagatcttcagcgatggttccatcgtccgcggcgacgagtcgaccatcatgccggcagggccgtgcccggacgtccccggcgtccagtggaaggacgccgtgtacgaggcgactcgcggcctcaaggtccgcgtgtacaagccgccgccgacccccggcggcggcaacaagggcaagctcccggtgctggtgtacttccacggagggggctactgcggcggcgcctacgactaccccttattgcactcctgctgccagcgcttcgccgccgagctccccgccgtcgtgctctcagtccagtaccgcctcgccccggagcaccgcctccccgcggcggtagaagacggcgccgcgttcttctcctggctgcggtcgcaggcgcaggcgcagcctgctgcaccgggcgccgccgccgccgccgacccgtggctcgccgaatcggccgacttctcccggacgttcgtgtccggcgggtcggccggcgccaacctggcccaccacatcgtggtccggatcgcctctgggcagatcgcgctcggcgccgcggtgcgcgtcgccgggtacgtcctcatctccgcgttctttggcagcgtcgagcgcgtggcgacggagtccgatcccccggccggcgtgtacctgacggtggagacgattgaccagctctggcgcatggcgctgccggtgggggccacccgggaccacccgctggcgaacccgttcggcccgggcagcccgagcctggaaccgctgccgctgccgccggcgctcgtcgtggcgcccgagcgcgacgtgctgcacggccacgtgcggcgctacgccgccaggctcagggagatggggaagcccgtggagctcgccgagttcgcgggagaagggcatggcttctctgtcggaccgtggagcgaagcgagggatgagctgatgcgaatcttgaagcgcttcgtgaaccagggcgctggtctcggctgaggtgaatctgtcgctaagtccagctcgcagttgacacgtcgcaataagaacctgtacctggaatggacagtgatgttcacatttatcgtttttctctctctcatatatataattgatgaaactttcgtttaggaggttgtaaaaatttaatttcttttaggaaggagtaatttagaggaattttagc

SEQ ID NO: 28077 - DNA, 1190 bp, Zea mays
  Clone ID: LIB4756-044-G11_FLI
ccgggaaaaaaaaaaaacggttgccattcttttcctgtaaccgaaccctgaagggtagcgtcatcatccagaccaccattaccagagtgctctgctctcgctggaggccgtggttcattcacgttcatggaggccgccgccattcccaccagtgccccggaaaccaggattgccgttgtcaccggcggcaacaaagggatcgggctagaggtgtgccggcagctggccggcgccggcgccaccgtcgtcgtcttaacagccagggacgagacgaggggtgcagccgctgcacaagagctcagagaatctgggctctccgatgtcatcttccatcagctggacatcaccgacgctgcgagcgtcagtcggctggctgagttcctcaaggctcgttttggaaagctagatatcctggtaaataatgccgcagttggtgctgttgagtacgtccaagatcctgctgacagttcaacgagcgaggaagagctgagtggcatggatatggtccaaaggcttcagtgcatgcttaagagagtccgggagacctacgacgctgcgacagaaggcatcaagacaaactactatggcataaagcatgtgatcgaagccttgctgcctctgcttcaagcttcctccgatgggaggatcgttaacgtctcctctgacttcggactgctaaggctgatcaacaacgaggaagctaaggcaggagctaaacgacgtggagaagctcaccgaggagaggctggacgaggtgctggccgcgtacctgagagacttcgacgccggcgaggtgggggcgcgcgggtggccggtggacttctcggcctacaaggtggccaaggtggccatgaacgcgtacacgaggatcctagcgaggagccacccggggctgcgcgtcaactgcgcgcaccccggctacgtgagcaccgacatgaccgtccacaccgggcctctcacgcccgagcaaggcgcggccaacgtcgtgaaggtggcgctgctgccggagggcggcccgaccggcgcgtacttcgcgttgggagaggaggcgtcctttatgtgacgaaagcaccgtcgtcgttaagttcgtcgttgttcgccaactccctgttagtcgatttctaaatcgacgtacaatgaaatacatcatcgctgcaaactcacaaatgaaaacaagggaaccttgtagc

SEQ ID NO: 28078 - DNA, 1277 bp, Zea mays
  Clone ID: LIB4756-044-H12_FLI
ccggaactaaccacccaggtcaattcccaacagccaccatgtcgaggccaaccgtcaccgtcgtctctgccaagggcgaggtcacccaggacaccatccccgtccccaatgtcttcaaggccccaatccgcccggatgtcgtccacgcggtgcacactggcatgaacaagaaccgccgccagccctacgctgtctctgagaaggctggtcaccaaacttctgccgagtcctggggtactggtcgcgctgttgcccgtatcccccgtgtctctggtggtggtactcaccgtgctggtcaggctgctttcggtaacatgtgccgctccggccgcatgtttgctcctaccaaggtctggcgcaagtggcaccagaagatcaacctgaaccagaagcgcttcgctaccgcctctgcgctcgctgcttcaggaagccctgctcttctccttgcccgtggccacgctatcagcaccgtccccgaggttcctctcgtcgtctcatcgactgctttcgccgatgccgccatcaagaagacctccgctgccgtcgctctcctcaaggccgtcggtgctggtgctgatgttgagaaggcccgcaactcgcgcaagctccgcgctggtaagggtaagctccgtggtcgccgccacaagcagcgccgtggacctcttgtcatctacaaccctgatgaggatggcaaggagcttgtccttgctttccgcaacatcccaggtgttgagacctcatctgtctactccctgaacctcctccagctcgcccccggtggtcaccttggccgcttcattgtctggacctcttccgctttcagcgccctcgacaaggtctacggatccaccactgagccctcagcgctcaagaaggacttccttctcccatcccccatgatggtccagcccgacctcagcaagatcatcaactccagcgacatccagaaggtcctccgccccgtccgtggcggagccgttactaagcgcagccacacccagaagaagaaccctctcaagaacttccaggtgcagctccgcctcaacccttacgctgctaccttcgccaaggagaagcttggccagaagaagatcgaggctggcaaggccgagcctgccgccgataccttctacgagctgctccaggataactagatggttgttggttagcgttatgatttcctaaggtgttctctcttcggctgggatggactggaatgatgaatggctatgacaaatgtagctcttcacaaaatacctcatgaaaaggttgcttcc

SEQ ID NO: 28079 - DNA, 1719 bp, Zea mays
  Clone ID: LIB4756-056-G8_FLI
ccggggacataatttcagacggaatgggcaaatccgggccgtgctcgcgcttgggcatctgcggcctacgatggggagcgagtcggagcccgccaagggcctgttgccctacctgcagcgcgccgatgagctgcagaagcacgaacccctcgtggcgtactactgccggctctacgcgatggagaaggggctgaggataccccagaaggagcgcaccaagaccacgaactccatcctcatctccctcatgaaccagctcgagaaggacaagaaatcgttgactttggggcccgacgacaatcttcatttggagggatttgcattaaacgtctttgttaaagcagataaacaggaccgtgctggacgagctgacataaacactgctaaaactttctatgctgcaagtatattcttcgagattcttaaccagtttggcgagcttcaacctgatattgagcaaaaacagaaatatgccatctggaaagctgctgaaataagaaaagctctcaaagaaggccggaagcctgaagctggaccgcctggtggggataaagatgaagcacctgtcagtaccaccaccatttctcaagatatggggcaaagtccttccttcagcagtgtacaccagggcagtgaagcatcacctcgacctgtcaacatggattttagtaggcgggatagcttttctgctgtgcagccaggaaataacgtccctcaccaaagtacagagttcaatgatcatccctctacccagttaccctattcaccgccaccaccctcacagtcccagcatccttctccatcacaatcttattcctctccctcgtatcaggcaacaacagattacccttcttctgattttcacaaaccatcccccaattattcaactcccggctacacaagcacagatttccctaccaatgaggtccacaaaccaccttccaattattccccacctccttacacaaggacagatcgcccttccaatgacggctacaatcctcacagcaatggtaaaccagatgtttcggcttaccctcaggcatatcaaccctcaccctacacatttgaccctcagcacaactctcaaaactactactccacggaagccccagctgttccatacaactaccctaatttccagtcatatcctagtttccaggacaacacgtcagcttctgttctgacgcatcagtcttcattctatcctgaaagtgatggtcccgcagctacatcacacactcctgcctcaaattcttctgtcccaacgcactaccacccaaccgctgactgttcacctcaagtcactcctccagctgcgccaccagctagccagtatagatatgatagcagttaccagcctgaagttgagaagattgctgaggcccacaaggcagccagatttgcggttggtgctcttgcgttcgatgacgtatctgttgctgtggatcacctgaaacgtgcactggatcttctgacgaacccatctgctgaaccccattagctctttgcaccaccgagctcttgtcagaagcatcatctgtacaaatacaagattggtataccaccatggatatattgccaggtcgcgtacatatgagaggggttaccacacaaatctaggagataataagcgagccgtgtgggcttttgaagtcacacttaaggaaaccttattgtgcaaaattcaattatcttattcagagttctgttctacgt

SEQ ID NO: 28080 - DNA, 1308 bp, Zea mays
  Clone ID: LIB4756-056-G9_FLI
ccgggaaaacatcaataataatccactgcggtcgctcgtcctcctcccaacctcctcccaagttgcctcgtgctctgcttcttcggttttcaggagcgtcggccattgctgctggaaaagcagaccattgggactccctcgtgcgttttccaaatcagtcaggttgatggcgatggagggaccagttttatgccgccctgcaatgcaagccaaatcgcctgctgctgcgctggtcaacaactccctgaccagattcgggcagcttgggaccatttcaaaatacaggaacgtttcaagattcatttctcccatctctcagccatctacgaagaacataggtccatgctgtagcttcagctcgtcttctgatggcaatggatacatggctggaaactttagcgacagtgatgaagattatgttaattctactgtgctagaagcagttgaggtgagaagtggatcggaaggatatgtgataaagatgcgagatgggaaaaacttgcgttgtgtccataacaattctcaagggagaaatattccagagagtgcaccccaacctgctattgttttgaggattgaagatggaagcgaaactttacttccaatcattgttttggagatgccaagtgtacttctgatggcggctattcgtaatgtccacattgcacgaccaaccatatatcaagttgtcaaggaaatgattgataaaatgggctatgaggtaaaacttgttcgggtaaacaaaagaattcaagaagcgtactgtgctgaactttgtctaacaaagattgatgattctacagacagcatcaccttcgatcttcggccttcagatgccataaacattgctgttcgttgcaaggttcctgtacaagtccatagaagtcttgcatacagtgacggcatcagaccagtcgagccagcaagaatggcagtagcagctggcctatcagatgggttgttatttacagagcttgacagacccgatggacaggcatctgttgaggctcaagagtttggattggtgaagaacatgctcattgcagccgtagaagagagatacaaggatgctgcatcatggaaggacaaactgatgcggctgaggtctaagcggaagaactgggcctgacagcgttgcatgtctggatggtgtaaataaagatgatgcccagctgaattccagtacgcattccagataattgatgctgggttatggctatgtaactagctgtacatattgtatggacccgaggatggtcttctgtaaattcagactaagctttgaagtgaaacactaatccttcggag

SEQ ID NO: 28081 - DNA, 1167 bp, Zea mays
  Clone ID: LIB4756-056-H3_FLI
ccgggacaagcaccagaccaactagcttcttctagctagctctaggctcgtctgctgcaagaaggtaacagcgcaggcatggaggggaaggaggaggacgtccgcctgggcgccaacaagttctcggagcgccagcccatcggcacggcggcgcagggcacggacgacaaggactacaaggagcccccgccggcgccgctcttcgagcccggggagctcaagtcctggtccttctaccgcgccggcatcgccgagttcgtcgccaccttcctcttcctctacatctccatcctcaccgtcatgggcgtctccaagtccacctccaagtgcgccaccgtcggcatccagggcatcgcctggtccttcggcggcatgatcttcgccctcgtctactgcaccgccggcatctccggcgggcacatcaacccggcggtgaccttcgggctgttcctggcgaggaagttgtccctcaccagggcggtgttttacatcatcatgcagtgcctgggcgccatctgcggcgcgggcgtcgtcaaggggttccagcaggggctgtacatgggcaacggcggcggcgccaacgtcgtggcgcccggctacaccaagggcgacggcctcggcgccgagatcgtcggcaccttcatcctcgtctacaccgtcttctccgccaccgacgccaagaggaacgccagggactcccatgtgccgatcctcgcccctcttccaatcgggtttgccgtgttcctcgtccacctggccaccatccctatcaccggcaccggcatcaaccccgcgcggagccttggcgccgccgtaatttacaaccagcaccatgcgtgggctgaccactggatcttctgggtcggccccttcatcggcgctgcgctggctgccatctaccaccaggtgatcatcagggcgatcccgttcaagagtaggtcttaaaggagccgatgctgctgcttcgagatgccggtcttaaaaggatggattcgtggctgttttcaaatgatcccctactatgttacgtgcagttccattcctctttcaaagttcggggctgcttttatccgaacccagacttgtaattcatctgtaccaaatgtgtaatatgccgcgcctctgttatgtgcaattgaaaattatgagacagccgagtcaagctat

SEQ ID NO: 28082 - DNA, 1446 bp, Zea mays
  Clone ID: LIB4756-072-D10_FLI
ccgggaaaaaaaaaaaccattcctcccaacaccacctcgcctgcgatcttcgtagcctccgtcgcgtcgagcatcgatcatgtcggcctactgcggaaagtacaaggatgagctcatcaagaatgctgcctacattggcacccctggcaagggtatccttgctgctgatgagtccactggcaccattggcaagcgcctttccagcatcaatgtcgagaacgttgaggagaaccgccgtgccctccgtgagctcctattctgctgccctggtgctctccggtacatcagcggtgtgatcctcttcgaggagaccctgtaccagaagaccaaggatggcaagccttttgttgatgtcctcaaggagggaggcgtcctccctggcatcaaggttgacaagggcaccattgaggttgttggcactgataaggagaccaccacccaaggccatgacgaccttggcaagcgctgcgccaagtactacgaggccggtgcccgctttgccaagtggcgcgctgttctcaagattggccccaatgagccatcacagcttgccatcgacctgaacgctcagggtctggctcgctatgccatcatctgccaggagaatggtctggtgccaattgttgagcctgagatccttgttgatggccctcatgacattgatcgctgcgcttacgtcactgagaccgtccttgctgcctgctacaaggcgctcaacgagcaccatgtcctcctggagggtaccctcctgaagcccaacatggtgactccaggctccgactccaagaaggtgactcctgaggtgattgctgagtacaccgtccgtaccctccagaggaccgtccctgctgctgtgcctgctgttgtcttcctctctggtggacagagcgaggaggaggccacccgcaacctcaatgccatgaacaagctcagcaccaagaagccgtggtccctgtctttctccttcggccgtgccctccaggcgagcaccctcaaggcctgggctggcaaggtggagaacttggagaaggctagagctgccttcctcgccaggtgcaaggccaactctgaggctaccctcggcacctacaagggtgatgctgccgccgacaccgagagcctccacgtcaaggactacaagtactgagttgcttctctttgcgtgcccgttttggaactcctgcctacgagctaggttgcggagtgtggtttgctcgttagagcttattttcggacatccaaaaaacatgcttcctatgtgggatgatggttatctttatatttgtatgttaattagtctctttgctgttaaatttcgtgtaagttggtcctgccgatggagaatcgagcagccccctttttttgttctatcaactatgctgtaatgctggctatgtatcggcaaaaacaattctatatgctgagttggagtcggcaaaaattcat

SEQ ID NO: 28083 - DNA, 649 bp, Zea mays
  Clone ID: LIB4756-072-D11_FLI
ccgggctgcccggagcacgacacgagaacaccaccaccaggcaccacaaccaaccgaccgatcgaagccggcagacaatcaatggacggccagggcaacagcggcagcgcgggcgcgagcgactgcgacgcggtggcgcgggccttcgtggactactactaccgcacgttcgacgccagccgcgccgcgctggccgtgctctacggccagacttccatgctctccttcgagggccacgccgtcgcaggcgccgaggagatcggccggaagctggcgcagctgcccctggagcaatgccggcacgccgtgtgcacgctcgacagccagccctcgccgtctttccccggcagcgtcctggtgttcgtcagcggcaccctccagctcgccggcgaggagcaccagctgaggttcagccagatgtttcagctggtgcccaacgagcaggggagtttcttcgtgcagaacgacatattccggctcaactacggttgacgcagtagccggtgttcttcgtgtgggtgccgaaaggaaggtcaccatatgctttgatgtcacatggacacgcctcgtgttcgtgtaggatgcagtgcagcagcccaatgtttactttcagaaagcgtagcgtcctaaataaagtttcctattaagg

SEQ ID NO: 28084 - DNA, 1972 bp, Zea mays
  Clone ID: LIB4756-072-G6_FLI
ccggggggttactacatggtcgtgcatgcatgaatgctcgctcctgcatgctactattaaacaaggaagccatgggagagaacaggaagatcacccggtcaaggctggtgacaaacaagctgctgcaccgctgccagcaactgcatggccacggatctgtatctggggtttctgaaaccttggggaagagacccttgaatgggaacaaggatacacttgtgtacagtgtgtttgccagcacctggaatgtcggcggcgttacaccatccgatggcttggacttggaggattggctggacacaagggctaacgcctacgacatctacgtcctagggttccaggagatagtgccactgaacgcgagaaatgtgctgggtcctaggaagagccgcgtgtctgccaagtggaactcgctgatcggggaggcgctcaacagaaggtgtcgagaagaaggcggggcgaacacgaacagcagcgccaaggacgacgaaggctctgtggagggatcacagggcttcagatgcatcaggagcaagcagatggtcggcatcttcacgtcggtgtgggcgagaagcagccttaggccgctcatccgtcacctggatgcgtcgtgcatcggctcgggcatcatgggctgcctagggaacaagggctctgtttcgatccggttcgtgctgcacgacacgagcttctgcttcgtctgctgtcacctggcttcaggcggcaagcaaggggacgtgctgctgaggaacttggacgtcgcggacatacttgcaaggacaaggttccctggccttgcagctcaggagttgccggagaagatccttgatcatgagtaggtgtacattagctcacccttcaaactgcttcaacctcagcctcatatttccatcttctagaatatggattctactataagtgatccctaaactaatggtttagtctgatgtgacatgtttacatttttactaaatgtgcctgtctcctttgtgaatgaaaaaaaacgaaggggggtatccgaaatggcatcacgcataaactgcagacatcaccctgtgcaccatgtctctgtggactgtttatccaaacaatatgtgttttctttcccgtttgtgcagccaagtggttttgctcggtgacttgaactacaggatatccctggaggaggccgagacgaggtcgctggtgagagccaagagatggcccgtcttgttggaaaacgatcagctgctgttcgagttctcgagagggcggcattttgagggctggcaggaaggcctgatcaccttctcccccacctacaagtaccagcccaactccgaccagtaccactggtgcttcgacagtgcggggagcgacaagaagcgtgctccagcatggtgcgatcgcattctgtggcgaggcaaggggcttaagcaagtccaatacgagacgtgcagctacaggctgtcggaccaccggccggtgagagcggttttccacgccgaatgcgatgcgttatcggaagcggtgtcgcacaagtaaaaacattgccaggctacagagcgcccagcaagcaaagcgactgatgtgatgagacgtctgttcaaccagagagtgatggatatggacgacggcgcgcgagtgcaaaatcgagagagaactggacgcatgattggaccaagcgagtagagccaagaagagatttcttctgagacgaacacgaagttgtttttttttctgtctctctctctccctctgaacgccgattgagttgtgtgcagaagaggtgcatggggacagagtagcaggatccaagaagaggtgctggtttttttggcattgttctgttggtggcggtgttcagattctttttttttttgcctcgtttaaaagctagctccttctggggctttgggcttgtgtctgaaagaatatcagagcctaaaaacggcatctgcacattctgttgcttaatacattggagattatt

SEQ ID NO: 28085 - DNA, 1727 bp, Zea mays
  Clone ID: LIB4757-004-G12_FLI
aaaaaaaaaaaaaaaagaggttcagttcagcagccagtcagtcagtcctcgatctgatatcctctcctccctgcagcgactccagctccgatcgattccattccatccatcgagctgcagcagggccatgacgatggcagctacgacgacgatgatgtcagcagcagcgcaggcggcgacgtcgcagctgccgccggggttccggttccacccgacggacgaggagctcatcctgcactacctccgcaaccgcgccgcgtcggcgccgtgccccgtgcccatcatcgccgacgtcgacatctacaagttcgacccatgggacctgccggccaaggcgctgtacggcgacggcgagtactacttcttcagcccgcgggaccgcaagtaccccaacggcatccgccccaaccgcgccgccggctccggctactggaaggccaccggcaccgacaagcccatccacgacgccgccaccggcgagggcgtcggcgtcaagaaggcgctcgtcttctacaagggccgcccgcccaggggctccaagaccaactggatcatgcacgagtaccgcctcgccgccgtcgccggctgcaccagccccctcgccgcctaccgcccgccctccaagttcaggaacgtctccatgaggctggacgactgggtgctgtgccggatctacaagaagtccggccacgcgtcgccgatggtgccgccgctcgccgactacgagcacctcgaccgcgacggaccttctcccggcggcttcttcgacgactacttctgcggcagcaccagcttgtacgccgccgccgcgccggccatcggcggcggtgctgctgctgctggtactacaaacactactacgacgccggccgtcgtcatgcagcagcaccagcagccggcggcgctgccgaggctccccaagatcccctccatctccgagctgctgtgggacgagtacgcgctcgcgcagatcttggaccccccggccgacgtggccgccgaccacgcctcgttcgccgtgcacccgtccctcaaccagctcctggccgtcggcgacgacggctccgatctcatgatgttctcgccgcccccggccgccgcagcaggcgggaagcgcaaggcgatggtggcgatgaacatgagcccagctgacgagtgcgccgccactgcccaccagcaccagtctccggcggccaagcggctcaacggtggctcctgcttcgacgacgcgccgcagccggccagcggcttgccggcgacgatgtcgtccgtgcttggcggcggcctcaaccaccacatgctcccacagttctagatagacgacttctggtagctgactttgttgggggcacatcttccgtgcatgtactgcgtcatcaactgatcaatatggtggatcgtctacgcggaatagctagcaacctgcggcgacatggaaagcaaggatcgagctcgtggattggaggccattaataaagatgggtcgtgcggtgaagaacaattgtagcagtacgtagcactatttgtactggagccagtgttgatcaacgttaggcgtaaccatggtatgtatcccattttttttccctccgttgtagagtacaggtactctatattcatttcaggcgcagtgcgaaggtagctggagcttgatgggtccatgtactactacactagtactcttatttattattcaatatgaagtatatattatattgtcttgctgc

SEQ ID NO: 28086 - DNA, 1081 bp, Zea mays
  Clone ID: LIB4757-008-E9_FLI
gggccggccgggaaacatctccaaaaccccattccgcaatgagacccgcagccgcagcagccaccgctaccaccgccgcgctccgtctccgcgccgcctccctctcgccttctctcgctgcctccctctcgccttctctcgccgccctcctttctcatcgtagatcctccctcattcttcctccgctgcgccgcatctgctcccttgcgcctccccactcctccgccgcccccaattcgcagcccccgccgcagttgctctctcccatcatggacgcgcagttcgagctcttccgcgcgcagctcgacgagtcttccaccctccgcgaccgcatccgtgccgtcgtcgccgagattgagtccgcctcccgcgtcgccaccgccgcgctcctcctagtccaccagcccgtccccctggcagatgtgcttgtgaaagccaaggcgcaggtagaggtgatcaaggcgttgtacgcgcgcctggcggaagtcctcaaggaatgccctgggcagtactacaggtaccatgctgattggaggactgagacacatatggtagtgtcgatgcttgcattcatgcactggctggagacaggtggcctactcatgcatgctgaagcccaggagaagctagggttgtgctctggggagtttggccttgatgttgaggactacctgacaggactgtgcttcatgtccaatgaatttcctagatttgtagtaaatcgcgtcactgctggcgactatgactgtcctaaaagggttttgggcttcttgaccgatcttcatgcttcgtttaggatgctgaatctgcgcaatgacttcttgcgtaagaaatttgatgggatgaagtatgatttgaggagggtggaagaggtctactatgatgtgaagatccgtggacttgtacctgcgtagttgaaacaagagacatccttggtaatgttagattgttaacatactgtggtttggcttttgtcatccataacgtgttcatctagctaaaatgtgaaatatattctgttggagcgtatgtgttatggactgaacttgggggcactcgaatgaccttgctcatttctttt

SEQ ID NO: 28087 - DNA, 1720 bp, Zea mays
  Clone ID: LIB4757-008-H12_FLI
atcggccatcgctgcctccccagtccccacatccgcacacatttttacccctcgcggcggccccaccgaccgccggggcgcagcggcgtcgccgcgggcaacgccgtcacgtcacgtgcatcacgacaatctcctcctccgcctcgtcttcctgccaggccgcgggagcaccagcccagcggcagatcagtcgaggcgggcgattccagggtttagagaggagcggagatggtgaaggtcatccaggggcgcccggccgagatggggttccggatgccggcggagtgggagccgcacgagcagtgctggatgggatggcctgagcgtccagataactggagggagaatgctggtccagctcaagaggtatttgctagaactgcaattgccatttcaaagtttgaacccgtcacgttatgtgcaagtgccaagcagtaccccaaagtccacgagctgatggaacatcaaaccaacatcagggtcgttgagatgagcatgaacgattcctggttccgcgacatgggccccacttttgtcacctgtaaaggggattcaggaattgcagaacaaacaatagcgggaattgattggcaattcaatgcctggggaggaatctatgacgactggagtcttgacagcgatgttgccaagaaaatagtcgagatcgagaggatccctaggtttccccaaaaaattatccttgagggtggaagcattcatgtagatggagaaggtacatgcattacaacggaagaatgcttgctgaatcctaataggaaccccaacatgaccaaactagagatagagaatgagctgaaggattttcttggagtctcgaaggtcatctggatacctcgtggactttatggcgacgaggatacaaacggccacgttgacaacatgtgctgcttcatcaaacccggtgtgatcctgctgtcgtggaccgacgacgagaaggattatcagtacgaacggtcggtcgaggcgctgtctgttctctcccagtccgtcgacgcgaaagggcggcagctccaagtggtgaagatccacgtccccgggcctctgtacatgacagaggaagaggcacagggcgttgtttcatcgggacattctgtgccggggccagcgggcacgagattggccgcctcgtacgtcaacttctacatcgccaatggtgggatcatagcgccttccttcggcgacaggtgggacgaggaggcgtatgcggttctccagaaggcattccccgatcacgaggtggtgatggtcgaaggcggacgggagatcgcgctgggaggtgggaacattcactgcatcacgcagcagcagcccgtgcgcccgtcctagctgaaaccggcgtcgacgcgaggggcgatgaagagcttgcgagtagtattgttttgtatgctgctcctgtcgttatcacgctcacctatacgctcgcgaaataagccacgccagcagttcgttgacacatactgtatgagtactattatactatacggcacaaacggccaaacgccacacaggcgtggatcaaaattgtactagttcctgtctacaattcgtggcctttatcatcctgattggctgcccgtatattatttatcttaagtcatctatattcttatcttaagtcattacgtgcgttaactttgtcatagtatatattttgtcatgcggggttctacagtggacacaatataagttattttaaaat

SEQ ID NO: 28088 - DNA, 2334 bp, Zea mays
  Clone ID: LIB4757-008-H5_FLI
gtcttcattttctccattacgtgttcccagctgcatgccgcaagtgtcaaactccaattagtcaccagccttgcttgcttgcttgtcccagctaagccgaggacaggacacgcgaagaagaggaacgatcagtcaccagccttgtttgacatcctgagcagcttcatctcctcctcctggcaagtttcttggcaagctggtgctcaaacaatggcgtgttaattaggaataggatagaacaggatcgttgcatcacgcagccaaggagacatggctaggagcagagaggtggcgggctggggcacggtggccggcggcggcgcggcggccgtggagaaggcggtgcggtgcctcggcaggggcgtcgacatgacgggcgacctgaggctgaagcactgcaaggacgcggggggctgcctggtcgtccggagcgccgggaggaaggcggcggaggaaaaggccgtcgtgccgggcttcggcgtcgtcgccgacctgcccgccgacgtcaggtgcggcaagggcgaccggatcaggttcaggtccgacgtgctcgagttcaacaagatgtcggaggcgttcaaccaccggaattcgctggcggggaagatcccgtcggggctcttcaactcctgcttcgacctggagagcggctcgtgggcggaggacgccgccgccaccaagtgcctcgccttcgacggctacttcatctcgctcctcgacctccgcctcgactgccggccgctcgccctcgccgaccacgtcgtcggcgacgtgccggcggcatgggacccggcagccatagcaagtttcatcgagaggtacgggacccacatcgttgtcgggctgggcttgggtgggcaggacgtggtgtacgtgaagcaggacaggtcgtctccgctgtccccgtccgagatcaaggagcacctcgacaggctcggtgaccagctcttcaccgggacctgcaccctgcccccttccaaccgcaaactcagggaacacaaatctaaggtccctgaggcgttcaatgtgttcgatgcccaagtgacacagcaagggctccaaggactaatggctactccagtgtcctgcaaagagggcgtgacggtgatacactccaagaggggagggaacgcggcggcgagcgaccactcggagtggctgctcaccgtgcccgcgacgccggacgcgattagcttcaagctcgtgcccatcacgtccctcctcaagggcgtgaccggcgtcggcttcctctcccacgccatcaacctgtatctcagatacaaacctccgacaggcgagctgaggtacttcctggacttccagcaccacagactgtgggctccagtgctcggtgacctgccacttgggccctgctccaaccggcaggctgccactccggccttgaacttcagcctcgtcggttccaagctctacgtcagctcgagcgaggtggttgttccaagactacccgtcaccgggatgagactacatctggagggcaagaaaaataaccgcctaggcatccacctgcagcatctgtccaacaccccagcgttcatcggcggaacaccggccaatgagcagccggcggcggcggtttggcgcgggtcggagacgatctccgacgcgcggtactacgagccggtccagtggaggatgttcgcgcacgtgtgcacggtgccggtgaagtacgaccctcgctgggccggcgccggcgccggcccgccgtcggcgtacgtcgtctccggcgcgcagctccacgtcaaggcccacgactcgaccaacatcctgcacctcaggctcctgtacgcccggctgccgggccacgccgtggtgcagtccaggtgggcgcacggcgccgccaccaggctgtcatcgggcagagggagcttcttcctgtccaagtcgctggcctcgggctccggcggcgtcgacaaggagcagcagcacccggggagggttcacgtcgactccggcgtgttcgccggagggccgcccgtgcctgtcgggacccagaggctgctcaggtttgtggacacgtctcaggtcaccatggggccgcaggacagtcctgggtactggctggtcactggcgccaagctggacgttgagaaggggaagatctcactccgcgtcaagttctccctgctcgctccagtttcttgacacgctagtcttctttctgctaggagaacaccgctgtgcagaaggccgaaattaggggggactccttgcgcagtgatgagtgattgtatcaaggtcatatttgattttacacagccttccgtacatatttttgctactactttcttgtacaatatattcttaaaatcc

SEQ ID NO: 28089 - DNA, 1297 bp, Zea mays
  Clone ID: LIB4745-015-E9_FLI
ctcgaggccggccgggatacagagaagattagcaagggaggttttctgctataaataaggcatcgtccaggcaaacaattaatagggcaaagcaaatcaaggacgctctgcacgtactattcatcttccattgttgctttgctttgctttgcttaccggcaaccatggccagcactcgtgcagcagcaactctccttttgctcctcgcgctcgccggcacctcgtcggcgcagctgtccacgggcttctactcctactcgtgccccggcgtgtacggcgccgtcaagtcggtgatgcagtccgccatcgccagggagaagcgcatgggggcctccatcctccgcctcttcttccacgactgcttcgtccagggctgcgacgcgtcgctgctgctggacgacacgcccagcttccagggcgagaagatggccaaccctaacaacggctccgtcaggggattcgaggtcatcgacgccgtcaagtccgccgtcgaaaagctgtgccccggcgtcgtctcctgcgccgacatcctcgccatcgccgccagggacagcgtcgtcatcctgggtggtccgacctgggacgtgaaggtcgggcggcgggactccacgacggcgagcttcagcggcgccaacaacaacatcccgccgccgacgtcgggcctcgccaacctcacgtcgctcttcgccgcgcagggactttctcagaaggacatggtcgcgctctctggtgctcacaccatcgggcaggcacgctgcaccaacttcagagcccacatctacaacgacaccgacatcgacgctgccttcgcgagaacgaggcagtcaggctgcccaagcacctcaggcgccggcggcgacaacaacctggcgccattggacctccagacccctaccgtcttcgagaacaactactacaggaacctcctcgccaagaaggggctcctgcactccgaccaggagctcttcaatggcggagccaccgacgcgctggtccagtcctacgtcgggagccagagcgcgttcttcgcggatttcgtggcgggcatgatcaagatgggcgacatcacaccgctgaccggctccaacaacggacagataaggaagaactgcagaagagtcaattagcagatagctagctagggtcactaattaagacccatgcatggctgttgaactgcaagctaagtaaacactatgtgagatcgtcgcgttgatgtgctcacatgtcgtctttttatttgggtgaaggatggatgcatgtatcagatcacttgttgtttaattaatgccattcc

SEQ ID NO: 28090 - DNA, 2535 bp, Zea mays
  Clone ID: LIB4745-016-B3_FLI
ctcgaggccggccgggaaccgattaaaactatcccaacgagaacatcgttccccttccagcacctccattcccagccacgagacgacgaaaccctagcctcccctccccctctctcaccaggccaccacctcgccggaacccggcgcctcgacagagcacgggatcatcggccgccgtcggccgcggctgcggaggagcggtgtaagatgttgaacggcggcggcggcggccagaagaagcggaacacgaagatcgagccctaccggcaccgcgtcgagaccgaccccaagttcttcgacaagtcgtggcggaagctccatgacgccatccgcgagatctacaaccacaacgccagcggtctctccttcgaggagctctacaggactgcttataacatggtattgaacaagtttgctcctcagctctatgagaaactcacagaaaacatgaaagggcatcttgaagagatgcgcacatgtatagaggctgctcaaggtggtttgttcctggaagagttgcagcgaaaatggaatgaccataacaaggcattgacaatgattagagatatcctgatgtatatggacaggacatatattcccactaataaaaagacacctgtcttcgaacatggattagagctttggagggatactatagttcggtctcctatgattcaggggaggttgtttgacacgcttctcgagctcatacatagagaaaggactggcgacgtgataaatagaggcttgatgaggactacaactaaaatgttgatggatctagggttgtctgtttaccaggatgattttgaaaggccatttcttgaggtctctgctagtttctatagtggtgagtcacaacaatttattgaatgctgtacttgtggtgagtatctgaagcaggctgagaggcgcctccatgaagaatcagagcgtgtgtcacagtacttggatgctaaaaccaatgagaaaattactgctgttgtggtgaaagagatgctagcaaatcacatgcagaggttgattcttatggagaactcagggcttgtgaatatgcttgtcgaggacaggtatgaagacctgaccaggatgtacactttgtttaatcatgttcctgatggtctcgcaacaattagatctgtgatggtgtctcatattaaggatactggcaaaagtttggtaacagatccagagagactaaaggacccagttgattttgttcagcggcttcttaacatgaaggacaagtatgacaatatcatcaatgtgtcatttagcaatgacaagagtttcctgaatgctctcaattcctcatttgagaactttataaacttaaacaacagatcacctgagttcatatcactgtttgttgatgacaaactgcggaagggggtgaaagaggccaatgaggaggatcttgaaactgtcctggacaaagtgatgatgctgtttaggtatttgcaagaaaaagatctatttgagaaatattacaagcaacacttggcaaagcgtcttctttctgggaaggctgcttctgatgattctgagagaagcatgcttgtgaagctgaagacagaatgtggctaccagtttacttcaaagttggagggcatgttcactgatttgaagacctctcaggatactacacaagggttttatgcatctacttcctcggagctgccggcagatgcccccacaatgtctgtccagatactcacaactgggtcatggccaacgcaaacctgcaatacctgcaatctcccccctgaaattgtttctgtctcagagaagtttcggtcttattaccttggcacacataatggcaggaggctaacatggcaaacaaacatggggacggctgacatcaaagtaacatttggaaatggaagcaagcatgaactgaacgtatcaacataccagatgtgtgttctcatgctgtttaactcagcagatgtcttgacttaccgtgaaattgagcagtctacagcaataccagccgctgacctgaagcgatgcctccagtcactagctcttgtgaagggtaagcaagtcctgcggaaagagccgatgagcagggacattgccgatgatgacagcttctgcgtgaacgacaagttcaccagcaagctcttcaaggtgaagatcggcaccgtggtggcgcagaaggagaccgaccccgagaagctagagacgcggcagcgggtggaggaggacaggaagccgcagatcgaggcggccattgtgcggatcatgaagtcgaggagggtcctcgaccacaacagcatcatgacggaggtgacaaagcagctgcagccgcgtttcatgccgaatcccgtggtgatcaagaagcggatcgagtcgctcatcgaacgcgacttcctggagcgggacaagacagacaggaagatgtatcgctatctggcctaagagaaccacctgtccttgaattcgatttcatcatatctacccatgttgtataaacagaccctgatccatgtaacttgtccagagaaggaaatgggtctttctgcatcc

SEQ ID NO: 28091 - DNA, 1923 bp, Zea mays
  Clone ID: LIB4745-016-H9_FLI
acgggacagcaggagcagcatacaggaagtgcaggcggagatctctacggagtgcttctttactacaagtacgccgaggtgcctgacgccgccgcgctcgccgcgttctacgaggcgcactgccgcagccttgcgctcgtcggccgcgtccgcgtcggccccgacggagtaaacgcgacgctcggagggcagatgaacgcgctggagaagcatatcgcggagatgagctccaacgacttgttcgtgggcacagatttcaagctggcgtcctgcgacgaccctgtcgacgagagggtcgcccgggagtgcggcttcacctcactctccgttcgggtcgtcaaggagctagttaccctgtgctgcaaccccgcattggcacccccagagatttcgagtgctgggagacacttgtctgcggccgagttccattcggtgctccagaatgttgctgggactagtttgaatgctgtggcatctgcggagaagaaggaagtggttgtcttggatgcaaggaatgtatatgagactcggatcggcaagttcaatgtgccaaatgcgaagaccttagatcctgaaattaggcaatacagtgacctgccttcttggatagacaagcatgctgagcagctgcatgggaaatcaattcttatgtactgcacaggaggtatacgctgtgaaatggcatcagcttatattcgctcaaaaggtgaaggatttgagaacgtttttcagctatatggaggcattcagcggtatctggagcaattcccagatggtggctattttgaaggaaagaattttgtatttgaccacagaatatcagtgggaagccttaaggaaaacatactcggtgcatgtttgatatgtgattcttcttttgatgactattcgtcacgctgtcggtgtagccattgcagaatgttggtcttagtgtgcccaacatgtcaggattctactgaggaatatgcatgcgagctgtgccaaaagaatggaaaagaaccgtgccaactatcaacaggacaagactgcaaaatacagagaggactatctgaaagctttgaaaagccatccataagctatcacaatgtgacctccaaagtttcctggagtgatggtaaggtagcgagcaactgaaaaggttgaggatcctctgcttgcatggtttccgccagaacgcatccagttttaagggaagaacgtcagcactttccaagaagctgaagcatatcactgagcttgtctttgtcgacgcgcctcatgagctttcctttgtatatcaaccaatccggggacactgctccgacaaaccctcacctctgtctgttacaccgaaacggaaattcgcatggctcattgctccaaactcccactgcaaccctgaacaaaactggagggctgcagatgtgccgtttgaccctcttcagtaccagcaacaaaccgaaggcttcgaggaatcatacacctatcttgaaaatgcaatctctcacatggggaaatttgatggaatcctgggcttctctcagggcgctgccatggctgccttattctgcaggcagcagcagaagatgtgcggctttccaaagttcaggtttgggatgttctgctctggatatccagcacctgtgggcgattttggcaacgaaccaatcaagctcccctcgctccattgtttcggcaatggggatggtcatgataggcagatagcgaacagggcaagcgctgaacttgctggtttgttcgagcaggattgctgctccgttgttgagcatgatatgggccacataatccccacccggtcgccctacatcgatcggataaaggattttctttccagtttcctgtgaaatgttttgaactgactattgcgttgtaagttggtatacacaagttgggttctgaatggcattgactgtgtttgttggt

SEQ ID NO: 28092 - DNA, 2416 bp, Zea mays
  Clone ID: LIB4745-017-A6_FLI
ccgggatcgacaccttgaagcgtgctagggtttcccccgtcttatcgcttcctcgttcccgcagccgccgcccaaaccctagcaaacccgtcctccgccatggccgacgaccactactcgtccaagcggaagtacgacgacccctcgccgccgccgcggcgcacggggttctcttctggcccgccgcctgcctcgccgcccgctggcggcgccccgtcgtacaacagcgttgcgccgccccccgatgagatccagctcgcgaagcagcgtgcgcaggagatcgcggcgcggatctttaacgccgcagaggccaagcgccctcgcgtcgacaacggcgacgatgacgtcggcggcttcggtggaggaagttccctgggtggcagcggtggtggtggtggtggccgcatcgggggcgcaggacttggcttctcgtcctctgccggtggtgggcatggggcttctatcccaccgttatcttctcagagcagtgcaccacagtactcatatggtggacatcagggtacaagcaaaaagattgaaattccaaatggaagggttggtgttattattggaaaagctggggaaactattaggtatatccaacttcaatcaggagcaaagattcaagttacgagagaccatgaagctgaacctggtgcactgacaaggcaagttgagctttctggcaatcctgagcagataagcaaagctgaacagttgatcaaagaagttatagcagaggctgatgctgggtcatccggtgctgtatctggtggccggaaatacaatgcaccacagccaggcgctgagacattccagatgaaaattgctaataataaggtgggattgattattgggaagggtggtgagaccataaagtctatgcaggccaaatctggagcccgcattcaggttattcctttgcatctgcctgctggtgatacttcaactgaaagaactgtgcatattgatggcactcaagaacaaattgaacatgcaaagcagctggtggctgaggttaccagtgagaatcgtgccaggaatccaatgtctggtggctattctcagcagggctatcaccctcctcgtcctcagtcaaactggggcccgccttctgcgccaccccagcagtctggttatggttatatgcagcctggggcttatcctggggcaccgccacagtatggtgcacctcagcaaccttatggtagctatcccccaacatctggtggctatcagactgggtgggatcagtctcaaaaccagcaatctcatacaactccccctggtactgggtatgattattatagccagcagcagcaacctcaacaacaacaatctgcccctgggactgctgcttctactgatgccactagctacaattatggccagccttcaacatatgcttcacaaggatatgattctacctatactcagcatagtggtgggcagcaagcatatggacatgatggctactctggttaccagacccaaggccagcagcagggctactctcagcagactggttatgaccagcagggatatggtgcatctgcttatggatcagctgcgaacttgacccaggatgggtccagctatggtggtcctggtggggccacccaggcatctccggggcagcaaacttcaaccccagctgctggaagccaccctggctatgccagtcaaccgcctactagtgctgcagcaagctatccagttcaaggttcagctccatctggatatggtgctccaccaccccagcctggctatggcacccaacctccacagcaaggtggatatggtccgggcgcttatgggcagccttctccacacggcgagaaacctcctgcatcttcaccttatggacaagctccgcctcctggatctgctcagggtggttatgtgcagtatggttacagccaacctgcatacggtgcaccaccagcttaccctggtgcacccactgcaagccacccgggctatggccaacagcagtcttatggcgatgcttatggtagtggaagctatgggcagcctacagcctacactactgaagcagcagctcctgctgcatcccaggatcactctgccgcacctgccgcggcccctggaacaacagctgcgccagctcctgacaacaatgggggtgccaaaacttctgcggaaacttgatcttcaacagctaattgggaacaaactttttacaagcctctgttgtgtcgtttcctccactgttgcttaatattacacatctagtttaggctccacatctacaggttatatctttctgcctgttgttttgaccccatgaatcgctctttccgtgctgttgattagtactttgttgtttttttattgctggttagatgtttggactggtgatatatgtgtttgtgcggttactcttgttggactc

SEQ ID NO: 28093 - DNA, 2148 bp, Zea mays
  Clone ID: LIB4745-017-G10_FLI
agtaatcgagccgaaaccattacctgcctcgtccccttcctcccgtttcttcccttgcctccccctccccgtcgcgctgttcaacgttcaaacccttgcagctccctctcccttggtcgcgcagtcgccattcacgaccccgaccccgacccccgtccccctcccttaaatcccacctctccccgtctacgcctcattcgctccagctcgcatcccacagccaagccagttagcccgggagatctccaagaaaccatcttggaatccgagaacgcccagcattcttggtcggccaaggattcgaattccgacgaacggcttctacggccgaaaaaagtccgataatttccgcggggagctcaggaggtgtctcggtctcgggaaccggaggaggaggccgtgggggattgacgagggggcaagatggtgaggctgccgtacacaacggcgctgaccacgctgttcagctacggcctgctcttcgccttcggccagctcagggatttcttccgcaagttcgtcgactggttcaaggccaagaacgtcaaggggtacgcgccgatctgcctgggcctggaggatttctatgtgcgacgcctgtacttgcggatccaggattgctttggtaggccgatcgcaagtgcgccagattcatggtttgatgttgttgagcggacctcaaaggacaataacaagacactacagcgtacctcgaataccaccagatgcctcaacttgggctcctacaactaccttggctttgctgcagcagatgagtattgcacaccacgtgttattgagtctctcaagaaatactcagcaagtacctgcagtgttcgtgtcgatggcggtacgaccaagcttcacaatgagctggaggagttggctgcgcgttttgttggaaagcctgctgctatcctatttggcatgggttatgttacaaactctgccatcattccatgcctaattggaaagggtggactgataattagtgactctctgaatcataactcaattgttaatggcgcaagaggatccggtgcaactgttagggttttccagcataattcccctgctcatttggaagaggtcctgagagagcagatagctggtggtcaaccacggacacacaggccatggaagaagatcattgtcattgttgagggtatctatagcatggaaggggagctgtgtaaactccctgagattatagctgtcgccaagaaatacaaggcctacacatatctggatgaggcccatagcattggtgctgttgggcagtctggccgcggtgtttgtgagctccttggggttgacccagctgatgtagatataatgatgggtacttttaccaagtcttttggatcatgtggtggatatattgccgcatcaaaggagataattcagcaccttaagcatagttgtccggcccatctgtatgctacttccatgtcgccaccagcagtccaacaagttatttctgctattaaagttatccttggggaggatggctccaacagaggtgcccaaaaacttgctcgcatccgcgagaatagtaatttctttaggtcagagctcaagaagatgggttttgaggttcttggtgacaatgactctcctgtcatgcccataatgctctacaatccggctaagattcctgcattctctagggagtgccttagacaaaaggttgctgttgttactgttgcgtttcctgcgacacctcttcttcttgctagggcacgcatatgcatttctgcttcacatactagggaggacctgatgaaagcccttgatgttatcagcagagttggcgaccttgtgggcatcaaatacttccctgcagaaccaccaaagattgctggagctgatcatgataagctggagtaggaatcaacccttagttgccccatgagtgattgaagttgttagaatcccttggagttgtcaacaaatcattatggaaagaagcacatattgagccatttcatttggatcttgtcaatacacaagagtccaggatccgtcatattaagctgactactgtttgttgattgtacaactattcttccaattgtgtatagctggttgaaattcagttgttctgttgttaatccattcccaatatgtaatacaattagaggcaac

SEQ ID NO: 28094 - DNA, 2099 bp, Zea mays
  Clone ID: LIB4745-018-G4_FLI
ccggggcaccctctcactcatcgacccccgccgtagtagatggctagatgccaaaatcccaaatcccttgtgaacctcctaaacctaagcgatggcggtggcggcatcgccgtatttcctcttgctcttcctcttccattcattagctgcactcgcctccctcgcgccaccgccttctcagccaccaccgccgcgggtgcctcagaaagtgcaggtgtggcccaagccggtgtccatctcgtggccgttgccggcatacgcgccgatctccccgtcgttcaacatccgcgcctcgccgtcgcacccgtcgctccgtcacgccatcgcgtactacacccgcctcatccgcaccgagcggtacacgccgattatgccccccgtcaactacaccgtctcgggcgtccccatccgcctgctcgcgctctccgtctccgatcccgacgtcccgctcggccccggcgtcgacgagtcctacacgctctccgtgccacccaattccagctccgctgacatctctgccgccactccctggggcatcatccgcggtctcgagaccttctcccagctcgcctggagcagcggcgccgccgacgcgagcggccagccgatcgtccccagcgagatagaaatctccgaccaccccctattcacccaccgcgggatcctcctcgacaccgcacggaactactaccccgtccgtgacatcctccgcaccatccgcgccatggcctccaacaagctcaatgtattccactggcacatcaccgactcccagtccttccccatcgtcctcccctcggtccccaatctcgccaacttcggctcctactcccccgtcatgcgctacaccgaccaggacgtccgccgcatcgtccgatacgccggggcctttggcatccgcgtcatccctgaaatcgacatgcccgggcacacggggtcgtgggcgggcgcgtacccggagatcgtgacgtgcgcgaacaagttctgggcgccgacggcgaagccggcgctggcagcggagccctgcacggggcagctgaacccgctgaaccccaagacgtaccgcgtggcggaggacgtgctgcgcgacctggcggccttgttcccggacccgtacctccacgcgggcgccgacgaggtgaacacggcgtgctgggaggacgaccccgtggtgcggggcttcctggcggacggcggctcccacgaccgcctgctggagctgttcgtgaacgcgacgcggccgttcctagtccacgagctgaaccgcacgtcggtgtactgggaggacgtcctcctggggcccaaggtgtcggtcgggcagacggtgctgccccacgacaccaccgtgctgcagacgtggaacaacggcgccgagaacaccaagcgcatcgtggcggccgggtaccgcgccatcgtgtcctccgcgtcctactactacctggactgcgggcacggcggctgggtgggcaacgacagccggtacgacgtgcaggagaaggagcacgatggcatgccgctgttcaacgaccccggcggcacgggcgggtcgtggtgcgcgcccttcaagacgtggcagcgcatctacgactacgacatcttgcacgggctgacggaggacgaggcgaggcgggtgctgggcggcgaggtggcgctgtggtcggagcagtcggacgccgcggtgctggacggcaggctctggcccagggcctccgccgccgcggagacgctctggtccgggaacaaggggtccaacggcaggaagcggtacgccaacgcgacggtccggctgaacgagtggaggtaccgcatggtggcccgcggcatccgtgccgaaccgatccagccgctgtggtgcccgatgcacccgcgtatgtgcaacctctcgcagtagcagcctgaagcgcgacgcctttcgactttcttttagagatagctttgctgcttcctgcaagctgccatggacagaaactggatatgcagggagtcatacagggaggcggaactttgcaagaacagtcggtatcgatctacggatcaaggtccggatgaatcaagagaccagaataaaaccaaggcatcgccaatgtaccatggccatc

SEQ ID NO: 28095 - DNA, 850 bp, Zea mays
  Clone ID: LIB4746-001-H3_FLI
ccgggagtcacgccgccccgccgccgccccctatataaattaatgagccaagcccgagttaaccaaattaaagaaaaaggaaattttcttgggcgttcttcggcttcattgtcacaaggttcgagttcgtcaccgtctagtacgactgtgcgagggaggaagaggcgaggagaagatgcagatcttcgtgaagaccctgacggggaagaccatcaccctcgaggtggagagcagcgacaccgtcgacaacgtcaaggccaaaatccaggacaaggaagggattcccccagatcaacagcgactgatattcgctggcaagcagctggaggatggacgcacgctggctgactacaacatccaaaaggagtcaactcttcatttggtcctcaggcttaggggtggaaccatgatcaaggtcaaaactctcactgggaaagagatcgagatcgacattgaacccactgactcgattgacaggatcaaggagcgtgttgaagagaaagaaggcattcctcccgtgcagcaaaggctcatctatgctggtaagcagcttgctgatgacaagaccgcaaaggactacaacatcgagggtggatctgtcctccatcttgtccttgctctgaggggtggttactagtctaaacctgatgaactagcagtcagataaactgttgtgttggctgcgaaatgtgcaggcctgatgttgaacttgcaaggagataataacaaattatcagctttgcgcctgtgcccagtggaaggggctgtcttccaagttattgtctgatatggaattgttccagattatcatgtctcggcgtttacccattattattatttgatttgaacc

SEQ ID NO: 28096 - DNA, 644 bp, Zea mays
  Clone ID: LIB4746-002-E8_FLI
ccgggagccccctaactgcaccggccgccacaccaccccgaccggaccctccacaacaatggccaccgtcctgggcagcccccgcgcgccggccttcttcttttcgtcgtcctccctccgcgccgcgccggcgcctaccgccgtggcgctgcctgcggccaaggtgggcatcatgggccgtagcgccagcagcaggcgcaggctgcgcgcgcaggccacctacaacgtgaagctgatcacgccagagggggaggtggagctgcaggtgcccgacgacgtgtacatcctggaccaggccgaggaggacggcatcgacctgccctactcctgccgcgcggggtcctgctcctcgtgcgccggcaaggtcgtctccggctccgtggaccagtccgaccagagctacctcgacgacggccagatcgccgccggctgggtgctcacctgccacgcctaccccacctctgacgtcgtcatcgagacgcacaaggaggaggagctcaccggcgcataatcattcatgcccatctatgtctatcactatctctgtgggtcgttgtgtgtaatttgagtacgcgcgtacacgtactgtactgcttttgtttcatttgagagcactgttcatgtaagcgtggagttgccctgcc

SEQ ID NO: 28097 - DNA, 956 bp, Zea mays
  Clone ID: LIB4746-002-G8_FLI
ttttccaccaactctacaagagctcccgcgatccagtcaagtgccctataaaatccagccccgcttggcttcacccacccttgggctcgcaatcgcagcaacgatggggagatcgccgtgctgcgagaaggcgcacacgaacaagggcgcgtggaccaaggaggaggacgaccgtctggtggcgtacatcaaggcgcacggcgaagggtgctggcgctcccttcccaaggccgccggacttgtgcgctgcggcaagagctgccgcctccggtggatcaactacctgcggcccgacctcaagcgcggcaacttcacggaggaggaggacgagctcatcatcaagctccacagcctactcggcaacaaatggtccctgatcgctggaaggctgccgggcaggaccgacaacgagatcaagaactactggaacacgcacatccggcggaagctgctgagcagggggatcgacccggtgacacaccgccccatcaacgagcacacgtccaacataaccatatcgttcgaggactggggccaggggaaggcgctcaagtgccccgacctgaacctggacctctgcatcagcccgccgtgccaggaggaggaggaggccatgctgctgaggccggtgaagcggggggaggccgggctctgcttcagctgcagcctggggctccccaagagcgcggactgcaagtgcagcaacttcctcgggctcaggaccgccatgctcgacttcagaagactcgagatgaaatgagagcttcaatccatctgtctgtctgtctctgtaacttcacccctgataatacgcaggagtagtagtcaccaactgatttgtcgctccattaattctgtctctctctctctctctctcgctatgtaaattagcatcaccaactgattgattgatcatgggcaattaataatacttgttgctgctgcaaattgacatt

SEQ ID NO: 28098 - DNA, 1138 bp, Zea mays
  Clone ID: LIB4746-003-C8_FLI
ctcgaggccggcctacggcaacaagaagttcgagacgctgtcgtacctgccgccgctgtcgacggacgacctgctgaagcaggtggactacctgctgcgcaacggctggataccctgcctcgagttcagcaaggtcggcttcgtgtaccgcgagaactccacctccccgtgctactacgacggccgctactggaccatgtggaagctgcccatgaagtcagttgaggagttgagttccgctccgccacaccaaaaagaaacaaaagcctacggcgatcgatcgagaagctggtcatcgtcaggatgtcatcgccgcagtcagcagcgccgcccgtgaagctgatcacggcgttcggcagcccgttcgcccaccgcgtggaggtggcgctcgctctcaagggggtgccgtacgagctggtcgtggaggacctagccaacaagagcgagctgctgctcacgcacaacccagtccaccagtcggtccctgtcctcctccacggtgaccgcgctgtctgcgagtccctcgtcatcgtcgagtacgtcgacgagaccttccaccatggcgcggcgccggggatcctcccggccgacccctacgaccgcgccaccgcccgcttctgggctgacttcatcgacaacaagtgcttgaagccgatgtggctgtcgatgtggacggacggcgaggcgcaggcgcggttcgtcagggagacgaaggagagcctgggggtgctggacgcgcaactccaggggaagaggttcttcgccggcgacgcgctcggcttcgtcgacctcgccgcctgcacgctggctcactggctaggcgtgctggaggaagtggccggagtgcacctgatagcggcggacggcgagtaccccgctctgcgccgctgggccaaggagtacgtctccgatgaggtcgtgagccggtcgctgccggacagggacgagctcgtcgccttcttcaccgccagcaaggagaggtacaagtcgtgggtcagggcagaggtggagcgacattgatcgctaaaaatgacgctggttgttgaactctgtacgttctcttgtagtcgaataatgtgtggatcgttatgtacgtatttcatcgtgttatatacatctaataagacatgcaagctct

SEQ ID NO: 28099 - DNA, 886 bp, Zea mays
  Clone ID: LIB4746-004-D2_FLI
tcgaggccggccgggaaccgcagtcccgctccttccctgccgctgccccgtctgtctccaactccgaatatgtcgtcctcgcccctccccaccacctccggcggggctcacatcttcccgtctccgcctcgaccgcgccaccgccggtgctgccaagtaatcgtcgccgccgccgcttcgccccgttcctacggcgtcggtcgccgcgccgtctccctagccggcgtcgccgcctggcttgccactatcgtaggccgggcagacgcggccagtccatttgacaagtacgtcaagaggaagaagctggagcctttggagacctacgttccggctgtcctgctgaccattgaccaattcgttgatctagagaaatccttagaatttgagaaaccaaggtatgacgagagcagatcattacttcgctctggaccggcatcatctttaagagtcaacattcgggcagtggcacaatatgcttctagtaatggtcaaggcaaggctgcatcagatgctgtggacgagtgcttacgagcactcgaagatctcgactcactactactacatgcatcacggaatgatccgtcagcatccgttgaaaccatgaggagcaagatcagtgttgcccttgcagcattagacaatctcttgcaaacggtgccatctgcagtactggataaaggaaaggcgattgctgatgcataccgaactccagtagatgattatgtagaggaaaatgctgccgagttggatcccaggctgaaacagttggagggtattctttaaggctgaattttgttaggttctatttctatatcatgtatacctgtttggattactaaattcctcgaactgtacatcccaatttataattcgtttgatttttttt

SEQ ID NO: 28100 - DNA, 791 bp, Zea mays
  Clone ID: LIB4746-004-F4_FLI
ccgggggcgcacctatcgcctctcccgcggcccgcccacccccatggagtcgtggcggaggcggacgcttctcaaggtcatcgtcctcggcgacagcggggtcggcaagacgtcgctgatgaatcaatacgtgagcaagaagttcagccagcagtacaaggcgacgatcggtgccgatttcctcaccaaggaggtgctcattggcgacaggctcgtcaccttgcagatatgggacacggcgggacaggagaggttccagagtcttggcgtggcgttctacaggggtgccgattgctgtgtgctggtttatgatgtcaatgtcaagagaagctttaatacgcttgatacctggcatgatgagttcctcaatcaagctggcccatcagatcctcagcgctttccgttcattttggtcgggaacaagattgatttagatggcgggaacaaacggatggttccagagaagaaagcgagggaatggtgcgcctccaagggcgatattccatacttcgagacctctgcgaaggaggaccacaacgtcgacactgctttcctatgcatcgccaggctcgccttggagcatgagcatgaccaagacatttacttcaagacagttgcggaacaagtcccggatactgaacagacaagcggatgtgcttgctaggagtcagccatttcctggaaggctggatgttactgtatacaataagctcacagacctgatgacagctgtttaacaagcttttgtgatagccattcttaattgtaattatggcatcaggggttgtgat

SEQ ID NO: 28101 - DNA, 1303 bp, Zea mays
  Clone ID: LIB4746-005-A10_FLI
ccgggagcctcactcctgctcacccaccggcaccgcatcctcgccgcccggaccctctctgtctctgtctccgccgcggcgggctcctcctccatccccgtcaagatgactgcgcggtcggcgctggacgaggtcaccgacacgggcgccttcgaccggtcgccgtccaccttccggagctccgtttccagggacgggcggttccccgccgtggcggggcggtaccacctctacgtctcgtacgcgtgcccctgggcgtcccggtgcctcgccttcctcaagctcaagggcctcgaccacgccatcggcgtcacggccgtgaagcctatcttcgagcggaccaaggagagcgacgagcatctgggctgggtgttccccgccgccgccgacgaggagcccggcgccgagcccgaccctctcaacggcgcccggagcgtgagggagctatacgagatcgccagctccaactacgccgggaagccaaccgtccccgtgctgtgggacaagcagctgaagacggtggtgaacaacgagagctccgagatcatccggatgctcaacgccgagttcaacggcatcgccaggaaccccgggctggacctctacccggcccacctccgggcctccatcgacgaggccaacgagctggtctacgacgccatcaacaacggcgtctacaagtgcggcttcgccaagaagcaggggccgtacgacgaggccgtgacgagattgtacgaggctctggacagatgcgaggagattcttggcaagcggcgctatatttgtggcgaccagctgactgaggcggacattcgcctgttcgtgactctcattcggttcgatgaggtctacgccgttcacttcaagtgcaacaagaagctgctgagggagtacccaaacctgttcaactacaccaaggacatataccagatccccggcatcagcagcaccgtcaacatggaacacatcaggaagcactactacggaagccatccgtccataaacccatacgggattatccccgctggacccaacatcgactacaatgccccacatgacagggagaggttcagcgcctgactgcgcgtggggccttgttgcttcctttctctctctctctctctctcttttctgcaggagccgtgtgcagtgttgttgtgcttcatgagggtcttgtgcttggccgtgtcagaggctgcaagaatccctactgtactttttttcttcttctgagcagttgaagatggaagacaaggttttatttcgcacagataaataaaaggtacaaagggtcgtcgatttt

SEQ ID NO: 28102 - DNA, 649 bp, Zea mays
  Clone ID: LIB4746-005-B3_FLI
ccgggacctgcagccaaccatctaccagcgactcagcgagcgagagcagcacacacgcagctagctaggagcagcagcagcggcgatggcggcctccatgatctcctcgtcagctctggcggtggcgcctcagggcctgccgcccctcggccgccgcgcctcctccttcgccgtcgtctgctccaagaagaagatcaagaccgacaagccctacgggattgggggtggcctgaccgtcgacgtcgacgccaacgggagaaagggcaagggcaagggcgtgtaccagttcgtcgacaagtacggcgcgaacgtcgacggatacagcccaatctacaacgaggatgactggtctcccaccggcgacgtctacgtcggtggaaccactgggcttctgatctgggccgtcaccctcgctgggatcctcggcggcggcgccctcctcgtctacaacaccagcgccctctccggctaaggatatccaatgcatgcgcttcttgcgattcgtcatgtaaaatcagggtgtctgtctataatctagccaccatggatgatgctcaaccttcgtcatgtaacaataatcagtgctactcttcattacataattttgatgctatatatatatatataccccctccctgaaggcaacctg

SEQ ID NO: 28103 - DNA, 1807 bp, Zea mays
  Clone ID: LIB4746-005-C3_FLI
tcgtccgcggcgccgctgcgccttgtgatcttcccgtggctcgggttcggccacctgctcccgtacctggagctcgcggagcggctggcgctgcggggccaccgcgtgtccttcgtctccacgccgggcaacgtcgcccgcctcccgccgctgcgccccgccgccgcgccgcgcgtcgacatcgtggcgctcccgctcccgcgcgtcgacggcctccccgacggcgccgagtccaccaacagcgtcccccacgacaagttcgagctgctgttcaaggccttcgacggcctcgccgcgcccttcgcggagttcttgggcgggtgctgcgccgacgagggcaggaggcctgactgggtcgtcctcgactccttccactactgggccgccaccgccgccgtcgagcacaaggttcgtccgcagtccgcagttccgcacaccaaacgaaaactggttactagcgttgtttgttttttctgagaacatatcaatgcacatgaaattttagtgcacattaaatcatcaccactcattttagatttaatgtatgtagttgtttgatatatttgctaagaacactctccgacgtggtggatgtagtgatagaaagtgttatttgtaaattacaatgataaccagagacgttagatctaatatggataattgtgatttaatatatatgtgcaacatgtgtacaaagattagcttggcttgtcaccaggtgccatgcgcgatgctgctcccgagcgccgcgtgcctggccgtgggcagggaacggcagtcctcgagcggcaagccggccgctgcaccccgttacgagtcggagcagaacaaacagtattccgccaaggatggcgcatccggtgtgtccatcgccgagcgctacttcttgacacgcgagaggtgcacgatcatggccatacgaagcagccacgagtgggaaccggagttcctgccgctggtggcgccgctcgtcggcaagccggttctgcccctcggcctgcttccgccgtcacccgacggagggcgtggcgccagcgccaacgcgaacggggagcacgccaccgtacggtggctggacgcgcaaccaccgagctcggtgctgtacgtggcgctggggagcgaggtgccgctgcgcgcggagcaggtgcacgagctggcgctggggctggagctcgccgggacgggcttcctctgggctttgcggaaccctagcggcgtccccgacgcggacgtccttccggccgggttccaagaacgcacccgcggccgtgggctggtgaccacggggtgggttcctcagcccagcgtactggcgcacgccgccgtgggcgggttcttgacgcactgcggacggaactcgctcatcgaagggctcctgtacggccgccctctcgtcatgctgcccatcttcggggaccagggcccgaacgcgcgcctcatggagggaaagaaggtggggttgcaggtgcccagggatgagcacgacggctctttcgaccgccatggcgtggccggcgcggcccgggccgtcatgctagaggaggaaaccaggggtgtctttgtcgcaaatgctctcaaggtgcaagcgattgtagctgataaggaacttcaagacaggtacgtggatgaatttatacagcaactactaataagagggaggccatgccctgcctccagctgagactgccgtgcagggtttgtaactttcccactggggtttgttcggttagctctcaatccatgtggattgagtgagattagatgagtttgaatcccaaacaagtaaaacttctttttaattttttct

SEQ ID NO: 28104 - DNA, 1532 bp, Zea mays
  Clone ID: LIB4746-005-E8_FLI
ccgggacaactctcacacagagaccacccacctgcgctgcgcctcggttttacggcccttccctcaccgccccgcgcgagcgaagccatgaagcttgaggtcatgccgaagcagcgggtgctggaggcggagcagagggaggaggccatggagatgagtggcctggacctgtggaagcacgagaagcccccaaggatctgctccttgcccccgccgctcccggcgccgccagcgtgcgacgaggcggcgctcgtgccgccgctcaacttcgccatggtcgacgacggcatattccgctccggcttcccggagaccgccaatttccggttcctcaagtccctcaacctccgctccatcgtgtacctgtgcccggagccgtacccagagacgaacacggagttcctcgagaagaacgggatcaggctccaccagttcggaatcgaggggcgaaaggtaagaaaaacttggtttcaacgaaatcctctgctgcttcgtggttggttagcgatagttcatggaggcgtagaattacttttggagggattaaaatatggtttgctttcggtaacttccatgatgtacggcttgtttgccccgagccgacgctgctgatcatatgtcgtctcgtgtatcctaatttaattagtatttagtactagctgcgcttccgctgactatgtttggggagagttccagtgctttgctcaatgaaatttatttgttattgtacctgacttgcctgaaacgcagtgttatctagagaatttttcaaaattcacggcgaatcggtagtggtccctttcagcattgctttcattaatcaagacagctgtgttgctgatttagaacattttttccccaatattctcaagtgtttttttattgttgcgttcctctgaatacaagcctaccaccaccagcgtgtacgcatcaccgcttttggcttggagcatctccatgtgttgcctttatttcttttttttgtgattttcccttattttggctccatgctatgttttctttcgctgtttctgcaaattaggtaaatcatgcaattactttgagtcgttcagttaatagtaccttttattacaactcccgtcatgttctactgtttgtatcctgtacttcgtagatgtttgctagatttctttttatgggcagtttcattggtttcagaggaaacaagcaattcttgctggcactatgttttcttttctccagtttgtgatgtttcttttgattgtgcatttgtgctgacagttatactgaacttggtaactttatcatatttttgcactctaaaatccgtcaatcattccgttgtttcagcaccttgagctgttcagcttccttctgtgtttggcagcctaatcaattatggggagatatctatgtggtaatggctgtgtcaaacagcatacacgatttttttagaaatgtaaccgatttatctttatgagtttgtgagaaaagctgcaagatattcctgtaacttcagcaatgacgtctgaggataatgaatgcacgag

SEQ ID NO: 28105 - DNA, 854 bp, Zea mays
  Clone ID: LIB4746-005-F3_FLI
ctcgaggccggccgggtgacaccacgcaccacctcaccagatctttcttcctgttgcttcctcggctggtttccttctctcgccgcgtcgcctgcttcttcccccaaccaaagacacgaatcagccatggcgctcgcctccgccacgtcccgccccctcctcggtcgccccgccggcaccgcgcggccccacctcgccgtttcctcatcctcccccgcctcctcgatccgcttcccccgcggcgccgacggcggcgccagcagagcggccgtctctctccgcgcccccacgcctccagcggcggcaacagcaacatctggtagcattgctccagcaatttcattgactgaaaaggccttgaaacatctgaaccaaatgagagctgaacggaatgaagttttgtgcttgagaattggagtgaaacagggtggatgctcaggcatgtcttacaccatggaatttgaaaatcgagagaatgccagccctgatgattctgttgtagagtatgatggttttgcaatagtctgtgaccccaaaagccttcttttcatgtttggaatggagctggactacagcgacgccctcattggtggcggcttcttgttccagaatccaaacgcaacaaaaacctgtgggtgcggcaaatctttcgcgactggaaaggagaccgaggccgcggcaaccacttgcaacaactagggtagagaaatattgttagctaaacgtgatgtggcatgttgtatagcttgctcatgttgaagccctgtggctacaccacagatacataaagaggcatagttcaaaggaattacaccattaccaatggcctaattcagattttcttgtttggtgat

SEQ ID NO: 28106 - DNA, 1524 bp, Zea mays
  Clone ID: LIB4746-007-B12_FLI
ccggggaccgccttttttccattcagttgtgaaaacatggccaccacgctccgccagcgcaccgcacccgcgacccaatcgaagaaggagcgacgagacagcgatgtcctttcgacttcctccgacgaggacacgtcgccggtttcgcacctcgaaaacaccttccctcctttcgaagtgcccaacttcaccactaaggaagtccttggagctattccggccgaatgctttgagcgatcagccgccatcagcttcgcatatgtcgcccgcgatttcgccttcgtcgccgctctcggttacgccgcttcatttatcgagcccgcgctcggctcgaacggtcacgtcctaaacggatgggccggattcgctgccaaatgggccgcgtgggccgcttactggaccgttcaaggttgggtcatgaccggtatctggatccttggtcacgaatgtggtcaccaagcgttctcgacctcgaagactctcaacaacaccgtcggactcttcctccactccttcgtcctcgtcccttaccactcgtggcgtatctcgcacgccaagcaccacgccgcgaccgggcacttgacccgcgatgaggtcttcgttccccgcaccctttcggaacgcaagttcaaggagaaccccaagaaggtcgaagtcgcacccggaatcgttctcgacgagctcctcgaagacgcgcccatctaccgtctcgggtggctcatcgtccagcaactcttcggctggcccgcataccttttcacgaacgcttctggtcaactttcgtaccccgcgtggaccaaccacttcgaccccaagtccctcatctttgatgctcgtcaccgcgccgatgtgctcatcacggacgctttcctcatcggcatgttgaccctcctcacccttttcggtcaaaaggttggaggcttcggagaggtcgtcaagtactacggtatcccttacctcgcagttaatcactggttggtttgcattacttacctccaacacacggacccgtcgctccctcactacgacgctaccgagtggaatttcgtccgcggagcactttgcaccatggaccgaaacctcctcggacccgtcggtccctacctcatgcacggtatctgcgagacccacgtcgcccaccacctttgcagtcgtatcccccaccacaacgcctacgccgcgactgaggccttgaaaaagttcttgggtccccattacgcctccaccgacgaaagcatgtttgtttccttgtggaagtcctacaagcaatgccgctacgtcgatgacgagggttcggtccgcatgtaccgtgacgcttacggtcgagctcgtcgaacggtcgcccccgtcgaggttccctcggactcgggtgtcgacttcgagtagattcccccgtcttttctatggctattcagttcgttacccgtagactcttcctagactttatcccatcagtggcctgtccgtcacgccttccttcaccactctcattatttactctgcaaaacccagtcgttctttccc

SEQ ID NO: 28107 - DNA, 1153 bp, Zea mays
  Clone ID: LIB4746-007-C8_FLI
ccgggcccgaaggttctaggctcgattgaacaaattggagcggcactacactcctccacgcctccacctccagcctcccactgatctggcctctctcgaggaatctatggattcgatgtgaagtcccaaagggtagcttttagggagggggaatgatgagatgttggaagttcacaagttgtgtctttcttaaaggctggtaaccttaatcctagatcaatatgagaaggggctatagttacagtccttcaccaccaaggggctacaggagaagggcgcgcagtccaagtcctcatgatcattatggtggtcgtggtagggatctcccaaccagtcttctggtcaggaatctccgtcgggactgcaggccagaagacctccgtcgcccatttggacagtttggtcgagttaaagatatatatcttccaagagattattacactggggatccccgagggtttgggtttgtccagtattatgatcctgctgatgctgctgatgcgaagtactatatggatgggcaggtagttcttggtaggcaaataacagttgtttttgcagaagagaacagaaagaagcctcaagagatgagagctagggacagagtcaggggtcattcttatgatgacaggaggtattctcgctctaggtcccctcgttattataggggccgctctccttcacgcagccaaagctactcgaggtctccacctcagaatccaagacacagacttagagagaggtcctactccggctcacctgtggacagcagatcaagaagtgggagcccttatgaggatggatatcgcagatcatcacggagagagaggtctctttctgttagcggatgaagcagttttacggtctagagctattgctgtggatctgcgcatggtggcctacttgctatgtctttctgaaccatatatgttctgtctagattatcattcccagtaccagagaagtatcgtgagactgtttgctgtactttctagtcttgaggatacagaagggggtcaccgattctctcagtagatggactaatgaccactagctacgccagttccactgctttgtgtatttataggcagctttgtggtttgaataaaattatttgcatcgtgaaagctaattggtaaaaagactgaatcac

SEQ ID NO: 28108 - DNA, 1103 bp, Zea mays
  Clone ID: LIB4746-007-F3_FLI
ctcgaggccggccggggtcacactactcagccagcccgctctatctctttcctctatccaagccagaaaggtagaaaccccccggaaacaatttccggccatggcgaccgcagcccaccaggttgccgccaccttcctctcgttcctttcctcctccactcaccacctcgccccttcctccgtctccctcgggacaacctctgtcctacccgtctcccttcgggccgctggcacacgtggcccacggctcgcctaccgcctccggggccgccgcgtcggtgccgccgtcgcccagctccccaccacgcatccagaggtagtttctggggagaagaagatcagatggtcatcaagggctgtgcggtcttttgcgatggcagagctggaggcccggaagatgaggtaccctacgacaggcactgaggggctcctcatgggcattcttgttgaaggaactagtggtgcagcaaaacttttgcgggctaatggaatcacacttctcaaagtgcgtgaggaggcagcgaatgtgcttgggaaatcagaaatgttttactttagtcccatgcatccaccattgacagaagctgcacagcgagcccttgattgggctgtcaatgaaaaattgaaatcaggtgaggatggagaagtaaatgccaatcatttgctactggggatatggtcagatgacgagtcagctggtcataaaatcctgtattcgctcggatttgacgatgtgaaagccagtttactggccaaaacggctgacgaggaggctgcaatgagtcctagatagcaaagggagcacctaatctgttattcaacttacaagagatgtgttagggtcaacttacaagcgattgccatgccggtgcctgtaaaaacgttgcggtttgtttgccacggtgaatgcttgtgttcctttctcagctggatttgtgatcagctcatagaaaaagaaaaaaaacttgtagggtccagtgggcctgacgagcccttcaaattttttgttcaatttgcagcctgaatcctaacaggcgagaatttcatgtgaactgtgatattacacagaactcttagtttctagagactaattttagtccttg

SEQ ID NO: 28109 - DNA, 627 bp, Zea mays
  Clone ID: LIB4746-008-H5_FLI
ccgggacctgcagccaaccatctaccagcgactcagcgagcgagagcagcacacacgcagctagctaggagcagcagcagcagcggcgatggcggcctccatgatctcctcgtcagctctggcggtggcgcctcagggcctgccgcccctcggccgccgcgcctcctccttcgccgtcgtctgctccaagaagaagatcaagaccgacaagccctacgggattgggggtggcctgaccgtcgacgtcgacgccaacgggagaaagggcaagggcaagggcgtgtaccagttcgtcgacaagtacggcgcgaacgtcgacggatacagcccaatctacaacgaggatgactggtctcccaccggcgacgtctacgtcggtggaaccactgggcttctgatctgggccgtcaccctcgctgggatcctcggcggcggcgccctcctcgtctacaacaccagcgccctctccggctaaggatatccaatgcatgtgcttcttgcgattcgtcatgtaaaatcagggtgtctgtctataatctagccaccatggatgatgctcaaccttcgtcatgtaacaataatcagtgctactcttcattacataattttgatgctatatatatatat

SEQ ID NO: 28110 - DNA, 1067 bp, Zea mays
  Clone ID: LIB4746-009-A6_FLI
ccccggccgcctccgatctcagctctccgttacacgcaaacgcaagctcccaagcagctaccaaccagccgggagagggagcgcacgcactgcgagaatggccacggccggcggaggggccgggcatctgaagctgctgggcgcgtggccgagccccttcgtgaaccgtgtacgcatggcgctgcacctcaaggggctggagtacgagaacgtggaggaggacctcaccaacaagagcgacctgctcctcgcctccaaccccgtccacaagctcgttcccgtcctcctccacggcgacaagcccatctccgagtcactcgtcatcgtggagtacctcgacgacgccttccccggcgctggccaggccgtcctccccgccgacccctatgaacgcgccgtcgctcgcttctgggccaaatacgtcgacggcaagttgcacggcatgatggtgaaggcgctcatgggggcaacggaggaggagagggcgacggcgacggtggacgcgctggccgctatggacacgctggagggcgcgttcgccgagtgctccggcgggaaaaagttcttcgccggcgacgcgcccgggtacctggacgtcgcgctgggaggcttcatcggctggctgcgcgcctgggacaaggtggggggcgtcaagctgctggacgccggccgggtcccgcgcctggccacgtgggcggagcgcttcgccgcgctcgacgtagccaaggaggtcatcccggaccccgaccacatcgccgagtttgccaaggtgctgcaggcacgctccgcggcagctgccaccagcaactgagctcgcaagtgaatgctgctgctctgccttcctgataaaatcatatcatggtacccggtttgttcgtttaatctggcgcggaaaaaacatggtttgttgtcgtaccaaactaagagtatgcatgcatgcttgttcttaattatatgtacattcgttcaagaaaaaacagattgttcatgtaacggttaggacttgctgtatatccatatgttgttgtttggttcctgcacaacttaattaagatgcgcagtttagg

SEQ ID NO: 28111 - DNA, 1686 bp, Zea mays
  Clone ID: LIB4746-009-F7_FLI
ctcgaggccggccgggactcgatcctccgtcttatcaccggtgaggtactgaggtgagacgatctccgccaccatggcctccagcacctccctctccctttgcttgcacgcctcgtcgccctcgtcctcgtctcctggactccgccgaccctccctcgcctcctcctcgtcctccaggtccgagagaacgcgcaagatcagggccaaggcggtcagggaggactggaggcagaaatccaagcccatccctcctggcgccgtctaccctgccaaggaccactgcagccgttgtgggctctgcgacacatactacgttgcgcgtgtcaagactgcctgtgccttcctgggagacggcatgtcccgtgtcgaggatcttgagcgacaagtccacgggagaggccggaaggaaggcatggatgaaatgtactttggagtctatgaccaactcttgtatgccaggaagaccgaacctgttgaaggagcccagtggacgggaatagtgacaacaatcgctgtcgagatgctgaaagcaaacatggttgatgctgtggtttgtgtacaaagtgatcctgacgacaggcttgctccaagacctgttttggccaggacaccagacgaagtaattgcagccaaaggtgtgaagccaacattatcaccaaatctcaatacacttgccttagtcgaggcagctggtgtaaagcggcttcttttctgcggtgtgggctgtcaagtgcaagctttgagatctgtagaaaagtaccttggtttggaaaagctttatgtgcttggaacaaactgtgttgacaatggtacgcgtgaagggcttgataaattcttgaaagcggcaagcagtgagccagaaactgttatgcattatgaatttatgcaagactataaggtgcatctaaagcatttagatgggcacattgaagaggttccttatttttgcctgccagcaaacgacctggtagatgttattgcaccgtcatgctatagctgctttgactacacaaatggcttggcggatttagtggtggggtatatgggagtaccgaaatatgctggggtctccatgacacagcatcctcagtacattacagtcaggaacgatcgtggacaggagatgctgaacctggtagctggccttctggaaagcacacctacaattagcagtggctccaggcaaccgtttgttatggagacagtgaaagctgacgatgccgcaaaactggggaaaggcccttcgaaaccagctcctagattcgtcggcgacattctggccttcctgctgaacttggttggacccaagggtctggagttcgcgcgctactctctggactatcacaccattcggaattatctgcatgttaggcgggcatggggaaagcaaagagctgagcagcacatcccggggtatgccaagaagatcgtggaggcctacgacaaggacggacggattgaggcaatggttacgcagtcaggtgactgactcacaccattcacactctactagctggtagtatttgtactgcattgtagtaaagattaaggaatgtagaagcattgtttgtaatgtgacgtagtggccatgtatacagtagaatgtataggctgcatggcagcagctcagatctgtatgtacatcctgcgcttgccagtttctagtttgcatttgcttttctgggc

SEQ ID NO: 28112 - DNA, 1704 bp, Zea mays
  Clone ID: LIB4746-010-A4_FLI
ccgggagcaagtagtgtcgaacgagagccacatcccgctctccacccgggcgcgcgtgtcctccgtttcgccatgtccaactccaagcagcatcccagcccccgaggcgccggcaaagcgcccaccgcttaacaagtacgccctcgcctgcgccgtcctcgcttccatgaactccatcctccttggctacgatgtgtcggtgatgagcggagcgcagctattcatgaagcaggacctcaagatcacggacacgcagatcgagatcctcgccggcatcatcaatatctactcgctcgtcggctcgctcgcggcgggccggacgtccgactggctcggccggcggtacaccatggtgctcgcggcggccatcttcttcgcgggcgcgctcatcatgggcctcgccccgagctacgcgatcctcatgcttggccgcttcgtggcgggcgtcggcgtcggatacgcgctcatgatcgcacccgtgtacacggccgaggtctcgcccacgtcggcgcgcggcctgctcacgtccttcccggaggtgttcatcaacacgggggtgctcctcgggtatgtctccaactacgccttccacggcctccccgtgcacctcagctggcgcgtcatgttcctcgtcggcgccgtcccgcctatcttcctcgcactgggggtcctcgccatgccggagtcgccgcggtggctcgtcatgcaggggcgcatcggcgacgcgcgccgcgtgctggccaagacctccaactcccccgccgaggccgaggagcggctcgccgacatcaagaatgccatcggcgtcccagacggcgtcggcgacaacgacgacgacgtggtggtggtcgcccgcaggaacaagggcagccatggcgaaggggtgtggagggacctcctcatccgcccgacgccgcccgtccgccgcatactcatcgcctgcctcggcctccagttcttccagcaggcctccggcatcgactccgtggtgctgtacagcccgcgggtgttcgagaaggctgggcttaggtcgaacaacaactctttgggcgccaccatggcggtgggcgcgaccaagacgctgttcatcctggtggccacgttcttcctcgaccgcgtcgggcggagaccgctgctgctcacaagcgcgggcgggatggtggtgtcgctggtgacgctggcctcggcgttgcgcgccatcgaccggctcccagagggacaggcgacgtcgctggcgggcgtgagcatcgcggcggttctcacgttcgtggcgtccttctccatcggcatgggcccgatcgcgtgggtgtacagctcggagatattcccactgcggctccgcgcgcagggctgcgcactcggcacggcgatgaaccgggtcatgagcggcaccatcaccatgtccttcatctcgctctacaaggccatcaccttcgccgggagcttctacttgtatgcaggcattgctgctgccgggtggctgttcatgttcttcttcctgccggagacgaggggcagcaacctagaggacaccgagaagctcttcggcggtggcgaccacgacgaggacaaggaagatggacacgatgcgcagaagtccactgagttgagtagtaaccaacagtgaccttatctgtatctgatagtatgtacgctagtaaaaaaaacagacttttttttacttagatcactgcactttaaagc

SEQ ID NO: 28113 - DNA, 1224 bp, Zea mays
  Clone ID: LIB4746-010-D4_FLI
ccgggacaagataacgcagccaagaacaagagacaccgccgagcgagcgagcgaggcggggagaagcaggtccaggaccaggagaaaggaaaggaagcccagctctctctagcctggagccgagaagccgagggagcgagggagcagcaataaggcatggaggagcccgttccggctgatccccccaggattttctggaagtcaaggagatcaggttcagccaatggccggagcctgcaacaagagcctgacaaagacgctaccgaggaaactaacgagcaggctcaagaggaacccatgaagaccgacgacgcaacggacacagcagcagctacagctgagccgtacccgaaagctaacttatccgagaagcggaaggctctcttcgagcctctcgagccgatcaacggcaagcgcggcgctgccgagacgctgctcccaccgccggactttgagcccgcgtcgtaccccaaggggtggctggtgggcaagaaacgcaagctcgtcaacgtagacgtcgtggagagcatgcggaggatcgcgatccaggaaatgaacagaaaggttcatgcgtaatcacatctttctagtggtcatgcaatgctgtttcttcactcgcaaatgcatcgatgtgttcagtccaggcagttttgttgctgaacatgcatgcgtgcatcaaatgctgaccaatgttgttgctgtggacatggtgtggcacgcaggaccgtgagatcaatgggctgaacgagcagctagaggaagactcccgcgtgctggagcttctgcagaagcagctggctgacgagcgcaggaagcggacagagatcgagaaggagaactccatgctccatgagcaggtcaccatgctgatgaacatgctcgacgagaacgagggtttcgacgaggacggagaggccccgccgcccgattccttcgattaagcgttgttacagtactatatccgttttctttttccgtcagtgtgaaatcatacgtctctaggtgctggtttcagagtatccgagagatatgtgctagctgtgtagtaggatttcattggtgatcgtattccattacattacatggctttggcttctgtagataaagggtgcattgcatgtctgttgtaccgtactgtacctactccttttctaggcttcaaaagtgtatgtgagaaactagcaacatgttatatttgaatcgaagtgtatgtacatgttacgt

SEQ ID NO: 28114 - DNA, 1012 bp, Zea mays
  Clone ID: LIB4746-010-H11_FLI
ccgggaaaaaaaaaaaaaacgccttccctctgaaaactcttcattctcctctcctccgccgcgccgccaacttcccctcccgtcaactccggctcccgcgcgagatcgagctagcgtttggggttctcgagaccggctgccatggcgacagagcaagaggcggagaactacacggtggaggaccttgtggccctgaatccgtacaaccccgacatcctcaacgaccttgagaagttcgtcaacgagcaagttgcgtctcaaacatataacttggatgcaaatctcagccttcttcgcctgtaccagtttgagccaggaaggatgagcatacatattgtggcccacatactgatcaaggctctcatggcaatgccggcccctgacttcagtctttgcttattcttaattcctgaacatgtgcaaatggaagagcaattcaaggcattgatagttctttctcactatctagagactgctaggttcaggcagttttgggatgacgcagcaaacaaccgccacatattggaagcagttccaggttttgagcaggcaatccaatcctatgcaattcatgtactttccttgacataccagaaagttccaaggcatattcttgcagaggcaatcaacattgaaggtctcgctttggacaagtttcttgagtaccatgctgcgaactcaggttgggtaattgagaagggtgggcagtctcaagtgattgttcttccacgcaatgagttcaatcacccccagctcaagaagaacacagctgataccgctccatttgagcacctaacacgcatattccctgttcttagctgattcaggcgtagtgagagatatacaatagaactcagagcgagtgaagcttctctaagcaattgtatcatctcctttgtggtataccgtattttaagatctcggtatacctgttcttttttatggctgaattggtacctgcaacttggttattactataacgaaatgaccagttatgagattggtcggccct

SEQ ID NO: 28115 - DNA, 1232 bp, Zea mays
  Clone ID: LIB4746-011-C3_FLI
ccgggacccccttctccaatccgacactctccaaacaaactagcgacgatgccgtaccaatacgaccccaagaacgattttccgtcccctcggaaacacgggactccgtgtctcgcttctctcgtacggaggatggctcacgaccggcggaacggtcaagggcgaccccgtcgtcgagatcatcaagacggctcttgatcacggagtcaacttctttgacaacgccgaggtctactcgaacggagaatccgagcgagagatgggtcgcgctttcaaggaactcgacgttgaccgctcccaaatcgtcgtcacgaccaagatcttcttcggtactggcaagtcggacccgaaccagcgcggctcgtcccgcaagcacatcatcgagggactcaaagcttcgctcgaacgcctccaaatggactatgtcgacgtcatgtttttgcaccgacccgactacggcaccccggtcgaggagacgatccgcgccgtcaacacgctcatccagcagaacaaaatcttctactgggctacgagcgagtggagtgcggcccaagtcgcagaggcgaatggcatctgcgacaaattgggcttgatccgccccatcgccgaacagtgccaatacaacatgctccaccgagaaaggttcgaagtcgagtacgacatcctcttcaagaactacggctacggtaccactgtttggtcccctctcgcaggtggcatgctcaccggcaagtacaacgatggcatcccggaagactctcggttcaagacttcttcgatgtacgccgacacggtcaaggaactcgaaactgaaaagggtaaagcaaagattgcaaagatgcgcaaactcggagacgttgcgaaacgcctcggcgcttcgaactaggccgcgctcgccctcgcttggtgcgccaagaaccccaacgtttcgactgtcatcctcggagcgaccaagcccgaacaactcgtgcaaaactttgaggccctcgacctcttgcccaaattgaccgacgacgtcattcaagagattgaagagattctcgacaacaagcctactcctctcccgacgtatggacgcgcttaaggaaaaacaacccctttccccccctcaccttcgtcggctctattcgtcgctcctctcctccctctctgtcgtctcttaagaccttgaacatagtgaagtacaaaaaagataacatcaaaatatttagtgttgcaaagttgtcggggct

SEQ ID NO: 28116 - DNA, 621 bp, Zea mays
  Clone ID: LIB4746-012-A3_FLI
ccggggcagccaaccatctaccagcgactcagcgagcgagagcagcacacacgcagctagctaggagcagcagcagcagcggcgatggcggcctccatgatctcctcgtcagccctggcggtggcgcctcagggcctgccgcccctcggccgccgcgcctcctccttcgccgtcgtctgctccaagaagaagatcaagaccgacaagccctacgggattgggggtggcctgaccgtcgacgtcgacgccaacgggagaaagggcaagggcaagggcgtgtaccagttcgtcgacaagtacggcgcgaacgtcgacggatacagcccaatctacaacgaggatgactggtctcccaccggcgacgtctacgtcggtggaaccactgggcttctgatctgggccgtcaccctcgctgggatcctcggcggcggcgccctcctcgtctacaacaccagcgccctctccggctaaggatatccaatgcatgcgcttcttgcgattcgtcatgtaaaatcagggtgtctgtctataatctagccaccatggatgatgctcaaccttcgtcatgtaacaataatcagtgctactcttcattacataattttgatgctatatatatac

SEQ ID NO: 28117 - DNA, 1538 bp, Zea mays
  Clone ID: LIB4746-012-A6_FLI
ctcgaggccggccgggagtactatagattattattattatcataggggtcggatcctcctctgctcttatccactcgcctactacctcctctttctccgcccacctccacccccttccctgctctctcccactactgccccctttcgccgtctcccttctcccatcccttccgccgtttctgcctgctgcgaacccggcggcaaccgacctcgatcgtcgccgttcgtccgccgaccaccgccaagaggcagagttgatatggccctcaagaccccgcacctcccatccaatttcgcgaggcggccaagcagccaccacagcttcagccagtggcactcgcctccgcaccacccaaagcttcctccaaggcccgacccgcagacaagagttgccattgccacgaagccgccgccgccgccgcatgtcgtccgcaagaggagcacgacgtcgacgttgatgaggtgcagggacggcctaggcctacacggcttcacggacgacgaggctgttcatcagaccccggaaccggaagaccaccagaccaccgagctccccgtcgtgacgcacccgtcggtcgtcttccccggcgccacgctgcagctgcacgcgttcgagttccggagccgcatcatggcgcacaccctgctgcagcagggcctcagcttcggggtcgtctgctgcgggggggtagaggacgtggggtgcgtcgtgcacgtcgtggagtgcgagaggctcaccgacggccgcttcttcctcacctgcgtgggcagggaccggttccgggtcgtcgagaccgtcaggacgaagcactacgcggtcgcacgggtccaggtctttcgggaccgtgaccacagccaccaccaccaccaccacgacctgatgcagcaggtggagcggcacctcgggaacgtggccgcgctcgcggacaagctgggccagaagccgccgccgccgccgctgccgtaccgccagggcgaccggcggctgcacaccgccgcctcgctctcgttcctcgtcgcgcgcctgttcgtcgacgaccgccgggagcagcaggcgctgctgcggatggacgacgccgcgcagcggctggcgcgggagggggagtacctggagcgcaggagcaagtacctggcggccttggcggcgatcaaggacgcgttccagcacttgtcctgcaacgagaagtagattgcggacctgtacattttcaagggtagaagaactgtacaagttccctggtgaggtctgaccgtctgttaatacctaagggtttgattagtgagttggtctgtttttgtatgttggtttattcctggataagattgggacgatgatctaaagctctaaaaaaataataagaagggcaataagcaaccagactatatgcttgctgttggtattgcttcagctacgaccagccctgctgctgcctgtacattcttgcatggcctttctgtgctgccacttctgctgctatttctaataaagaagtgctgctatttctaataaactgatgtactcattcgtgtgtaaaaag

SEQ ID NO: 28118 - DNA, 1216 bp, Zea mays
  Clone ID: LIB4746-013-E3_FLI
ccgggaaaaactgatagtatcacaagcaatctagcacttgtcaacctaaccgattcccatccaaccaaccccgcacaccgccgcgggaagcagaagagactggaagagcctacaaaagcttgggggcgcggcacaacgcaggatggtgggcttcctccgggccttcgccgccgcttccgctgtgcccgcagcagctgccgcaacctatactctctttccttcctccgccccttcctcctccaagctccgcttccctcttcctgactccttccctccgccgccgcctcctcaacctccgggcgcgctcccaacgccgtgcccccgatggccaccgccgctgccacggctgatctctcggctgccgatgataagcagcgggactcggcgcttccggagctcacgacggaattcatggtggacatgaaatgtgagggatgtgtaacagctgtgaaaaacaagttgcaaactcttgaaggaataaaaaacattgaggtggacttgtctaaccaagtcgttagagttttggggtctcttccagtgaagacaatgttagatgcccttcatcaaacaggtcgagatgcacgactgattggccaagggaacccaaatgatttcttagtttctgctgctgtagctgagtttaaagggcctgttgtatttggtgttgttcgtctggcccaagtaaacatggagttggctagagttgaagccacatttagtggtctatcacctggtaaacatggatggtcaataaatcagtttggggatttgacaagaggtgcagaaagcactggcaatgtctataatccgccagatcatttatctgataagccacttggtgacctgggaacactagaagctggagagaacggggaagcccatttctcaggaccgaaggagaaattgagagtggttgacttgatcggccgctctattgctttgtatgcaaccgaggacagatcagaccctggcattgccgcagccgtgattgcaagaagcgccggggtaggagagaactacaagaaactctgcacttgtgatggtgtcaccatttgggaatcaagctaaacctgctaccagcgtattttccatactatttacttccgtatcttgtacgcacattaatgtagaaacaattaaagtggcaactgaacatttggaataagcttgaatacattgaggaataaaggctgttctcatgtggagcttggacagc

SEQ ID NO: 28119 - DNA, 956 bp, Zea mays
  Clone ID: LIB4746-014-A7_FLI
ctcgaggccggccgggaaactcacgaccaccgtctccaccacggcaccaccatcactccaacaccaccgcctccctctccgttctcttcctcccaacgactcaaaccgccaccgtcgcggctccctgaaccaccagaccagcccagagcccagcccaccacaaacgctgctgctgctggagagaggggcgcgcgggcggacgggagcgatgggcaactgccaggcggcggaggcggcgacggtcatcatccagcaccccggcgggaaggtcgaccggctctactggtccaccaccgccgccgaggtcatgcggaacaacccgggacactacgttgccctcgtcatactccgtgttcctgcagataacaagcccgccgccgccgccgccggggacgccgcggcgtcctccggccccggcagtggtggggccaagatcaccagggtcaagctgctgaagcccaaggacacgcttctccttggccaggtctaccgcctcatcaccgcgcaagaggtgacgaaggcggtgcgggcgaggaagaacgagaagatgcagcggtgcgaggccatcaggcagcagcacgagcagctccggcgcggcgacggggctcaccagagctcttccagccaggacgggaagcaggacaaggaccggcaccggggaagaggccggcactggcggccggcgctgcagagcatctccgagtccgcgagccagagcagcagcagcatcgtctctgaatccgccaccagctaatgctactgaccggactgtgccatccggccggtgctctctttctttctttttcttttgggatttctgtttgcttgttagtatagagtgcttgagcctagccagaaatggaaaaaaaaactgtaaatcagagtgtcagggcaggactaataggaagtttgtttcgtctgtcaatgtgatttggcatggtgaaactgacactaag

SEQ ID NO: 28120 - DNA, 1003 bp, Zea mays
  Clone ID: LIB4746-015-B7_FLI
ccgggaaaaaacagccgacggcaatagaagtagagaactccgacttcttcactcacacacacatggcgctgatgagccttggcgccgccgggtacaccacggccaccgcgccgcctcgtccccgaagatgcaccctgccgtttcgcgccgccgcctcccctgcggcactggaccgccggcgacggccgcataatgtggctggcgacttcttcgtcgaccaccgctgcatcgactgccagacctgccgatggatggcgccggaggtgttcaagagggtggatggcaaggccgccgtagcggcgcagcccagctccgaggaggagaggaccaaggccctgcaggcgctgctatcctgtccaacatcctcaattcacactgagaaacctccaaaagacattcttaaagtgcaaaacatgtttcctctaccaatcgacgacaagctactcccagtggaggaggctaccgcagatgttgagtggaaacttgaaggaaatggtccatggaacttaggaacagattttgaacttatccatacgccaggccataccccaggctcagtgtgcttgtacttcaaaccgctaaaggtgctgttcactggagaccatgttgcaaagtcagaagaatcagacgatctgaacctctttctgatgtacagcaagcagtcagtgagccttcagctggaaagcatcaggaagctactggagctagagttcgagtggcttttacctggacatggctatcgaatcaagtacaaagatgtgcgtgccaagaatgtagccatggagtccctcctagctaattacacaagctaggagcctatgagcatcttacttgagttagtgctcgcaaataagcattccaggaggctgaatgttgatgctatgtttccagagaatagtgtgcatgatgctcatcagctcttgaatgtgcatttgttaccagagactgtaccttgtgctgcacaccaagcaagtgaatgaatcaagcatacatgactcggccg

SEQ ID NO: 28121 - DNA, 1570 bp, Zea mays
  Clone ID: LIB4746-016-B7_FLI
ctcgaggccggccgggaagcccagagtcggtcgctgaaccgctagacgtgcccgcgccagcctcggagaagaacagtggccacgacggcggcggcggcggcggcgacgccactgatggagtccctggaggccctcgtggcgcacatccaggggctctccggcagccccgaggagctggcgcacctccacagcctcctcaagcaggcggacggcgaacccctgcgcgcccacgccgccgcgctggtccctttcctcgcgcacctcagtccagagacccactcactcggctacatctacctcctggatgcgtgcgcggcatccgcttccaatctgagcgacttcggcggcggggacttcctggtcaccatcgccggcttcctcaccgcgtgctcggcggaccagatacgcctggctcctgacaaattcctgcatgtgtgtaaggtgctcaaggatcaggttatgcagctcaacatgcccatcagagggatcgccccgttgcgggcggcggtccgtaagatccagtcctcgcccgagcagctgaccccggtccacgcggactaccttctcctgtgcttgctggcaaagcaatacaaggctggactcagcgtcctggaagatgacatattcgaagtggatcagccaaaggacctgttcctctactgctactacggagggatgatttacattgggctcaagaagtttcctaaagctttggagcttcttcacaatgctgttaccgccccaatgtcaacattgaacgcgattgctgtagaagcttacaagaagtatatcctagtttcactcattgtgaatggacaggtcccatcatttcctaagtatacatccatatcagcccaaaggagtatgaaaaaccatgctcagatttattttgagctttctacaagctatagcaacggtcgctacactgatttagagacatttgtcgaatcaaattcagcagcatttcaatctgacaacaacctagggttggtgaagcaagtgctctcatcgatgtacagacggaacatccaaaggctgacccagacttacttaactctttcacttgaagatattgctaggtctgttcaacttgaaacaccagaggatgctgaaatgcatgtacttcgcatgatcgaagatggagagatccatgcaaccataaaccagaaggatggaatggtcagctttcatgaagatcctgagcaatataaaagtgttgagatggtggagcatattgactcgtctatccagaggttaacggcattgtccaagaagttggcttcaattgatgagaacatgtcatgcgacccttcatatttgttgaagacgggaagggatcgtggaagatttgactacgatgacttcgactctgttccacacaagtatttttgagatgatccgagccctacgtgattctgaagtacgatcatcaacgtagcagccattttgtaaagttgtctttagttcgatcgattaatggcttttgaaaattttgaaaaatcttgtttaaagaatgggtctgctagcatatttctcctccaatttggagacaagatttcatttgtagaac

SEQ ID NO: 28122 - DNA, 644 bp, Zea mays
  Clone ID: LIB4746-016-F5_FLI
ccgggaaattcctcggagaggagaagccgccgccgccgccgcagcaatcacagcagcccggagaacgtcctggtccgacaagatgcagatctttgtgaagacgctgacagggaagaccatcaccctcgaggttgagagcagcgacaccatcgacaatgtcaaggccaagatccaggacaaggaagggatcccgccggaccagcagcggctgatctttgccgggaagcagctggaggatggccgcacccttgcggactataacatccaaaaggagtctacgctccacctcgtgcttaggctccgcggtggaatcattgagccctcgttgcaggcgctcgctcgcaagtacaaccaggacaagatgatctgccgcaaatgctatgcacgcctgcaccctagggctgtcaactgccgcaagaagaagtgtggtcacagcaaccagctgagggccaagaagaagatcaagaactgaggtgctgctgctagtcagtttcatggacaatgttgtgctgtattgctgtctggttgttgaaccgcttttgtttacccaacatttgggccttctgttatgttttatcttgttgtcgatgacacaatactatatgacaatagcaactctgttattgtagttttggtcactgtcc

SEQ ID NO: 28123 - DNA, 1115 bp, Zea mays
  Clone ID: LIB4746-017-H12_FLI
ctcgaggccggccgggaatttggtcttgttacggaacagaagggatatggttcccgggctccggcgacgacgagaggtaggcagaaatcgtttgccaaatcaacaccagcaacagcaaagcgactacagagagtaggagatgcttactctccacaccattcagtcatgcccctcgctgcgcagatcctctctgttccggcgtgctctgctaggcaggaagagatctttcatttctgccagcagttctgaggatgccgaatccggcactcccccgccgcttggtggcgacaaacaccagcaggaggttcttgcacagatcgccatgcttcagacgcagaaggtgcgcatcacagacttcttggacgagcgctctgcttacctgaccaagttcgccaaggacgccgactcggagttcgacctgattgggcagaacgccatgaaagaacttgatgccgttggtgaccagatactggagaggctcgacagcaagatgcaagccttcgaggagacggctgaggtacaacggcaagagatagaaatgaacgataaggtgttagaggacttcgaagactggattgagaaggagaaaaacgaaggaatgttcttcaaaagccttggcaaggtcaaacctcggaacaagatggaaataaaggtgaaagccaaggtggaagcacagaaggtcaaagagattgcagaggagagtgcaggatcaaaaactcgtatgaacatttacctggggctgatggggatactcgggattacaattgcgaatgccatctttgcaacaccagaggtggagtggaggaaggttgctgctctgggtctgattttcattggtctggttgctcaggtcatctacgagcaggatatctcaccgccggaagctgagaagacagagaaaatagaagaataaaaaaggagttgcagacatatcggtagggtgtgatctcccacgggcaatgtaaactgtatatggtagcatgaatagatacaaggtttaatactttaattaatcgttcataacccaagaaattatttaatatgtagtttggcaaacaaaccacaggtttctctaacctgagatctgatagactcaagccaacttcaaacctgcg

SEQ ID NO: 28124 - DNA, 636 bp, Zea mays
  Clone ID: LIB4746-018-E6_FLI
ccgggcgctcaactagttcgtccctcacgaactggttttgagttagctccgccagacccggaccggcaccacgccacggctccggccatcacgcgccgcgcacaccatgaccacggttgcgcaccatcaccacctcgccgctgccaccgtgctcttcttcgtcgcattcaccatggcacctctcgccgccggggaccccgtgggccagctctgcggtaccagcggcaactacacgctcaacagcacctaccagggcaacatccgccgcctcgccgccacgctgccgaagaacacctccacctcggcgacgctcttcgccacggacaccttcggcgccgtcccggacatcgtctacgcgctcgcgctctgccgcggcgacaccaacgcctccgcctgcagcggctgcgtcgccgccgcgttcctggacgcgcagcagctgtgcgcctacaacaaggacgccaccatgttctacgacccctgcctcctccgctactccaaccagaacttcctcgccgaccccagcagcgatggccgcgggaccgcgctaatcctcatgaacacgcagaacgtcaccgcgcggttcaaggtgttcgacgccgccgtcgccgcgctcctcaacgccaccgccgcctacgc

SEQ ID NO: 28125 - DNA, 1613 bp, Zea mays
  Clone ID: LIB4746-018-H12_FLI
ccgggaagagctagcagctagctagcagccactttgatcagtaatttactcgagctgtcggtcatccatgatcacgctcatcagatgcatgggtgcattgcaagtcctaacgacgaccttacttttactagttggctcacggcacagctcggcggtgtcaccgccatcgggctaccgctccacgctcacccacgttgactcccatggcggcttcaccaaggcagagctcatgcgccgagccgcgcaccgaagccgccaccgagcattcatgatgctgctgccgcgttattccacaatgtccaccagctcgaacgcgggacccgccaggctccgctccggccaggccgagtacctcatggagctcgccatcgggacgccgccggtgccattcgtcgccctcgccgacaccggcagcgacctcacgtggacgcagtgcaagccgtgcaagctctgcttcccgcaggacacgcccatctacgacacggccgcgtcggcgagcttctcccccgtgccgtgcgccagcgccacgtgcctgcccatctggcggagcagccgcaactgcaccgctaccaccacctcaccctgcaggtaccgctacgcctacgacgacggcgcctactcggccggcgtcctgggcacggagacgctcacgttcgccggctctagccctggcgcgcccgggcccggcgtctccgtcggcggcgtcgcgttcggctgcggcgtcgacaacggcggcctctcgtacaactccaccggcaccgtcggcctgggccgcgggagcctgtccctcgtggcgcagcttggggtcggcaagttctcctactgtctcaccgacttcttcaacaccagcctgggtagcccggtgctgttcggctccctcgccgagctcgccgcccccagcaccataggcggcgccgccgtgcagtcgacgccacttgtgcagggcccctacaacccgtcgaggtactacgtctccctcgagggcatatcgctcggcgacgcacgcctgccgatcccgaacggaaccttcgacctgcgcgacgacggctccgggggcatgatcgtggactccggcaccatcttcaccgtcctcgtggagagtgctttcagggtggtcgtcaaccacgtcgccggcgtgctcaaccagccggtggtgaacgcctccagcctggacagcccatgctttccggctactgcaggtgagcagcagctcccggacatgccggacatgctgctgcacttcgccggcggtgcagatatgaggctgcatagggacaactacatgtcctttaaccaggagtcgtcgtcgttctgcttgaatattgctggtgctccgtcagcttacggttccattcttggcaatttccagcagcagaatatacagatgttgtttgacatcaccgtaggtcaattgtcattcgtgcccaccgactgtagtaagctatgaagccatatcatatacatagtactttctctgtattagttaaaaataaactagcagacgacaaatattcgataacataagtaatagtgaatctcttttataatactagaaatcacttatcactctataacataaaattactattgctttatactagtattattaacag

SEQ ID NO: 28126 - DNA, 1237 bp, Zea mays
  Clone ID: LIB4746-019-B8_FLI
ctcgaggccggccggggcagtcctgtggtcgcacggtccttcactcctgcgtcctgcctcggtgcctaccagagtcccagacccaggcggccaggctcccagcctcccaggtccccggtggcggcagcaggctcccagtcccagatggccaccagttctaaaccctagccgccaaaccaacacgagcagctgtcgccctccaggccggtcgagcggggcgccgggcaccgtcgcgccgagctgagcggagagtggagcacctgcaccgagcggccagcggtgcgccgtgcgccgagcacctgagtggccagcggggcgccgagcactcgtctagtcgtcttctctgatcctgggcgtgcctgccaatgagcaagaagaggaagcatctggatccagcgaactcgttgaaagacagcgaacaagtagtcgcctcagatttcataagaggagacgatcttgatgacctattatcgaagcttatcaggagtgtggagattgccaaggcttcaaggggaggcttaccagaaaagatatggatgaagcaacaatttgctatcggcgtcaatgatgtcacaagggttcttgagcgaatgccgcattctgtcactgctcatcctgctcaaatgtctagcggagcaccaactgtctcaggccgacgtcaagctcctttggtgccattgcaggctgtccttgtagctgccgactgcaatcccaaatggttaacaaaacacataccaacactagcgtctacaaggcaggtaccggtattgtgcgtgaaggacaacaagggaggctcagtaaggttaggccatgtggtgaatgtcagaacagcccttgccattggagtaaaggccaaagatagcgttctcaacaagaccattgatgagttcctgaaagacagtaaactggttgccaatgaaccataaagtaaccccaagtctagtgacacgtttgtactaaaaagcctgtacttctgggcatgcaacatcccaggatcatctcataaatgggtttaagtttgagaaggggatcaagtatcttgagcacattgtggcaatatcaatttggagggacttcttgagagaacagtcatgggaaataggacagactatttgtttggtccgtgcaatattgtttgactggtgaacctagttatccattgtgatctagaacttgtatcaaactccaatgtaacgagatgttagaacccttgtttattgggtacagttttttcttc

SEQ ID NO: 28127 - DNA, 2104 bp, Zea mays
  Clone ID: LIB4746-019-E2_FLI
ccgggggctctgtgtgtcccccattcacttcacactctagactctagttcgccccatgagtctggcaggtcaaagaagggaagagacaaccgaaggatcaacggatcaagcgaggtagacgactccgcgtctaattaaacctgtggtctgcggacgggcggtcgtcggttagagcattgcttccgtgtggtgcggttgatagctcggatcttctgctggcggagttcgtcttggaggagaagagagagagagagcgcgcgcgccgggatcggagccaggaagcatccagcagcgatggcgggcggcggggtggcggcgctgggcgtgaagacggagcgcgcggcgcagtacaaggggcgcatgacgctcgccgtcgccacgacctgcctcgtggccgccgtcgggggcgccatcttcggctacgacatcggcatctccggaggcgtgacatccatggacccattcctggagaaattcttcccggtagtgttccaccggaagaactccggcgggaagaacaactactgtaagtacgacaaccagggactagcggcgttcacatcgtcactctacctcgccggcctcgttgcctccctcgtcgcgtcccccgtgacgaggaactacggccgcaaagctagcattgtctgcggcggcgtgagcttcctcatcggcgcggccctcaacgtggccgccgtgaatctggctatgctcatcctcgggcgcatcatgctcggcgtcggcatcggttttggcaaccaggctgtgccgctgtacctgtcggagatggcgccggcgcacctccgcggcggcctgaacatgatgttccagctcgcgacgacgctgggcatcttcacggcgaacctgatcaactatggcacgcagaacatcaagccgtgggggtggcggctgtcgctgggcctcgcggcggtgccggcgctgctgatgacgttgggcgggctctttcttccggagactcccaacagcctcattgagcgcgggcgcgtggaggagggtcggcgcgtgctggagcgcatccggggcacggccgacgtggacgccgagttcacggacatggtggaggcgagcgagctggccaacaccgtcgagcacccgttccggaacatcctgcagccgcgcaaccggccgcagctggtgatggccgtgtgcatgccggcgttccagatcctgacgggcatcaactccatcctcttctacgcgccggtcctgttccagagcatgggtttcggcgggaacgcgtccctctactcctccgtgctcaccggcgccgtgctcttctcctcgacgctcatctccatcggcatcgtcgaccgcctcggccgccggaagctcctcatcagcggcgggatccagatgatcgtctgccaggtgatcgtggcggtgatcctgggcgtgaagttcggggcggagaagcaactggcgcggagctactcggtcgcggtggtggtggtgatctgcctgttcgttctggcgttcgggtggtcgtggggcccgctgggatggacggtgccgagcgagatcttcccgctggagacgcggtcggcggggcagagcatcacggtggccgtgaacctgctcttcaccttcgccatcgcgcaggcgttcctgtcgctgctgtgcgccttcaagttcggcatcttcctctttttcgcggggtggatcaccgtcatgaccgtgttcgtctacgtcttcctgccggagaccaagggcgtgcccatcgaagagatggtgctgctatggcggaagcactggttctggaagaaggtcatgccggacatgccgctcgaggatggctggggcgcggctgagggtcatgcggcacctgccagcaacaatcacaagggatgactggagtgaagcatgcatggttgcctggttggtttcgtggacactttatataataactgaagaaaacaagacacacactaacatgtaggcggctgcttattcttattgtattttgtataaagcaggctgtgtgatatgcagggataaaaacgaacgagatcgttccaaataacctctcttttgttttcatttttacattttatttgggaaaaaagattgaagaagggactagcgggat

SEQ ID NO: 28128 - DNA, 1173 bp, Zea mays
  Clone ID: LIB4746-019-F4_FLI
ccgggacggccaccacaccgcggcgcgtggccagcgcagcgaatccatccccatcctcatgattataaataaataataattttacacgccctcctctctctcgatttctcgcggagcggccctccacctttatcgccgccgcctccgccgccgttgctgtgttccgtctcttcgccgatggcttcggccaagttcggtgctgcccagcaggtggagaaccgaggcgcgctgtccaaaaggtcacgtaacgacgtgtctgtaagggagggggactggaattgtcctcagtgtggtaatgtcaacttcagttttagaaatgtttgcaaccgtggagcctgtggtgcaccccgtccatcaccgagtccaagtccaagaatgatgccaggacctcctgcttctggatatgaccggtcacctctattttacgggggaggtggtggcgccccacctccaattccgcttggaactggtagctatggtgctccatatccacaccttgggatgcgatatggctatggtccaccagtaggacctcctggttcatacggtcttttctcttcatatggtccacctgggccaatgagtggtatgggatatggcccaggacctgagctaggccgatatagctatgggtttagaggttctccaatgccggtttctagcccatggtctggtggagcattagctgaaaacactgacaacattgcttcacgaaagcgccgtggaggccctgatggactttctgagggtgactggacctgtcccaaatgcgacaacattaacttttccttcagaagcacttgcaacatgaagaaatgtggagccccaaggccaactccgggaggtaacacgagctcatctcgcaaggacaacagcaataaggaagcccctgaaggaagctggacctgcccagagtgcaacaacctgaactacccattccgcacggtgtgtaacaggaaaggatgctcgtacagcaagccagccccggcgaacaactgaacccaaccttcgcgcatcgtccagctattgttgtacccgtagattgtatcctagtcgtgtgcaatctttgaactgcacgaagatgtttgtgcctggagacgagagattcgattcgttacgcttaatttactattatacatttttattaaatgatgaaaactagggaagatcatc

SEQ ID NO: 28129 - DNA, 1664 bp, Zea mays
  Clone ID: LIB4746-020-F12_FLI
ccgggaccttcctccccaactcgccgtcgtcttctgcggttctgccgtctacgcctccaatttggcctctctcccttgcaagtttaagcttcatcttcagccatgggtaaggagaagtcccacatcaacattgtggtcattggccacgtcgactctggcaagtcgaccaccaccggccacctgatctacaagcttggaggcattgacaagcgtgtaatagagaggtttgagaaggaggctgctgagatgaacaagcggtccttcaagtatgcttgggtgctcgacaagctcaaggctgagcgtgagaggggtatcaccattgatattgctctgtggaagtttgagaccaccaagtattactgcaccgtcattgatgcccctggacaccgtgacttcatcaagaacatgatcactggtacctcccaggctgactgtgctgtccttatcattgactccaccactggtggttttgaggctggtatctccaaggatggccagacccgtgagcatgctctccttgcgttcactcttggagtgaaacagatgatttgctgctgcaacaagatggatgcaacgactcccaaatactccaaggcgcgttatgatgagattgtgaaggaagtctcatcctacctcaagaaagttgggtacaaccctgataagattgcctttgtccccatctctggttttgagggcgacaacatgattgagaggtccaccaaccttgactggtacaaaggcccgaccctgcttgaggctcttgaccagatcaccgagcccaagagaccttcggacaagcccctgcgtctccccctgcaggatgtgtacaagattggtggtattggaactgtaccggttggtcgtgtggagactggtgtcatcaagcctggtatggttgtcaccttcggtccaactggcctgactactgaggtgaagtctgttgagatgcaccacgaggctcttcaggaggcccttcctggtgacaatgttggcttcaacgtgaagaacgttgctgtgaaggatctcaagcgtggttttgtggcctcaaactccaaggatgaccctgccaaggaggctgccagcttcacgtcccaggtcatcatcatgaaccaccctgggcagataggcaatggctatgccccagtgctggactgccacacctcccacattgctgtcaagtttgctgaactcattaccaagatcgacaggcggtctggcaaggagcttgagaaggagcccaagttcctgaagaacggtgatgctggtatggtgaagatgattcccaccaagcccatggtggtggagacattctcgcagtatcctccccttggtaggtttgctgtccgcgacatgaggcagacagttgctgttggagtcatcaagagtgtggagaagaaggacccgaccggcgccaaggttaccaaggcagctgccaaaaagaaatgatgcaacctgtcgttaatcctgtatctgcttttgcaatacctgacttgtcactccatcccgaagttttgtatgcggttgttactgttattgtgtactgttaagctctgctgcggcgtgccctgttgtttgggtagcgtcaacgtcgagcgccacttgcgggtgtgcctttgtctgctatcagtagcggcaaaaattgaaagctctcgagacttatgtat

SEQ ID NO: 28130 - DNA, 785 bp, Zea mays
  Clone ID: LIB4746-022-A11_FLI
ctcgaggccggccgggagagtcgccagtcctcccacaatctccagccgccactacgcctccctctagctccagccgccactacgccggtcgcagagtcgccagctgccgagacgcccggaggcccgcgggcgctccctcctgggctgctggcctccttcacattattggagccagaggagcgggcggcggcttgcactccatcccatcgcttggctagcgcgccggagccacagctggagcgctcgccggcgacgagtcgccgccccgcaaggagcctacgcaggcacgcaccgccacgtctaggcgccaggcggagacgttattaccacaacattaaaggagatgccttcactccagaaagcattgcctccagaacttgctgataatgtgctcaggttatatcgtgaatgcttacggagggcgaagtatattggccatcagaaacacaatacagaacttttagtcgccatggtgagacaacaattcaagaaaaacatgcatgaaactgatccagagaagatacagaaaatgaaggacgatgctgcaaggggccttatcaatcatattctatatgagtccgagaagattacaggacgcaagttttcaggttaaaaacagaagttgaaactggacttacagtgtgtcgtgctgtatgaataatagtaaaaataatttactttcttgcctttgaatgattccggttctattgtacaaggacctgcaaatgttttttccttcggattgctgagtactcgagctattgcagcaatgattttcagtaacc

SEQ ID NO: 28131 - DNA, 620 bp, Zea mays
  Clone ID: LIB4746-022-A8_FLI
ccgggatctaccagcaactcagcgagcgagagcagcacacacgcagctagctaggagcagcagcagcagcggcgatggcggcctccatgatctcctcgtcagctctggcggtggcgcctcagggcctgccgcccctcggccgccgcgcctcctccttcgccgtcgtctgctccaagaagaagatcaagaccgacaagccctacgggattgggggtggcctgaccgtcgacgtcgacgccaacgggagaaagggcaagggcaagggcgtgtaccagttcgtcgacaagtacggcgcgaacgtcgacggatacagcccaatctacaacgaggatgactggtctcccaccggcgacgtctacgtcggtggaaccactgggcttctgatctgggccgtcaccctcgctgggatcctcggcggcggcgccctcctcgtctacaacaccagcgccctctccggctaaggatatccaatgcatgcgcttcttgcgattcgtcatgtaaaatcagggtgtctgtctataatctagccaccatggatgatgctcaaccttcgtcatgtaacaataatcagtgctactcttcattacataattttgatgctatatatatatatatacccc

SEQ ID NO: 28132 - DNA, 1832 bp, Zea mays
  Clone ID: LIB4746-022-E5_FLI
ccgggatcttcgaaccccttcttcctctcttcagcgccgcacccgcgcccgcgccgtcgaaggcggcgcctagtctcgaggcttgcacgctgccgcggaggatcgcctcgctactgcgcgccatcgcctccgatctcctctatctccaatctgctccctcatcgccgtgcagtggaaactaggggaccgattcctcttctcgtttgtcgcatatttctcgctgcgtgccgcgtgctgcggtgagtgattctccaagaattctggggacgctgatctgagtccgcacagaacgcagcggcagcaatgatgatgtcggacgatgacgatgctgagccccagctcaacgcggtggagggctactacttcgttgactccaagaacgagaaggagcctgtctgcttctccaccctgcctttctggttcggggacactgatgatcttcctgacggcaagaagaagctggtgctgcgcgggactggtgacccgggcgtcaaggtgtacgatgaggtggtggcctgcaggctgggtctcgaggggaaacaacccgagtttgcagtgctcacagcaaaaggcagacgttggatacgtctcattaggcccttgaacagctacgaggaaatgatcaggactgtgttgatcacagcgcagatgctgcattttctaaggaggaagcctcatgagccagaaaaaaccttgtggaaccacctttgcaaagtttttaacgagtttgacgttccaccctcagaggacgatttcaggaaccactgctcactgatgaagcagtttgcggcaaaagatcctgtcttagcaaaatcagagattttgcgagtatttattgaaggaaaatctagaaaaaaattcactgaagcctgtggacgcgagtgagtgaaaaacagccgtattgtcccgactcccgaccccgaccgatcctcgcctgctgcagccatggcgacctccgcggcgctctccaccgccgccaatcccacccagctctaccggtcccgcgcttcgctgggcaagccggtgaaggggcttggcctgagcatgggccgcgagcgcgcccagcggagcattgcgtgccaggcggcgagcagcatctccgccgaccgcgtccccgacatggagaagcggaagctgatgaacctcctcctcctcggcgtcatctcgttgcccaccgtcggcatggtcgtcccctacggcgccttcttcgtccctgccggctccgggaacgccggcggcgggacctacgccaaggacaagctgggcaacgacatcacggtggaggcgtggctcaacacgcacggtcccaacgatcgcacgctcgcgcaggggctcaagggtgaccccacgtacctggtggtggagcaggacaagacgctggccacctacgggatcaacgccgtgtgcactcacctcggctgcgtcgtgccgtggaacggcgccgagaacaagttcatctgcccatgccacggatcccagtacaacaaccagggcaaggtggtccgtggaccggcgcctctgtcgctggccctggttcacgccgacgtcgacgacggcaaggtcctcttcgtcccgtgggtggagaccgacttcaggaccggcgaggacccgtggtggaaggcatgaggatgatccggaaccagcggtgctcagtgctcacacatgagacctatgtatgcctccgttccttgtgatgaggaaataggcttgcgttcgttctccgtgggcgttgttcctacaaattcacttgctctttgtctctctctatatatacacactgtataaaacaagaacagctgtttatcatctcttcttatataaccttttgaacg

SEQ ID NO: 28133 - DNA, 740 bp, Zea mays
  Clone ID: LIB4746-022-E9_FLI
ccgggaacccttcgctgcgccgccgcctccgacatcgtctcttcgtccccacgagcaaccgataatccgccggcgctgagatgttggtttatcaagacctcctatctggcgacgagctcctgtcggattcattcacctacaaggagctcgagaacggcgtcctgtgggaggtcgagggaaagtgggtcacccaaagtcctgttgatgtagacattggtgccaatccatccgccgagggtggtgaggatgaaagcgttgatgacacagccgtgaaggtggttgatattgttgacacattccgtctacaggagcaacctccttttgacaagaaatcatttgtctcttacataaaaaaatacatcaagaatctcactgctgtgttggagccagagaaagcggatgagttcaaaaagggtgtcgagggtgcaaccaagtttctccttagcaagctgaaggaccttcaattttttgttggtgagagcatgaaggacgaagcgtccgtggtattcgcctattacaaggatggtgccactaatccgacattcctctatttctctcatggtcttaaggagatcaagtgctagattagttacccatgttgggtactatatatgttctattgttatagccacaactatagctgccctgcctgaactgaactcaggttttttttaagaaaaaactgtccaagattggattgcttgttaaagctaaatattgttattgacgtgttattgctg

SEQ ID NO: 28134 - DNA, 998 bp, Zea mays
  Clone ID: LIB4746-022-F6_FLI
ccgggctctctgtctctctagggtttttgattttagccgccgccgctgctcatctcacatccctcgagaagacgcctgctcctcgccgatcgatacgatggccgtcttctccgacctccacaccgccgacggcctcaagtccctcgaggctcacctcgccggcaaaacctatgtgtctggtgactccattactaaggatgacattaaggtcttcgccgcggtgccgtcgaagcctggcgctgagtttcctaatgccgcccgctggtacgagaccgtctctgcggctgtagcctcaagattccctggtaaggctgttggtgtaaatctgcctgcgggatcagctcctgcggcagctgctcctgcggatgaggctgaggatgatgatgaccttgatctttttggtgatgaaactgaggaggacaagaaggcagctgatgagcgtgctgccgctgccaaggcctcttctaaaaagaaagaaagtggtaaatcctccgtccttatggatgtaaaaccatgggacgatgagactgatatgaagaagctggaggaggctgtccgcagtgtccagatggagggtctgacttggggagcatcaaagcttgtgcctgttggatacggcatcaagaagatgactatcatgttgacaattgtcgacgatcttgtgtccatcgacactctaattgaggaccaccttacgcaagagcccatcaatgagtacgtccagagttgcgacattgtggctttcaacaagatctagagttcagtttctgagtttgggcaacggcagcggctcagctcgtcaagtttgtgctgggatgccagtttatcccttctagtctattacagaaacgttgttcggagctgagtctattataaacatcttggtctgagtttattgttgagtggtgccagtttttttcaatatacatttatcttaaaaacagcggtactgatgtttttttgtctaaagttaatgagtttgcaatggttctgagtct

SEQ ID NO: 28135 - DNA, 965 bp, Zea mays
  Clone ID: LIB4746-023-H5_FLI
ctcgaggccggccgggagctcaccgccacctccacgctcgaagctcctcccgaaccggccgcatcgccgccatggcagccgccgctcctgcaagctccgtgaaggaagtgctgccgtctcccctgacctccgcctccgagccccctccccttttcgatggcaccaccaggttgtacgtggcctatctttgcccgttcgcgcagcgcgcttggattgctagaaactacaagggtctgcaggacaagattaagatagttgccatcgatctcgctgacaggccagcgtggtacaaggagaaggtttatccagaaaacaaggtgccttctctagagcacgacaaccaggtgaaaggagagagcttggatttggttaagtacatcgacagcaacttcgaaggtccatcgttgctccccgaggatcctgcaaagcagcagttcgctgaggagctgctcggatacactgacgcattcaacaaagcattttactcatgtttagtcgacagggaagatgtgtctgaggaagccgttgctgccttggacaaaatagaagacgccctggggaaattcaacgacggcccgttcttccttggccagttcagtctggtggacgttgcgtatgtaccgttcatcgagaggtttcagatactctattccaatataaagaactatgacgtcacaaagggcagacccaaccttcagaaattcatcgaggaagtaaacaagatcgatgcgtacacacagactaaactggacccgcagttcttgcttgagcaaacaaagaagcggcttgggattgcttaaagactgtgaccaaggacgagactttcgccagaagcaccagcgtagtagatcgatcggagctcgttttagtcggttgtgtgcttggatattacatctggtcttcaataaggcatggccttctgtaatggcggtgcttctgaaaataaataaactagttgtccaggg

SEQ ID NO: 28136 - DNA, 1042 bp, Zea mays
  Clone ID: LIB4746-025-F2_FLI
ccggaatggcaataaaaccttcctccttcgttccccatttctcctcttgctaggtttctacccctctaaatcgatcctcgctccacggccatggtgaggatgaagcaggtaaagatttcggtaaagaaggacgtggattcgtacacaatccgcggcaccaacaaggtcgtccatgtgggcgactgcgtgctgatgcgggcgtcggactcggacaagcagccgtatgtggcgcgggtggagaagatggaggccgacggacgcggcagcgtgcgggtgcaggtgcgctggtactaccgccccgaggaatccaagggcggtcgccggcagttccacggcgccaaggagcttttcctttccgatcatttcgacctacagagcgcccacaccatcgaggggaaatgtgttgtccactctttcaagaactacaccaagcttgataatgtcgggcctgaggactacttctcccgatttgagtacaaggcggccaccggttcgttcacccctgaccgcgtggcagtgtattgcaaatgtgagatgccatacaacccggatgacctcatggtgcagtgcgaagcttgcaaggactggttccatccatcttgcatggctatgaccattgaacaggccaaaaaaactagatcactttgtttgctcagactgtttgaaagaaaatggttcaaagagactttcaaatgtatatgccacttcatcaaattcttagcccaaggctgaatcaataaggcagacgaggtgaaaactgagtgccaacatccaggggagatgtgctgcttctgtggcgaatcagccattgcactggcgagagcagaggtgtacagtgtttgctgtggtttgttcgatgtaactagccagtgtggcatgtcatgcagttgttggtagatcagtcattgtgttgacttggtcaacttaacacaacatcccccttcgttgattacattgttgctgtggcggtgcggcatgatcgattactgttctattaacatatgacttttatatgttgatataattaaattattttgatact

SEQ ID NO: 28137 - DNA, 1591 bp, Zea mays
  Clone ID: LIB4746-025-H5_FLI
ccggggacctcttctggaatcctgcgacgaggggaccgaaatggcctcgtcctcctctgactccggccgcatcgccggaaccctagccttgcgtacgagctcggccttagcggcggcgtcgctaatcccggggctcccggacgacgttgcagctgtcattctctgcctgctcaccttccccgaccagtcccgcctccgcgccacctcgcgcgcttggtgcttgctcctctctgcggctacgctcctcccgctccgccgtagcctccgtctcccgcgccgtcaccttctctgcctcttccccaccgacccatccctcgcctccccgatcctgctcgaccccgccgcacctaccacctggtggcccctcccgccgctcccctgttcgccgcagctttacggcctcgccaactttaccgccctcgccgttggccgccacctctacgtcctcggcgggtcttgcttcgacgcccgcagctaccctttggggcaaccctccgcctcggcggcggtctaccggcttgaccttgccaactctcgacattgctgggaacgccttcccgacatgcagctcccgcggggaagcttcgcgtgtgcccacgcgcccagtgctggcgggctcctcgtcgccggtggcgggtcccgacaccccatgttcccctccaacggcagccgcaccggcagcaccgagtggtatgatgccaccacgcactcgtggcaccttggtgcctcgatgcctcgtgatcgggctgggtgtgttgggttcctggcacgcggagcaggggatggtggtgaggatgagttctgggtgatgggcggctatgatggatacaccacgttgggaggagtggtgccaaatgacgtgtactgtcgggacgcggtggcgttgggactatggagtggtaagtggagggtgattggagacatgtgggaggaaggggagaggaggcgtcttggtcccattgcagctttatctgcagatgatggaagaattaccgaggtgttcatgctagacggcaatgatgtcttcaggtatgacttcgcttcaaataggtggctgaaagaggcaaccacgagaagaaagatcccaaacactgaatcttgcggcttcgtaccaatgaacggggaactgtacgtgctcagatctgcaaaagttcgtgttgaatcctctggtccgtggaggcagctgaagaagaagctggctatggagtttcaggtgtacaaccctggggcaaagaaatggagagtgctcaccacgtatccacctgttgatgcacccattgatttcaggactgcagctctgtgtacagttgagttgtagatccattagtagtcaccattaactgtacatattcaggtggcaagcgcaacaatcgattgcaaatatagacatgaaaatgcctaatgcttcaagtgctcccagcagatagtttgttctagcgtgtttatatacagtagagataacattctggagtatatcgcaagaattggtgttttttggtgctgaatgtgattgctgctaacaagatatgaattgtaccagcctgttattattgcgtcagaatcactgtttagctacacagccgtttcgccc

SEQ ID NO: 28138 - DNA, 933 bp, Zea mays
  Clone ID: LIB4746-026-A1_FLI
ccggggaaaaacagccgtattgtcccgactcccgaccccgaccgatcctcgcctgctgcagccatggcgacctccgcggcgctctccaccgccgccaatcccacccagctctaccggtcccgcgcttcgctgggcaagccggtgaaggggcttggcctgagcatgggccgcgagcgcgcccagcggagcattgcgtgccaggcggcgagcagcatctccgccgaccgcgtccccgacatggagaagcggaagctgatgaacctcctcctcctcggcgccatctcgttgcccaccgtcggcatggtcgtcccctacggcgccttcttcgtccctgccggctccgggaacgccggcggcgggacctacgccaaggacaagctgggcaacgacatcacggtggaggcgtggctcaacacgcacggtcccaacgatcgcacgctcgcgcaggggctcaagggtgaccccacgtacctggtggtggagcaggacaagacgctggccacctacgggatcaacgccgtgtgcactcacctcggctgcgtcgtgccgtggaacggcgccgagaacaagttcatctgcccatgccacggatcccagtacaacaaccagggcaaggtggtccgtggaccggcgcctctgtcgctggccctggttcacgccgacgtcgacgacggcaaggtcctcttcgtcccgtgggtggagaccgacttcaggaccggcgaggacccgtggtggaaggcatgaggatgatccggaaccagcggtgctcagtgctcacacatgagacctatgtatgcctccgttccttgtgatgaggaaataggcttgcgttcgttctccgtgggcgttgttcctacaaattcacttgctctttgtctctctctatatatacacactgtataaaacaagaacagctgtttatcatctcttctc

SEQ ID NO: 28139 - DNA, 664 bp, Zea mays
  Clone ID: LIB4746-026-F12_FLI
ccggggtccaacctgtgcgtcaccgcctccgccttcagtttcgcctccagcaggggcgccgcgtggggtattcggttcgtcgtcgaggagagagagtcacttctgccgagggagcagggatgaagccggtcgtggggatcgtggtgtcaaacaagatgcagaagtcggtggtggttgcggtggaccgcctcttccaccataagatgtacaaccgctatgtcaagcgcacctctaagttcatggcacacgacgaggctgactcctgcaacattggcgaccgggttaggctggacccttttaggcccttgagcagacataagcactgggttgttgctgaaattcttcgcagagctaaggtatatgttccaccagcttcaacagcgtccagccagtccagtgaacatgatagcaaatctcaaaaagctggtgttgctaccaaatgatccatctgcagttactcaagcaagatgcagctatggcttttttttttcttctgtatgtttgtttggaatgtggatgccatgtttaaccatggaagaaaaaatagcacgcagccaccatcttcgcttaatttagtttgttctcctgtggtgtcctccctttaatggtagccatcgaggatataattaccatattcaacaagaccaatggatactatatcgac

SEQ ID NO: 28140 - DNA, 1520 bp, Zea mays
  Clone ID: LIB4746-027-C12_FLI
ccgggagtgatctattcacataacccccccttcaccactcatattcaaaatgttcaagcttgcgcggagcagccagttcgcttcggcgctcaagggcgcatacagcgctcctatcagacaatctgctttccagcagcgccgcaacctttccatccacgagtggcgctccgcgcagctcctcgactcgtacggaatcaaggtcgccaagggcaatgtcgctcacaacgcaaaggaggccgaggaggtagccaagaccattgagggcgacgacatggtcatcaaggcccaggttcttgctggtggcagaggaaagggtcacttcgacaacggcttcaagggtggtgtgaggatcgtctactctccccgcgaggctagcattctcgccgaccagatgattggccacaagctcatcaccaagcagaccggcgagcgtggtcgcatctgcaacagcgtctacattgtcgagcgcaagttcgcccgccgcgagttctacctcgccatcctcatggaccgtgctacccagtctcccatcattgtcgcctcctcccagggtggcatggacatcgaggccgtcgccaaggagagccccgagtccatcatcaccacccccgttgacatccacgttggtgttaccgacgagatggccaagaagatctccaccgagctcggcttcagccctcagtgcatcgacgccggtgccgacaccatccagaagctctacaagctcttcatggagaaggatgccactcagatcgagatcaaccctctgtccgagacctccgaccaccaggtcatgtgcatggacgccaagctcggattcgacgacaacgccgacttcaggcagaaggaggtcttcgagtggcgcgacgtcacccaggaggacgctgatgaggtcaaggctgccgagcagggcctgaacttcatcaagctcgatggtgacattggctgcctcgtcaacggtgccggtctcgccatggccaccatggacatcatcaagctcaacggtggtgcgcccgctaacttcctcgacgttggtggtggagctacccccaaggccatcaagagcgctttcgacctcatcaccgccgaccccaaggttactgccatcttcgtcaacatcttcggtggtatcgtccgttgcgacgacatcgccaagggtctgatctccgtcgccgagaccatgaacctccgcatccccatcattgcccgtctccaaggtaccaacatggaagccgcccagaagctcatcgacgagagcggtcttaagatcttcagcatcaacgacctccagagcgccgccgagaagagtgtgcagttctcgaagattgtcaagactgcccgcgacatcgatgttggcgtagagttcaacttgggcatttagagcgttgttttcttttttccctcgatctaaactttcctggactgccactttatcccgctagtctaggtggtctgttttgtacatttatctgctacggtccaaattttgatacctgcgaaagcaccattgacattgtaag

SEQ ID NO: 28141 - DNA, 582 bp, Zea mays
  Clone ID: LIB4746-027-C6_FLI
ccggggagctcgccatggcctccctctcctctgccgccgtcaccgccccttccttcgccgcaccagcgccagcccgcgccgtggtcagaaggaggtccttcaccgtgcgcgcctctctccgcaaggccaccggcaccgccgccgtggcaatggctgccagcgccctgcttgccggcggtgccatggcccaggaggtgctgctgggcgcaggcgacggcgggctcgtcttcgagcccagccagttcaccgtcaaggccggcgacaccatcacattcaagaacaacgccggcttcccgcacaacgtcgtcttcgacgaagacgaggtgccgagcggcgtcgacgccaccaagatctcgcaggaggagtacctcaacgcgccaggcgagacctactccgtcaccctcaccgtgccgggaacctacggcttctactgcgagccgcatcaaggagccggaatggtcggcaagatcaccgtcaactaattaagctagctatcgatcgatatccattcatgtattagctgttgcttcctgctttgtactccgccgatctgtccatctctacatgttttcgtcttcacgc

SEQ ID NO: 28142 - DNA, 1425 bp, Zea mays
  Clone ID: LIB4746-028-B6_FLI
ccgggatcttcgtcttcatgatgtttttctacattatctgggggctcttgttgggatccttggccactgctgtgccgcaacacgagtcgaaaagggcagcccctgcacttccattattcaccaagggccgagacatcctcgacgccaatggaaatgtcttccacttcatgtcgacgaactggcctggccatcaggagatcatgataccggaaggccttcaacactcctccatcgaaaaaattgtatcttggttcccaaagctcggtcttaattctgtgcgaatgccatttgccattgagatgatcgatgactacttggcaaacagcccgaaccagactctggagaggagcgtcctaagatctattcctggtgccaacgggacgaccgttttgaactccattttgaaaaacaatccgcaattcaccaaaaacactactagactgcaggtatgggatgctgtcgctaaagagctggcgcgccaaggtatcgttctccaccttgacaatcacgtgagcaaggctttctggtgctgcggcgagaacgatggaaatgggtggtttggagaaagatactttgacgttgaaaaatggaagcgaggtttggcgtttatggcaaaacacgcaaaggaaaactggcccacattttcctcgataggtttacgcaatgagttgcggtctgctacgggcgctgagcctgtagactggtacacgtggtacatccacatgacaagtgctgccaatgccgtccaccaagctgacccggatgccctgttattcttttctggactctcatacgatacttacattgatcctataccacttggcaagacgcttagcggaaccgctggtacctctactgccaataagaaggccacgtttgtcccaagcgacttcgcgtggaagaacaagattgtgctggagattcacaagtacgactttgagggaacgaaagatgactgccagacgttcaagagaaaatggtaccagagtggattccaggctgtcaatgccagtgacccagcgaccaagtatgtctttccaatggtcatttccgagtggggctttatcaacaacggcgtttactggaaccaaacaacatatgccaagtgtctggtggagatggtcaaagagtacaaggttggctggcaacattgggagctttgcggtagcttctacctccaaacgcgaccgaataggcagcctaacacacttgttggtgcagatgaagcttggggcatacttgactacgactggacggctatcaggtcgcctgtcactcttgagaatagtctgttcaagatgatagctgccttgaaataggagatggtatgttgaaccacgttggtatacttctggtcgatcctacatgaggtagaataacgcggttcagtaagaaatacctatgtctcaataaattcctttcacg

SEQ ID NO: 28143 - DNA, 1000 bp, Zea mays
  Clone ID: LIB4746-028-C2_FLI
ccgggagctagcaaatgaaccagccacaataatcctgatcctcgatcttgcgttgtcgtcgtcaaagagacgactcgatcatcatctcatctcagagcacgcaagcaacaatggttactagcatccgcgtcatagttggaatcataggatctgtagtctgtgtgctcctctacgcggttccagtgctgacgtttaagagagtggtgaaggaggccggcgttggggagttctcgtgcgtgccatacatcctcgcccttttcagcgccttcacctggggctggtacggcttccccatcgtcagtgacgggtgggagaacctgtcgctcttcggcacgtgcgccgtcggagtgctcttcgaagcttcgttcgtcgtcatatacgtatggtttgcgccgagagacaaaaagaaatctgtcgtcctaatggtgtctctggttgtggcaacgctctgcgtcatcgtatccttgtcaagcttcgtgttccacacgcaccatacgcgcaagctatttgttggtagcattggtatagtcacctccatatccatgtacagcgctccgcttgtagccgtgaagcaagtcatcctgaccaagagcgtggagttcatgcctttctacctgtcgttgttctccttgctgaccagttttacatggatgctgtacggcatcctaggaagggatccctatcttacggcaccaaacggcgccgggtgtttaactggacttcttcagatcgctgtgtactgcatttacagcagaagcaatcggccgccgaaagcagtcaatggtgcgacaacaactagccgtgaagatgcaaatgattgcaaggtttgacttcgagagccttaagaaactgcctctctccgacgctagtaggaggttgatactaaagtggcgctattcgcgtgtgcagttattattattatctaattgtaaactgctccagtgttctttctttttgttatctaatcaatgggcatagcacctgcaaccagtaattaatc

SEQ ID NO: 28144 - DNA, 2282 bp, Zea mays
  Clone ID: LIB4746-029-C6_FLI
ccgggattggccattccgcccgcatgaaaccccaaaccctcgccggcatcgccgtcgccgcagcagcgcccgcgtagcccgcccctctcgccctcgcccccctccccgcgccccgatcccgcccgctccgcagccgatcctgccgggagcacgaccgatgacgatgaacggcgccgctgcaccggagcgctcgcccccagcctcgcccccgcctctggtccaggcccaggcgcctccgtcgccatctccgactcagccgctcgagtggaggttctcgcaggtgttcggtgagcgcagcgccggggaggaagtccaggatgttgacatcatctcagcaatagagttcaataaatcgggacatcatcttgccactggagacaggggtggacgagttgttttatttgaaaggactgatgtcaaagatcttgcctctagaaaagatgctgagaaagctgattattctatcagcaggcatcctgagtttcgctacaaaactgagtttcaaagccatgagccagagtttgattaccttaagagcttggaaattgaagagaagattaatcaaataaagtggtgtcaagcaacaaattgtgcattgtttcttctatccacaaatgacaaaacgataaagttttggaaggtccaagaaaagaaagtaaaaaaggtatctgagatgaatttggaccgttcaactgctcctacaaatggtagtcctggtggtacgggatatccgcgcccatctctctcaaatggcaatgttctaaaacctggcggacttcctttgctacgccttcctgtggttacaacccaagaaacaagccttgctgcgagttgccgaagagtatatgctcatgcacatgactatcatataaattcaatatcaaataacagtgatggtgagacatttatatcagctgatgatttgcggataaatctttggaatttggaaatcagcaatcaaagtttcaatattattgatgttaagcctacaaacatggaagatctcactgaggtgataacatctgctgaattccatcctactcattgcaatacattggcgtatagtagctctaagggctccattcgacttgttgatctgcggcaatcagccctttgcgacactcattcccaaatctttgagcagcatgaggccccaggttcaagatcatttttcactgagattatagcttcaatttcggacataaaattttcgaaggatgggaggcatattctcagtcgtgactacatgactctgaagctttgggatgttaagatgaattctggtcctgttgcaacattccaggttcatgagtatctaaggcctaagttatgtgatttatatgaaaatgactcaattttcgacaaatttgagtgttgtcaaagtggtgatggattaagagtagcaactggttcctacagcaacatttttcgcgtgtttggttgccgttctggtagcagtgaagcaacaacacttgaagcaacccgaaaccctacaaggcggcaggtccagactacctctagagctactagatccctaagtactctgacgagggccgttagacgaggtggagagagcactggaatagatgccaatggaaattcctatgatctgagcacaaagttgctccatttggcctggcacccatctgaaaatctaattgcttgtgctgcagccaatagcttgtacatgtactacgcataaacaagcgaaacgaacagagcgacagttttttttgttggttgctcccggtgagaaagacacgtttagccaatggtggattgaagccaggagttggtggagatggtgtattttgtgccagtcggaagcagttcttttcggtgccatatagagctgtccagagtccaagaggaagtgactcgatcattcccgggaagcagctttgattctgattattattattttttgtgtggggaaaggcttgtctttcccccataggttcatttagatttaaagataaggtcctagcttgacaacatctgggcatctgtagtagacgatgttaaggggatggcgacgatccaccgttgtattcatgttgccatgggtttgtaacttcagggtggccgttggagcttttcatagttttatcttacatacagatcgaccttattttttttcccttcttgcgtggggaaccttgttttcgaagaatgccaggaccttcgtcatgtttgatgcgaaccctagaataggtaacatactgtcattttatcgtatgtacatttttaataggttggagtggttctactgttgtttagct

SEQ ID NO: 28145 - DNA, 558 bp, Zea mays
  Clone ID: LIB4746-029-G12_FLI
ccaggacaattctacaccaaacacctcaattgcccaatatgaagctcacaaccattctcgcccttgccgcgactgcgctcgcaggagagaccatcaacaacgagcacctcaagaccgaagtcgttaccgcagtcgactgcaagcgcccttccgtcgccggtgacaagatccacgtccactaccgcggtaccctcgagtccgacggctccgagttcgacgcctcctacaaccgcggccagcccctcagcttcaaggtcggtagcggccaggttattaagggctgggaccagggtctgctcgacatgtgccccggcgagaagaggaagttgaccatccagcccgagtgggcgtacggtagcaggggcgccggtcccatccccgccaacagcgtgttgatcttcgagacggagttggtcagcatcgatggcgttagcaaggacgagttgtagatcgtgctgtggatcggtacgatgtatggacgacatgggcatggagagcaaaggccaagtaaataccagtcatgagatataccacgaatagacaatgagtctacacgcc

SEQ ID NO: 28146 - DNA, 1129 bp, Zea mays
  Clone ID: LIB4746-030-C1_FLI
ccgggaaaaaaaaaaaactgcgtcactgcgccgaatcactagaaaccccaacaaacggaatttcacacatccagcgagcaataccgcaccgcaggtaagatcaaagaggaggcgatggctggcggcgggcaggcggcgtgctcccgcgtacgatgtcagagggcacccatttgctggtccccatccttcagaagcccttcattttcgacatccgcactcgccctcacagcttctcctccacctccggcaccaaggacctccagatggtcagcctcacgctccgcgttctgtcgcgacccgacgtcgaacacctcccggacatcttcacctccctcggcctcgagtacgacgagaaggtcctcccatccatcggcaacgaggtgctcaaggccgtcgtcgcgcagttcaacgccgaccagctcctcaccgagcgtccccacgtctccgcgctcgtccgcgaatcgctcaccaagcgcgcccgcgagttcaacatcgtcctcgacgacgtcgccatcacccacctagcctacgggcaggagttcgcgcaggccgtcgagaagaagcaggttgcgcagcaggaggccgagcgctccaggttcctcgtcgcgcgcgctgagcaggagaggcgcgctgctatcgtccgcgccgagggggagagcgagtccgcgcgccttatctccgaggccacgaccactgcgggcaacggcctgatcgagctcaggaggatcgaggcggccaaggagatcgcaagcgttctgtcgcgcacgcccaacgtctcctacatccccgccggcgacaatggccagatgctgctcgggcttaacgccgcccggtgaatggatcgtctttttccgcgcttcagaatgtcaggacgagatgaaactgttcttggtggggaggagggaaagtttgtttctgtagagcttctagaagtgttgctaagagtctgttttttattaatgaaatggctgggaagtctgtttgtgctcaatagagtgtttcttctgtgaaataaaactggtctatgagatggtgtggcgagctctttgctttgctttgctctctgcaattcagttgtatcccatacatgctgtctttatctctgaaataaaacttttcgagtgaacgg

SEQ ID NO: 28147 - DNA, 622 bp, Zea mays
  Clone ID: LIB4746-032-C5_FLI
ccggggtgattcttcgacccaaagaagcgcccttcctctacttcatcatggccgaacaagttgagaagtcgttccaaaagcaaccgttgttccacaacgccaaggtctcgaccacctcgcgcaaggtcgctggcaaggaccgccgttggttcaaggaggtcggtctcgggttcaagactccccgtgaggcgatcgagggtacctacatcgacaagaagtgccccttcaccggtctcgtctcgatccgtggacgcatcctcaccggcaaggtcgtctcgaccaagatgacccgcaccatcgtcatccgtcgcgagtacctccacttcgttcccaagtactcgaggtacgagaagcgtcacaagaacgttgccgtccactgctcgcccgctttccgtgtcgaggtcggtgatgtcgttaccgttggacaatgccgtcccctctccaagactgtccgcttcaacgtcctccgtgtacaaaaggcgaaggccaagaacttcatcaagttctaaattttgtctttttgagtaatactacggtctctctctccaacctcccaccagtcgttgggggaaacaagttcggcaccatttgaggaagttgttaatgaagggagtggcttctt

SEQ ID NO: 28148 - DNA, 1621 bp, Zea mays
  Clone ID: LIB4746-034-H5_FLI
acatacttccccgagtcgccgtcgtctgctccgggctgctgttctgcgcctccacaaggctttggcctctgttgtaagatttaagcttaacctccaaccatgggtaaggagaagtcccacatcaacattgtggttattggccatgtcgactctggcaagtcaaccaccaccggccacctgatctacaagcttggaggcattgacaagcgtgtgattgagaggttcgagaaggaagccgctgaaatgaacaaacggtccttcaagtacgcttgggtgcttgacaagctcaaggctgagcgtgagagaggtatcaccattgatatcgctctgtggaagtttgagaccacaaagtactactgcactgtcattgatgcccctggacatcgcgatttcatcaagaacatgatcacgggtacctcccaggctgactgtgctgttcttatcattgactccaccactggtggttttgaggccggtatctctaaggatggccagacccgtgagcatgctctccttgctttcacccttggggtcaagcagatgatttgctgctgcaacaagatggatgcgactactcccaagtattccaaggcccgttatgatgagattgtgaaggaagtttcatcctacctcaagaaggttggatacaaccctgacaagattgcctttgtccctatctctggttttgagggtgacaacatgattgagaggtccaccaaccttgactggtacaagggtccaaccctgcttgaggctcttgaccagatcacggagcccaagaggccttcagacaagcccctgcgtctgcccctccaggatgtgtacaagattggtggtattggaactgttccggttggtcgtgtggagactggtgtcatcaagcctggaatggttgtcaccttcggtccaactggcctgaccactgaggtgaagtctgttgagatgcaccacgaggctctccaggaggcccttcctggtgacaatgttggcttcaatgtgaagaacgttgctgtgaaggatctcaaacgtgggtacgtggcctccaactctaaggatgaccctgccaaggaggctgctagcttcacctcccaagtcatcatcatgaaccaccctgggcagattggcaatggctatgccccagtgctggactgccacacctcccacattgctgtcaagtttgctgagctcataaccaagatcgataggcggtctggcaaggagcttgagaaggagcccaagttcctgaagaatggtgatgccggtatggtgaagatgattcccactaagcccatggtggttgagaccttctctcagtatcctcctctgggtcgttttgctgtccgtgacatgaggcagacggttgctgttggagtcatcaagagcgtggagaagaaggacccaactggtgccaaggtgaccaaggctgcaataaagaagaaatgatgcgtcctcccatgtgccctcgtttattttgtacttgtgcccgtatacttcgatctgttaaaatctattggttgtgtgccctgtgtctgttgtttgggtatctatactgttattttgagacatggttgacttgcatggtcatctggattgggttcgcatttctgagtcatttgtcttg

SEQ ID NO: 28149 - DNA, 758 bp, Zea mays
  Clone ID: LIB4746-035-D3_FLI
ccgggagacgcggctaggagcaagagtaaggttcaagcaagtgggcagctatccagcgggccactgagtttaccttactcttactcttacatactaagatcgctaccagagcatggcgggaacttcgtcgtggtcgtcgtcttcatcctgcgcgtcgtcgttcgggtcgcccgaccacgatgtcgtctgcgtcaccgagccggactctgtgggcgccgcaggcgccgtcgccgacgccgagggaagcgtcaagttcctgtgcagctacggcggcaggatcctgccccgccgcaccgacggcacgctgcgctacgtcggcggcgacaaccgggtcctctccgtcgaccgtcccatccggttttacgtgttgcagcggaagctgagggaattgtgcggcggctgggaagcgcacctgcggtgtcagctaccgacggaggacctggacgcgctcatctccgtcacctgcgacgacgacctcgccaagctgctcgaggagtacgacgaggctagcaaggaccgcctccagtcgctcaagatccgggcgttcctgttcccgactaggacgccggcgccgtccatactacagcgtaggagcccgccgtcgattgctcacctccactggcaaaacacttccccgccggccgcagccggcgtctcgctgacgtgcgcgccgcggtggtgggcagcgccccaggcctctcgccaggcgcaggcgccccaggcgcagaactacgaccgacacagcctcggtgaggagc

SEQ ID NO: 28150 - DNA, 2364 bp, Zea mays
  Clone ID: LIB4746-035-G4_FLI
ccgggataattgatgacttccgtaccgagagcacaaggcaattcagcataaacatgctagtcgaactgtgtcccatcttcagccagagccttgaaccccctgagtagcaaaaatggcacgcccgttgttccttgtataccagctcgtaagcctctgcctgaggcttaccaatctatgctccggcgacgaccagcagttcgtatactctggcttcaccggcacaaacctctcgacggatggcgttgcagcgatcacgtcggatggcatgctcgagctgacgaacgggacgctccagcgcaagggccacgcgttctacccggagccggtgcgcctccgcgagcctgccaacggcacggcgcggtccttctccacctccttcgtgttcggcatcctgtccgaccatgtcgagctaagcgcgcacggcatggcgttcgtggtagccggcagcagggacttctccggcgctcttcccagcggctacctgggcctcctcaacgtccagagcaacggcaactccagcaaccgcctcttcgccgtcgagctcgacacgatgcagaacgacgagttccaggacatcaacgacaaccacgtcggcgtcgacgtcaacagccttcactcggtgcagtcgtactacgccgggtactacggcggcggcggcttccgcaacttgaccttgattagcggagaggccatgcaggtttgggtggactacgacgcagaggtcgcacagatcaacgtgaccatggctccactcagcatggccaaacctgcgaggccacttgtgtcggccaggtacaatctctcaaaggtcctgactgatgatggcccggcgttcgtcggcttctctgctgcgaccggtgggacgctgaaatcacggcactatgtcctcgggtggagcttcagcatcgaccgccctgctccggccattgacctcagcaatctaccgaagctgcctcgtgtttccgccaaggacaggactaggaccctggagatcgtcttgccggtagcaaccgcggcattcctccttgccgccggcatggccatcttgttactggtgcgacgacatcggaggtacgctgagctgcacgaagactgggagctcgagttcggaccacacaggttctcatacaaggatctgttccatgccacggacggcttcaagaactctaaccttctcggcatcggcgggtttgggagggtgtacaagggggtgcttcctgcgtccagaacagaaatcgcagtaaaacgggtgtcgcacgaatcgaagcagggcatgaaggagttcatctcggagatcgttagccttggacgcctgcaacaccgcaacctcgtccagctgctagggtactgtcgacggaaaggcgagctgctgctggtgtacgactacatgccaaacggaagcctcgacaagtgccttcacgaccgagagggacgacagcacgctttagactgggctttgagggtccaaattatcaaaggcgtcgcgtctggcttgtcgtacctccatctagactgggagaaagtggtcatccatcgagatattaaagccagcaatgtcctcctcgacggcgacatgaacgggcggctaggagactttggcctcgcgcgactctacgaccacggcggggcagacggcccaaagaccacccatgtggtaggcaccatagggtacatagctcccgagcttggtcgcaccggtaaggcatcccctctcacagacatatttgctttcggcatcttcgttcttgaggtcgcgtgtggacgaaggcccatcaacaagcagctcacgcaggacggcggcgccttgttattggtggactgggtgcttagtcactggcagaatggatcactcactgaaacagtggacatcaggtttcaaggggactacgacagtgacgaggcatccatggtactaaagctggggctactatgttcacacccattcgtggacgcaagaccaacaagcatgcgacaagtcacccagtaccttgaaggccacgtagcattaccggactttatgccgccctgccatatactacccagcagcatgatgattccggagcaaagcgagggatttcttatgtacaacaatacgtcaagccaaaaattcaaggcaagcaatgggagcatgtctagcctctcagggggaagatgacctagctgttatatatgtgtgtgtctctctcatgggatactgtaatgatccatagtgtatgtgagataggttagggtcttagggattcaagttgggcaccaactatttgattaaccttctaatccaacaacacaaaaaatagcacaaatatggacacaaggtgctatttggtaaggaatatatcaaaaatgcaaacatcattggaattg

SEQ ID NO: 28151 - DNA, 1196 bp, Zea mays
  Clone ID: LIB4746-036-G3_FLI
ccggggagcccagcgccacacaccaacctcagcacaccaaggagagtacgtggaggagcagccatggcttcatcggtggccgccgcggcgagcacattcctgggcacccgcctggcggacccggcgccacagaacgggcgcatcgtggcccggttcgggttcgggttgggcggcaaggcgaagcctgctccgaagaaggtggcgaagacatcgacctcctctgaccggccgctgtggttccccggcgccgtggcgcccgactacctggacggctcgctggtcggcgactacgggttcgacccgttcggtctcgggaagcccgtggagtacctgcagttcgagttggactcgctggaccagaacctggccaagaatgaggccggcggcatcatcggcacccggttcgagtcctccgaagtcaagtccaccccgttgcagccctacagcgaggtgttcggcctccagcggttccgcgagtgcgagctcatccacggccgctgggccatgctcgccaccctcggcgccctctccgtcgagtggctcaccggcgtcacctggcaggacgccggcaaggtggagctggtggacgggtcctcctacctgggccagccgctgccgttctccatctcgacgctcatctggatcgaggtgctcgtgatcggctacatcgagttccagcgcaacgccgagctcgacccggagaagaggctgtaccccggcggctcctacttcgacccgctcggcctggcggccgaccctgagaagaaggagcggctgcagctggcggagatcaagcacgcgcggctcgccatggtcgccttcctcggcttcgccgtgcaggccgccgccaccggcaaggggccgctcaacaactgggccacccacctgagcgacccgctccacaccaccatcttcgacacgttcggagggtcctcttaagcccgccattgctccgccccgtccatcgaccggccggaacgtgttcttggattaattaactacgatctctatgagcctggggatggatcaacccgtcgtgcgtggtctcgttttgtgatgagtggaagagagaggatggcaagatcgatcctttgttaatggagatctcgttaattaggagagctaccgctgggacttggtggtttgtaatatatgatccaaccagtgatgaatcaatgcattcacttgtgtacact

SEQ ID NO: 28152 - DNA, 807 bp, Zea mays
  Clone ID: LIB4746-037-A4_FLI
ccgggaaaaaattcgacatctctatcccgccgccagctactaaccacagcgaatcgacaaacagcaggatcgatctctgtccagtcgaacttatccatcatggccgactctcaagttaccctgcgcacgcgcaagttcatccgcaaccctcttctcggacgccgtcagatggtcgtcgacgtcctccaccccaaccgcgcaaacgtttccaaggacgagctccgtggcaagctcggtgagctgtacaaggccaagaaggaggatgtttccgtcttcggtttcaagacacactttggtggcggcaagagcaccggcttcgctctcatctacgacagtgccgaggccatgaagaagttcgagccccgctacaggctagtacgatacggcatggccaccaaggtcgagaaggccagcaggcagcagcgcaagcaacgcaagaacaggatgaagactttccgaggcacagccaaggccaagggtggcgcgaagaaggagaagaaataagcggctggagtgggctgctgctgacgatgatgatgatgatgatgactggttacaaaggtcattgtttggggggtcgagagtggcggtttctctggaactactactgttccgcctgctgcggtttcttcatcatggtgggaacggagttgcgtctgcgggcatgggcatgtttagctaccattgcctggaaaactcttgcggatggacacgacaagacggatggcgtttgagatgaattgtctgctaaccatcaatgcatatcatggactttacgatcctccaattgattcgtcacctggccct

SEQ ID NO: 28153 - DNA, 1703 bp, Zea mays
  Clone ID: LIB4746-037-D4_FLI
ccgggaagtctctttctgccccacgacacctttttcccgacaccctaccactccaactctccaccccaaccgccgccatggacgtccctaggtctaacaagcagcctaccagcacaccgcagaacacacccgccaatgctgcacccatctcgtcgcgcgcccagcagccgaacgtcggcaccatcaaggaagaggagcttgaccgcgccgccgccggactgttcgctgcaaaccccgctctcgtctcgatgatgcaggccaagctcggctcccttgttggccgctcaagcggctacatcgagtcactccctggctctgtccgccgccgtgttgctggcctgaagggtgtccagaaggagcactctaagctcgaggccgagttccaggaggaggttctccagctcgagaagaagtacttcgccaagttcacaccgctgtacgagcagcgtgccaagatcgtcaacggctctaccgagcccacagaggagcaggtcaaggttggcgagcagcaagatgaggacgatgaggatgacgaggaggctggcgagaaggagctgaacaaggacgagggcaagggcgtcaagggtattccagagttctggctgagcgccatgaagaaccagatctcgctcgccgagatgatcacagaccgcgacgaggccgcactgaagcacctcactgacgtccgcatggagtacctcgaccgccccggtttccgtctcattttcgagtttgaggagaacgagttcttcaccaacaagaccatcaccaagacatacttctaccaggaggagaacggttacggtggcgacttcatctacgaccacgccgagggcgacaagatcgactggaagacgggcaaggacctgactgtccgcgttgagagcaagaagcagaggaacaagaacacaaagcagacccgcgttgtcaagaagaccgttcccacagagtcgttcttcaacttcttcgaccccccaagccctccccaggacgaggatgacgacgcttcatccgatattgaggagcgcctcgagctcgactaccagctcggtgaggacatcaaggagaagctcattccccgcgctatcgactggttcaccggcgaggctcttcagtacgagaacatcgaggacttcgacgagggcgagtttgaagacgaggatgatgaggatgaggacgggctcagtgacgaccgcgatgaggacgaggagtcagatgacgagaacgacggcacaaaacccaagcaggaggctgctgagtgcaagcagagctaaacgtctctttcgaccgatcttcttcgatgatatctccgggcattgggcttgttcaatctagatggcttctccggctgtgacaggctcgcaacctgacctcttcccattatctttgcacagcacttcatgttttcgacacggcgtatcattgcatcaaaagagctggacgccgattgggggtggttgttctagctatacatgaactatactggttctacctccctcgctctactccactcaaccctaatagtccctgcccatggctcgccctcagacacgtcagacccggacatgcggtctaaacacagtattggcccctgcggtggtactcaacgcgtgagggagctacgagcagcggatgaatcacgactacagcgatggatagtaaaagttttggtatatagagcgaaatgaatgagatacgagcac

SEQ ID NO: 28154 - DNA, 967 bp, Zea mays
  Clone ID: LIB4746-037-E9_FLI
ccgggagcgtggaggttcgagtccgaacgcccctttcttctaccccaagacgaactcggtgaactctttccggttcgttcccctacgcccgtttctctctcgtcgcgcaacatcagagcacaagcgaggaacccagtccagtcccgggaatggagtgcgtattgggcgtggttggccgcgacttcgcgctggtggcggccgacacctccgccgtgcagagtattctcgtccacaagaccgacgaggacaaggtgatggtgctcgactcgcaaaagctgatgggcgcttcaggggagcctggtgatcgggtgcaacttacggagttcatacagaagaacctccacctgtaccagttccggaacaccatcccgctctcaaccgccgccgccgccaacttcacacgcggcgaactcgccacagcccttcgcaagaatccatatatggtcaatattattcttggtggttatgataaggatgttggtgcttccctctactacatcgactacattgcaaccttgcacaaaattgacaaaggtgcttttgggtacggatcatacttctgtttgtctcttatggacaagttgtaccacccggacatgactgttgaggaagcagtagatcttgttgacaagtgcatcaaggagattcggctgcgattggttgtcgcgcctcagaactttgttatcaagattgttgacaaggacggggcgagggagtacgccaggcgtgaactcgtcggtgacaatgcacctgctgaagctgcaaccgcagttgttgctgcctgaggcatgaactcgtttgaggttggaatgtgttagttgtttctcagcgatgctacttatgcgatcacaggatactggtggggggcccacaactgttttatcaattttagcccagtcgtgtaattctgtttctgcactattcatgtctgctgagtacaagtagtgtttcacgcttgaacagatac

SEQ ID NO: 28155 - DNA, 646 bp, Zea mays
  Clone ID: LIB4746-038-B5_FLI
ccgggagcaccagcgtcacccatcacgacacgtccccccacagccttcgagatgtcttcggaaaagagccaccgcctctacgtcaagggccgccacgttagctaccagcgtagcaagcgcaactcgaaccccaacatcagcctgctccagctcgagggcgtcgaaagcacaaaggacgcggagtggtacctcggaaagcgtgtcgcctatgtataccgcgtcggcagcagcaagtcgaaccccatccgcgtcatctggggcaagatccgccgaactcatggcaactctggtctcgttcgcgcttctttccagcacaaccttccaccaaagtccttcggtgccagtgtcagggttatgatgtaccccagctccatctaagggcgggcgattgaggaacattcgggaaggagttgaggcgattgggaacggcgcgcagccacatcaaaatctctttcagggcagcctctttagtttcatcacaatgcgataatggtagcatacacactcgtggtggaccggattgcagagacaaggactgctatcacggtagggctgatggataaagtgcggggtctgttcaggaacattctagatcaccagccggtagctgccttgcctagctttctataacatgaagccaacccac

SEQ ID NO: 28156 - DNA, 2360 bp, Zea mays
  Clone ID: LIB4746-038-E12_FLI
ccgggatgcctccagtgtccagtccagagtccaggctccaggactaccaccacttcgtctcgtcctcacacctcactccaccacctctgccttgcaaagccttccaccgatccgccgcctcgtccgcgcgctcgcaggcagcagtgtggactacccgccccatactccatcccctactcgaaggatacaccgacctcgagttaagttgggcgaggagaggtggttcattccagcagggatccttctcgtgagcccagtcgatctgaccgtccttggtatctgggggggttgttctgtactctctctttaatttgtgagtcgtgacaggttcttgaagtgcaattgttaagagttttagttgtagaggaagagaaggatttgctaatatggcgttggcagggacctccaaagtagtgctgggatgtatcgcctttgggattttctgggtgatggccgtcttccccaccgtcccgttcatgcctgttgggcggacggctgggtccctccttggtgctatgctaatggtcctgttccgcgtcatctccccggaggacgcgtacgccgcgattgacctcccgatcatcggcctgctcttcgggacaatggtcgtcagcatcttccttgagagggctgacatgtttaagtacctcgggaacctgctctcgtggaagagcagaggcagcaaggacctgctcttccgagtctgcatcgtgtccgcgtttgccagcgcgcttttcaccaatgacacatgctgtgttgtcctcaccgagttcatcctcaaggttgctaggcaaaacaacctgccaccacagcctttccttctggcccttgccactagttcgaacatcggctctgctgccacgccgatcggcaaccctcagaaccttgtcatagctgtcgagagtgggatctcatttggccagttcttgctgggagttttcccagctatgatcgttggggttctcacaaacgctgctatcctccttttgtacttctggaaatacttgtcggtggagaaggatcaggagggtgggcagcccacaggaccagaggtggttgccgacgatgaggttacttcccatcggttcacaccggctagaatgtcacatgtttcttctctgaatccagatgacatggattgcgtaagcgaaccgatcatcaggagcaacagtgtcagtactactgggaatgagaacctgagaagcagaagcatcaattctgaggctgacattcagcttgcgatcaagtctctgcgggcatcaagcgtgtcgcatgagatggtagaggtctcgacggttcctgatcggagagatgaaggtgcatcctcaaggaagttcacaaggactgctagccagcaaaggagcgtgataatagaggatttagcaccctccccagagattaatggggaaaaggagaaagaaactgaagttgcagagaagagatggaaagtacttgtgtggaagactgctgtttatcttatcactctcggtatgctcattgcacttctaatgggactgaacatgtcctggactgcaatcactgcagctcttgttcttctggcactcgattttacggacgcacaagcttgtcttgagaaggtgtcatattcactgctgatctttttctgcgggatgtttatcactgttgatggcttcaacaaaacgggcataccgaacacactatgggagttagtggaaccatattcacgaatcgatagtgcgaaaggtgttgcacttcttgccgtggtgattcttatcctttcaaacgtggcccctaatgttcctacagtcctattgctcggtacaagagtggctgcatcagcggcttcgatttctcatggttcagagaggaaagcctggctcatccttgcatgggtcagcaccgtggctgggaacctcaccctcctaggctctgcggcgaatctgattgtctgcgagcaggccaggcgggcccagttcttcggctacaacctcaccttctggagccacctccgattcggggtcccgtcgaccatcatcgtcacggcgattggtttgctcatcgtcatcagttactgaaacagctgaaggcagaagagcgtagtgtaagagaagcagaatggataaaaatccttccaataagaagtacatgtaaattaggcttgccctataactcaagtgtgtatcggtacgttatgtctccgtctgtgctcttgctcgtgagcaagcagcacatggctgaccgtgtagcttgcatttccattgcataataggcttatgaagaatgctttggtaatatcattttacagtctgacaaggattgtgaagcagaggcagtgtaccatcaagataatacttctggaagcatataaaaaaatttcg

SEQ ID NO: 28157 - DNA, 879 bp, Zea mays
  Clone ID: LIB4746-039-E7_FLI
ccgggatccctcaagcacactcaaaatggctatcggcaagaacaagcgcttgtcaaagggcaagaagggcatcaagaaaaaggtcgtcgaccctttcacccgcaaggagtggtacgacatcgaggcccctggcttcttcgagacccgcaacgctggcaagacccttgtcaaccgatcgcagggtttgaagaacgccgatgactcgctcaagggccgtgtgctcgagctctcgctcgccgacctcatgaacggcgaccaggagcagggcttccggaagatcaagctgcgtgtcgaggccatctctggcaagaactgcttgacctcgttctacggcatggactttaccaccgacaagctccgctccattgtccgcaagtggcagaccttgatcgaggcctcggtcgacgtcaagacgaccgacggctacgtgctccgtcttttcgctatcggcttcaccaagcgcgcgtacaaccaggtcaagaagaccacctacgcccagtcgtcgcaggtccgcgagatccgcgccaagatggtcgagatcatgaagcgcgaggccgagggcggtgacttgaaggagttggtgcaaaagtttgtgcccgagagcattggccgggagattgagaaggctaccaagggcatctaccccttgcacaacgtctacgtccgcaaggccaagatcgtcaagacccccaagctcgacatgaccaagctcctcgagtctaacggcgagaccggcgccgacgccacccccggctccaaggtcgtcaagggcggcgactttgtcgagcccgaagtgcttgcttccgtctaaacgcgttatatctatctataaaaactttgataggtatgcgttaggggggatgcatgtattacgaacat

SEQ ID NO: 28158 - DNA, 872 bp, Zea mays
  Clone ID: LIB4746-039-H8_FLI
ccggggacccatggcgagtcagacaactcttcgtctttctttcttcttcttctcttctccactgcacatcctcctttcttcttctcctcgtcgatcggcaagctaaggaggcaccattgcttgtcgtctgatccccgccgggcgcgtgtcgctgcacaagatgacgacggcaacagccgttggcagcgtcgccgaccgcatcatgccgcacctcctcaacatatatggatcgtctgcgacggcacgggacttcgagatttacgcgccaaatgcgacgtttgaggacccgctcatgcgagctcacggggttaagcagatcaaatcagcgttctacacgctgccaaaggtgtttggggaatccaagatcaccgaatacaccgtacaagagaatcccatggggccgggcaagaccgaggtggtgatccagaacaagcagcactacaaggtgctgggcaagccggtggatctgacgtcgctcatcaggctgcagctccaggacggcaaggtggtcaagcacgaggactggtggcacgggaagcctctcaagaacagggacacggtgggcgtgccgctggtgggccgactcgcagaggccagccgccggggcgccatgctgctcacccacgcactcatgggcttcggcaaagacccaacccagcctcctcctcctcctccgacacattgaattcgtcagactcgtagtctgatcaatccaacgaatcatatacgtttgtatatctatctgtctgtctatcttcgcattgttactctcacgcataacacctggacattattttcttttgttgtgtgcacaaagcttagaacctagtttggaaacccatgtcactccagatttgagtaaaagtctttcc

SEQ ID NO: 28159 - DNA, 1131 bp, Zea mays
  Clone ID: LIB4746-041-D3_FLI
ccgggtatttagaaagtaagatcaagtaccccacactcgctcgctctccgacgactggtgggccgccgctgccctgcgccagccgccaggtgccgaggccttcgttgatctattcgccagcgacgagcgcccaccaggcaagcttctgctgctctgcatgcaatgatgaactaatgattgttgttgataacagaaacttgctgttggtttttgttcacatattactattggcagccaaagagttctacaacctgcattgcacatcttattattagatgactaatcctgtgattactactatactgtgctagccactccatagtctagcatttttgcaacgataccaacttcacgtgtttacatggaatgcaacagagatgaagctgctagagcaaaagctctggcagaaagaaaaatgatggacatggattttgttggtgcaaaaaagatgattatcaaggcgcagcaactcctccaagaagtggatgacgttgacattccaaaaaatgttaactgtttgtgatgttcattctgctgctggagctaaggtgaatactgagattgattggtatggaatactgcaagtacctgtaaatgctgacgacgcactgataaagaaacagtatcgtaagcttgcccttttgctacaccctgataagaataagtttgggggtgcagaggcagcattcaaattagttggagaagcaaacataactcttacagaccggtcaaaacgttctgtgcatgacatgaaaagaacaacattcaggagtgttacagcaagacccagtcatcagccaccaaaaagacctgcacctgctagatctagttctactcctgtgaatctccatactatgcatcagcaacatcagtatcaagcctcaaatcctacagggccgcaaacaacattctggactatttgtccagcttgtggcatgaaatatcagtactacctctcgatcttgaagaaggttttgcgctgtcagaattgtttgaagtcatttatcgcacatgatttgaaggaccaagctattccttctggtgcaaatcagcgatctgccggggtttggaaaaatgcaggcacaccacagaactctgcaggacctcaatcaaatgtcactggtcagaaat

SEQ ID NO: 28160 - DNA, 1201 bp, Zea mays
  Clone ID: LIB4746-042-C2_FLI
ccgggaccaacctcagcacaccaaggagagtacgtggaggagcagccatggcttcatcggtggccgccgcggcgagcacattcctgggcacccgcctggcggacccggcgccacagaacgggcgcatcgtggcccggttcgggttcgggttgggcggcaaggcgaagcctgctccgaagaaggtggcgaagacatcgacctcctctgaccggccgctgtggttccccggcgccgtggcgcccgactacctggacggctcgctggtcggcgactacgggttcgacccgttcggtctcgggaagcccgtggagtacctgcagttcgagttggactcgctggaccagaacctggccaagaatgaggccggcggcatcatcggcacccggttcgagtcctccgaagtcaagttcaccccgttgcagccctacagcgaggtgttcggcctccagcggttccgcgagtgcgagctcatccacggccgctgggccatgctcgccaccctcggcgccctctccgtcgagtggctcaccggcgtcacctggcaggacgccggcaaggtggagctggtggacgggtcctcctacctgggccagccgctgccgttctccatctcgacgctcatctggatcgaggtgctcgtgatcggctacatcgagttccagcgcaacgccgagctcgacccggagaagaggctgtaccccggcggctcctacttcgacccgctcggcctggcggccgaccctgagaagaaggagcggctgcagctggcggagatcaagcacgcgcggctcgccatggtcgccttcctcggcttcgccgtgcaggccgccgccaccggcaaggggccgctcaacaactgggccacccacctgagcgacccgctccacaccaccatcttcgacacgttcggagggtcctcttaagcccgccattgctccgccccgtccatcgaccggccggaacgtgttcttggattaattaactacgatctctatgagcctggggatggatcaacccgtcgtgcgtggtctcgttttgtgatgagtggaagagagaggatggcaagatcgatcctttgttaatggagatctcgttaattaggagagctaccgctgggacttggtggtttgtaatatatgatccaaccagtgatgaatcaatgcattcacttgtgtacacatatacatttctaccttgcacg

SEQ ID NO: 28161 - DNA, 880 bp, Zea mays
  Clone ID: LIB4746-042-D11_FLI
ccgggagctcgcgcgacatggcgcccgccgcccggtggtccacgtcccctgtgctcatctttctgctgctgctcgcggcggccacggcgacgacgacgaccactacagcaaagcatgggcatccgtcgccgacgccgtggccggagcgtttccacgcggtgctgttcacgaacctgaccaactacatggaagcctccacgggcccgccgctgcgcgtgacggacccctactacgactggccgcggcggcggaacctgaacctggtgcggcaccagctgtcggacgacccgctgtacgacgtggagtggaacaacggcaccggcttctacttcgactccaaggcgtgccgcgtggagcagttccccgtgggcgtgctgccgccgtggtggctctccggcggcggcgccgagtacgtgggtcgccgcgtcgcgggcgggatcgactgccacgtgtggggcaaggccggcttcatcttctactacgaggaggcgcgcacggggcggcccgtgcgctgggacttcgtcgacgtgacggggatccagcagttcgtgatgagcttcgagcccggagctgcgctggaggacgacgcgcagtggcaggcacctgcatactgcttcccggacgacgacgatgccgcaaggagcagtggtgacgaggaagctggggatgggcttgaggcggcgagcaggttactcaggaagctagcaggagctgcagcaacgtattgacgttgtagtaatcctatgcgacatgtaccgtattaatttcgagcacaacagatatacttatgttcttgtagtactacctaattacctagtttcctattgctgctcctgttgaaaacaaacagatatgtgtcagttcagattagtaaattgag

SEQ ID NO: 28162 - DNA, 588 bp, Zea mays
  Clone ID: LIB4746-042-E5_FLI
ccggtactgacgagctcgccatggcctccctctcctctgccgccgtcaccgccccttccttcgccgcaccagcgccagcccgcgccgtggtcagaaggaggtccttcaccgtgcgcgcctctctccgcaaggccaccggcaccgccgccgtggcaatggctgccagcgccctgcttgccggcggtgccatggcccaggaggtgctgctgggcgcaggcgacggcgggctcgtcttcgagcccagccagttcaccgtcaaggccggcgacaccatcacattcaagaacaacgccggcttcccgcacaacgtcgtcttcgacgaagacgaggtgccgagcggcgtcgacgccaccaagatctcgcaggaggagtacctcaacgcgccaggcgagacctactccgtcaccctcaccgtgccgggaacctacggcttctactgcgagccgcatcaaggagccggaatggtcggcaagatcaccgtcaactaattaagctagctatcgatcgatatccattcatgtattagctgttgcttcctgctttgtactccgccgatctgtccatctctacatgttttcgtcttcacgt

SEQ ID NO: 28163 - DNA, 1026 bp, Zea mays
  Clone ID: LIB4746-043-E10_FLI
ccgggagattgactgccaattcggaggtcaaaccagagcagcaggcagcagcatcgctgcctataaatagtctcgctccgctggccggcaactggcaccagcaccgaggcaggggcggcgatccattccacacaaccaccactgctcttgccccagcccgccgcaggagttgccagatctgccccggtcacaggaactccgactccgagccctctccaatggcggttaaggtctacgtcgtgtactattccatgtatggacatgttggcaaactagctgaagagatccagaaaggtgcctcgtctgttgaaggtgttgaagctaaaacatggtaggtccctgaaaccctccctgaggaagtgcttggaaagatgggcgcaccccctaagcctgacgtgccagtcatcacgccgcaagaactcgcagaggccgacggaatcctcttcgggttcccaacgaggttcggaatgatggcagcgcagatgaaggcgttcttcgatgccactggtgggctctggagggagcagagccttgccggcaagcctgccggcgtcttcttctgcactggatcccagggtggtggccaggagacgacagcgttgacagcgatcacccagttgacgcaccacggcatggtgttcgtgcctgtgggctacaccttcggcgccaagctgttcggcatggaccaggttcagggcggcagcccctacggcgccggcacgttcgccgccgacggctcgaggtggccgagcgaggtggagctggagcacgccttccaccaggggaagtacttcgcaggcatcgccaagaagctcaagggttcagcctgatctacacatatacccttgtcggatatcataaaaaacacttattacagattcgtcttacccatcaatagatcggtctgttctctcgtggtgtctggatgttgtgtggctcagtggaactttcatgctacggtgactttgttgtaatctggagttggaatatcgttgtttcgcataaatttcgatgatttgctcaagt

SEQ ID NO: 28164 - DNA, 613 bp, Zea mays
  Clone ID: LIB4746-043-G10_FLI
ccgggtgtgttgtgttgagtcttgttgtttactgacgagctcgccatggcctccctctcctctgccgccgtcaccgccccttccttcgccgcaccagcgccagcccgcgccgtggtcagaaggaggtccttcaccgtgcgcgcctctctccgcaaggccaccggcaccgccgccgtggcaatggctgccagcgccctgcttgccggcggtgccatggcccaggaggtgctgctgggcgcaggcgacggcgggctcgtcttcgagcccagccagttcaccgtcaaggccggcgacaccatcacattcaagaacaacgccggcttcccgcacaacgtcgtcttcgacgaagacgaggtgccgagcggcgtcgacgccaccaagatctcgcaggaggagtacctcaacgcgccaggcgagacctactccgtcaccctcaccgtgccgggaacctacggcttctactgcgagccgcatcaaggagccggaatggtcggcaagatcaccgtcaactaattaagctagctatcgatcgatatccattcatgtattagctgttgcttcctgctttgtactccgccgatctgtccatctctacatgttttcgtcttcacat

SEQ ID NO: 28165 - DNA, 688 bp, Zea mays
  Clone ID: LIB4746-045-F2_FLI
ccgggatttcgcttcgcacggccggctctccgctccgccagacccggaccggcaccacgccacggctccggccatcacgcgccgcgcacaccatgaccacggttgcgcaccatcaccacctcgccgctgccaccgtgctcttcttcgtcgcattcaccatggcacctctcgccgccggggaccccgtgggccagctctgcggtaccagcggcaactacacgctcaacagcacctaccagggcaacatccgccgcctcgccgccacgctgccgaagaacacctccacctccgcgacgctcttcgccacggacaccttcggcgccgtcccggacatcgtctacgcgctcgcgctctgccgcggcgacaccaacgcctccgcctgcagcggctgcgtcgccgccgcgttcctggacgcgcagcagctgtgcgcctacaacaaggacgccaccatgttctacgacccctgcctcctccgctactccaaccagaacttcctcgccgaccccaacagcgatggccgcgggaccgcgctcatcctcaggaacacgcagaacgtcaccgcgccgttcaaggtgttcgacgcctccgtcgccgcgctcctcctcatgaacacgcagaacgtcaccgcgccgttcaaggtgttcgacgccgccgtcgccgcgctcctcaacgccaccgccgcctacgc

SEQ ID NO: 28166 - DNA, 1630 bp, Zea mays
  Clone ID: LIB4746-046-F11_FLI
ccgggaagcataaagacagcgagagagagagggaggaatcttttgtgacgacgaacgcagggtggtcgtttccatggggaagctcgcggcgaggctgcgggccttctccaggaaccgatggctggtgctggtggccgcaatgtgggtgcagtccatggccggcatcggctacctcttcggcgccatctcgccggtgctcaaggcccgcctcgggtacaaccagcggcagctggccgcgctggccgtcgccaagaacgtcggcggctacgtcggcgtcgtcgctggcacgctctccgccgcgctgccggcgtgggcgatgctgctcatgggcgcggcgcagaacctcctcggctacggatggctctggctcatcgtcaccggacaggcgccgccgctgccgctctggatggcgcgtgcatccgacagggccagcttcgtgttcgtctacgccgtgtgcctgctcctcgcctcgtacctcgccggcgtcaagctggtccaagacttcctgcagctgtctgacggcgtggtcgtttctctcaccgtggttctgctcgtcctccttatctcgccggttgccgtccctgtggccttgacgctgacgccggaagccgagtgtccgatccgggaggccctcctgtcgtcgtctgaaccactgacgggagaggggaacgcttcgcaagaatcgcctccatgcgcatctgagagcgggggcaggccggcaccgtacctgggggagaacttcaccatgatggaggcactggtgaaggctgacttttggctgatctgggtgtcgtttttgcttgggtcgggatcagggctgacggtgatggacaatctgggccagatgagccaggctcttgggttcgaggatgcgcatatcttcgtgtcgttgacgagcatatggaacttccttggtcgtattggaggtggctacttctctgagatcattgccaggcaacgagcatatccaaggcacatagcactggcatttgctcaggtgctgatcgccgctgcgcacttcctcttcgccatggcctggcctggaactatctacatcgggaccttcctagtcgggctcggatacggagctcactgggccatcgtgccggctgccgtctccgagcttttcggcataaagcacttcggcgccatgtacaatttcctcgctctagcaaaccccactggatcccttgtcttctccaacctcatcaccagtaccctgtatgattacgaagccgagaaacaggctcgccagcgtcgtcgtcgggtcatggcggaactgctggcgtcgtctccaagatcgcttcacagcgctggtctttttgctggtgcagtggtggaggaggaggaccactcatcaagtgcgaagggcctgcttgcttcttggtcagctctctgattatgtcggtgctgtgcgttgttggagccggcctgagcctcgtcactgttcacaggaccagacgggtttatgctcgtctgtatcggtccgtacgaacgtgaaattttcgtagatagaagtataaaatcatcgtgctacttacttcgtaccaaattatatatgcttgtatatacacatagagttacgttgtaagagaccattcgttgtgtaaatatatacaatatttgagtg

SEQ ID NO: 28167 - DNA, 1945 bp, Zea mays
  Clone ID: LIB4746-047-F8_FLI
ccggggagggagcgtctgagctcgccagaaaagcccctgacagtccggcacccgcaagccgcaaagtgcagcctcgttgctacaggaatgctgagaaatgtctgaccttgccggaaagcgcaacctgcgcagtggccgcaactgccaccgcaagcacgtcgaggacgggtaggttcatcggcctcgtcgtcgccgggttttcaggtaaagtcaggtcaggccaactgtgtcgaagaaaggaaggaggtgggcggcaatggaggatgcggtggcggcggacgggaagagcgtgctgcaggggcggtacgagctggggcgggtgctggggcacggcaacttcgggcgggtgcacgcggcgcgggacctgcgcacgggccgcagcgtcgcggtcaaggtggtggccaaggacaagctggagcgcgcgggcatggcggagcagatcaagcgggagatcgccgtcatgaagatggtgtcccaccccaacatcgtggagctgcacgaggtgatggccacccgctccaagatctacctcgcgctcgagctcgtccgcggcggggagctcttctcccgcatcgcgcgcgcggggcgggtccgggaggacgtggcgcgctgttacttccggcagctcgtcgccgcggtcgacttctgccacggccgcggggtgttccaccgagacctgaagctcgagaacctgctcctcgacgaggtaggcaacctcaaagtggcggactttgggctcagcgcgctcgccgggcacgcgcgctccgacgggctgctccataccgcctgtggcacgccgtcatacgtcgcccccgaggtgctcggcgggaagggctacgacggcgccaaggcggacctctggtcctgtggcgtcatcctctacgtgctcctcgttggcagcttgccattccacgaggacaacctcatggtcatgtaccggaagatgcagcgcggcgagttcctctgcccgccgtgggtctcagcggacgcccggaagctcatcggcgagctgctcgaccccgacccgagcacgcgcatcaccgtcgctcgcctcgtcgagacgccgtggtaccggaagccgttgcccgtcctgccgccgctcaacctcaaggagccaaccccggacgcgcgccgcgccacctctgacaaggaagagcccgaggtgctgaacgcgttccacctcatctctttctcggagggcttcgacctgtccccgctcttcgaccagggccgtggcggcggcgtagggaggtctagcgcgggcggcatccgtttcgtgacgcgcgaggccgccagcagcgtggtctcccgtctggagtcgctggtcaccggccgcggagccaacatgcgcgtgacaaagagcggctcgcggggcgttcgtttggaggccgtgtcgcgcgggcgctcgggggcgcggctggcagtggccgcggagatcttcagcgtggcgccgtcggtgctcctggtggacgtgaagaaggacggcggcgacacgatggagtaccggtcgttctgtagcgaggagctccggccggcgctcaaggacatcgtctgggcctccagccaggacacaccgggcgccgcttgatgtcgtcgctgtcgctcctgccaccattattgtccttgcccatcaattgctgttggtgtccgtgtagggggggtcgtgctcgtgcattattgtttggtgacgaagtgatgtttgtttgtcgtttgccactctcgtagttggtttctgctgtggtgcagcggctgctggcagttgcagttgggctgttgcccgcggggcgcgagcaaagcagaatcagcgggaactagcattcgtatcctgcatgcacgcccataccgtgtcagctctgaagtgggaagaactgtaacaagtagtagtacgaatgtaccagggtgatgtgctttcgagtcacttgtgtatatattcatttttttactg

SEQ ID NO: 28168 - DNA, 994 bp, Zea mays
  Clone ID: LIB4746-047-H3_FLI
ccgggaaaaaaaaaaaaaaaataaccaccacgcaccacctcaccagatctttcttcctgttgcttcctcggctggtttccttctctcgccgcgtcgcctgcttcttcccccaaccaaagacacgaatcagccatggcgctcgcctccgccacgtcccgccccctcctcggtcgccccgccggcaccgcgcggccccacctcgccgtttcctcatcctcccccgcctcctcgatccgcttcccccgcggcgccgacggcggcgccagcagagcggccgtctctctccgcgcccccacgcctccagcggcggcaacagcaacatctggtagcattgctccagcaatttcattgactgaaaaggccttgaaacatctgaaccaaatgagagctgaacggaatgaagttttgtgcttgagaattggagtgaaacagggtggatgctcaggcatgtcttacaccatggaatttgaaaatcgagagaatgccagccctgatgattctgttgtagagtatgatggttttgcaatagtctgtgaccccaaaagccttcttttcatgtttggaatggagctggactacagcgacgccctcattggtggcggcttcttgttccagaatccaaacgcaacaaaaacctgtgggtgcggcaaatctttcgcgactggaaaggagaccgaggccgcggcaaccacttgcaacaactagagtagagaaatattgttagctaaacgtgatgtggcatgttgtatagcttgctcatgttgaagccctgtggctacaccacagatacataaagaggcatagttcaaaggaattacaccattaccaatggcctaattcagattttcttgtttggtgatcattccgaagtccttaaacttgtggtatggtctctcaaaatgcattgtattttcaggtatccaaacttgtcttgacgtgtcgtccaggcctacaagtactaaaattttatttttacatttttaaacttgtcaag

SEQ ID NO: 28169 - DNA, 1116 bp, Zea mays
  Clone ID: LIB4746-048-C4_FLI
ccgggacagcggccagcaaactgcctccgtcctccctgcgggctgtgccgcctcttcttcgcgtcggcgccgccctccttccttctcttctgctgctgatggaactggatcctcgcctctacgagaacgtctctgtcagcgacaacgatgtccgaaacatagttctatcttatcttatgcacaactgttttaaagagacggcagaggcattcctatctagcaccgggttgaatttacctgtcgactatagtgtggatgtggataagcgtaaagcaatttttaattttgtgctagaagggaatgcccttaaagccatagagctgacagaagaaatggcacctaacttgctagagaatgatatggatctacattttgatcttcttagtctccacttcattgagctagttcgctccaaaaaattcacagaagctcttgactttggccagaaaaaattgacatcatttcagaaggttaccaagtatattgagaaactagaggactttatggccctcctggcttatgaagagcctgagaagtcacctatgtttcatctactaagcccagagcacaggcagaatgttgcagagggcttgaatcgggctgtccttgcacatgctaatcttccggcatattcatcgttggagagggtggtccagcaagcgactgtggttagacaatacctacagcaggaagttggcaaggcctttctgagcaagtaaaatgtgcaaatggtcacttcttgagaacagggtaccacctctccaggccatcatgtacatgtacccttgtggagtgcatacacgatgaagtagtttatacagttcaggtgttgttgacaccacttatacagttgcaatggtgttgtactttgaaaaggagggtgctgtatgctgtctgcttccttgatttacattctgttttacttgtctctgccttcgacatggcgaaagcatgtatgtattgacctgttgagctattctgtgcgttcgttcggtgaactcagttcgagtcggtttgtaattggtctttttttattactaccgccatgtgcagaggctaaaggtccgaactctggatgcgtaagcgtaacgggttattctgtccatggtactcctt

SEQ ID NO: 28170 - DNA, 1181 bp, Zea mays
  Clone ID: LIB4746-048-H9_FLI
ccgggaccaacctcagcacaccaaggagagtacgtggaggagcagccatggcttcatcggtggccgccgcggcgagcacattcctgggcacccgcctggcggacccggcgccacagaacgggcgcatcgtggcccggttcgggttcgggttgggcggcaaggcgaagcctgctccgaagaaggtggcgaagacatcgacctcctctgaccggccgctgtggttccccggcgccgtggcgcccgactacctggacggctcgctggtcggcgactacgggttcgacccgttcggtctcgggaagcccgtggagtacctgcagttcgagttggactcgctggaccagaacctggccaagaatgaggccggcggcatcatcggcacccggttcgagtcctccgaagtcaagtccaccccgttgcagccctacagcgaggtgttcggcctccagcggttccgcgagtgcgagctcatccacggccgctgggccatgctcgccaccctcggcgccctctccgtcgagtggctcaccggcgtcacctggcaggacgccggcaaggtggagctggtggacgggtcctcctacctgggccagccgctgccgttctccatctcgacgctcatctggatcgaggtgctcgtgatcggctacatcgagttccagcgcaacgccgagctcgacccggagaagaggctgtaccccggcggctcctacttcgacccgctcggcctggcggccgaccctgagaagaaggagcggctgcagctggcggagatcaagcacgcgcggctcgccatggtcgccttcctcggcttcgccgtgcaggccgccgccaccggcaaggggccgctcaacaactgggccacccacctgagcgacccgctccacaccaccatcttcgacacgttcggagggtcctcttaagcccgccattgctccgccccgtccatcgaccggccggaacgtgttcttggattaattaactacgatctctatgagcctggggatggatcaacccgtcgtgcgtggtctcgttttgtgatgagtggaagagagaggatggcaagatcgatcctttgttaatggagatctcgttaattaggagagctaccgctgggacttggtggtttgtaatatatgatccaaccagtgatgaatcaatgcattcacttgtgtacacat

SEQ ID NO: 28171 - DNA, 1258 bp, Zea mays
  Clone ID: LIB4746-049-F12_FLI
ccggggtcccgctggtgtggtggcgtcctttttttccgccgggagataaaccgaccggacccctgactgcgacccgcagctgctcctgcttccgatccgaacttctctcgcccgccggttcttcgcgagcaattcttataaagcatcatcatcaccacttgtgatgggtggaagccagtacgatgatgaatgggtgttgcccagtgccgatatcactcttgttcttgttgggaaacttggctatggaaagagtgcaactggaaatagcatccttggacgggaagcatttgtatcagaatattcacattctggtgttactaatacttgtcagctgggaagcactaccctgatggacggccggaccatcaatgttattgatacaccagggttatttgatatgagcattgcatcagacgatgctggtaaagagattgttaaatgtatgaacatggctaaagatgggatacatgcagttctaatggtttttagtggcacatctcggttttctcgagaggatgcaagtacaattgagactattaaggtcttttttggagaaaagattgttgaccacatggttttagtttttacttatggtgatctagttggtgaatctaagttgaagaacatgctcaatgatgcgccagagtatttgcagaatgttgttgagctatgccaaaacagagttgtcgtcttcgataacaggaccaaggaccgaaggctccaagcgcagcaacttgacaaattgctctatgtagtggactcggtttgtgcaaacaatggaggaaaaccatttacagatcaaatgttcactcgcatcaaggaggtgcatgatagggaaaaagaggtgcataccttgggatattcagatgagcagatatctgagttgaaggaggagattcatagaactagggatgaacagcttgcacagataaccagcatggtcgaggaaaagctaaaccgcactgtggagaagctgcaacagcagctcatggaggaacagaacgcaaggctggaggccgagaaggtggcgcatgaagctatgcggaaatcagaagcgcagatccaggagctgaaggagagactcgagaaggctcgactggaaaacgaggagttccggaggatggcgcagagcagtaaatgtgctatcctatagtacttgctagaaaaactctgtgcggctatcgtgctgacgcgtctcttttttttttgtctgtagcaccttttttaaccgtttatttattacgcgacaactgttatg

SEQ ID NO: 28172 - DNA, 903 bp, Zea mays
  Clone ID: LIB4746-049-H8_FLI
ccgggaactctctatcctcttcccccctcgtccatccccatcccaccgccttgctctcccctctccacttccagctgtccatggctgcagcagcgtgctcctctgcctcgccgctcctcctcccctcagggccgagacatgcgtcggcctccagggcgtggtttctcggcggcaggagcagggcgctgagatcagaggcgccgtgctgctgcaaggccgccgccgcccgtggaagcgctccgcaatgcgggacggtcggtggtggcagcagcagcacccggagggggctgctaggcgtggccctgggagcctctgccttggggctggccgcgtttgacgccgtcgccgccgggttgccgccggaggagaagcccaagctctgcgacgccgcctgcgaaggcgagctcgaaaatgtgcctatggtaactacagaatccggactgcagtacaaggatatcaaagtgggcgaagggcctagcccacccgttggttttcaggttgcagcaaattatgttgctatggtgccaactgggcagatattcgacagttcgctggagaaaggtcagccctacatattccgtgttggatcagggcaggtgatcaaggggcttgatgagggaattttgtcgatgaaggttggaggactacgtcggctgtacatacctgggccattagcgttccctaagggtcttacttctgctcctggaaggccaagagtacccccaagcagccctgtcgttttcgacgtcaatttactgtacataccaggtctcgatgatgagtgaaggcattctgtggcaacaatcatcttttttgtatacttcattcgagagcaacatactgtacatctagagcacaattctttcaagctataaaatctatgcgaatatctatgttaacccg

SEQ ID NO: 28173 - DNA, 583 bp, Zea mays
  Clone ID: LIB4746-050-E2_FLI
ccagggacgagctcgccatggcctccctctcctctgccgccgtcaccgccccttccttcgccgcaccagcgccagcccgcgccgtggtcagaaggaggtccttcaccgtgcgcgcctctctccgcaaggccaccggcaccgccgccgtggcaatggctgccagcgccctgcttgccggcggtgccatggcccaggaggtgctgctgggcgcaggcgacggcgggctcgtcttcgagcccagccagttcaccgtcaaggccggcgacaccatcacattcaagaacaacgccggcttcccgcacaacgtcgtcttcgacgaagacgaggtgccgagcggcgtcgacgccaccaagatctcgcaggaggagtacctcaacgcgccaggcgagacctactccgtcaccctcaccgtgccgggaacctacggcttctactgcgagccgcatcaaggagccggaatggtcggcaagatcaccgtcaactaattaagctagctatcgatcgatatccattcatgtattagctgttgcttcctgctttgtactccgccgatctgtccatctctacatgttttcgtcttcac

SEQ ID NO: 28174 - DNA, 1041 bp, Zea mays
  Clone ID: LIB4746-051-F10_FLI
ccggaatttctctcgccctgcgcccgccatgcctctcatcctaatctcaggtttcccttctgcgggcaagaccaccagagcccgacaactcgagcaattcttcgagtccaagattgccagcgctcctcctgatgcccgcacgtcccgcctcaaggtgcatcttatcaatgaccagactctcggtgtgccgcgctccgtctaccgtacggccagagccgagaaggatgcgcgtgcggaagaatattctgccgtcaagagagtcttgtcacgggatgatattgttatcgcagatggcctgaactacatcaagggctttcgctaccagttgtactgcgaggccaaagccctgcagacccccagctgcgtgctgcacgtaggcacgccgcccgaccgatgtcgcgagaacaacaagaaactcttggcggacgaggggactgacggcggatacgaagaggacgtctttgagaacctcatcttccgatacgaagagcccaatggcatgacgcgctgggacagtccattgttcattgtggttgaggaagacgagacgccgccatgcgaccagatatgggaagccatgattggcagtgacggcaagttgaagactgtcaagcccaacctggcgacagtgctgaaaccagcgaccgagcaaaattacctctacgaacttgacaagacgacgtcggacattctcacgcagataatggtctaccaaaaagatcacgctggtgaaggaggcggacaaatagctgtagcagatgtcgagaagcccattgaactgcccgcgacgccaatgactctcccacaactccagcgcatacgacgccagttcatcaccctaaaccgacaacacagcttttccaaggcgcggataaaggaggtctttgtcgactacttgaacgccgagtttctgcgttagaatgattgtagtcatgtgcagggacagcgtcgtttccagggctactatagtcaaataaactatatagtcgcatcccgatgtcggaattatatccccaatagacaaagaattgcgtgatcccc

SEQ ID NO: 28175 - DNA, 638 bp, Zea mays
  Clone ID: LIB4746-052-F12_FLI
ccgggagaaatccattgcagaaaaacgagaagaccggggaggaaggcacgagaagcaagagagctaggcttccggccgatgttccttcacctccgccgccctatgcccgtcctcccctctcttgttccgccgaccccacgccagtagagatgagggccacatcgtccccggtgcccgccgccgtcgtcctcgtcgccccctcctccccctccgccgccgccgtagcagtgaaacctcgtgccgcagcgagtggcggcggaggaagcacagcaggcaggcgcgacgtgcttgccgccggtaccgggctgggcgcggcgctgctgctggcgctggggccggcgcgcgcggcggacgaggagtacgtgagcgagaccgggtcactgttaattactgtgagcttgttcccgcctctgcagctttgctcgaccgctcgcaattacgccgccgcgttctgttgtggccatgtgaatggggtgttcgacgaaatgctaagtagggcagcgagtcgtggagagcatatccaatgatattggataccatatccataaacacaaatcatttaatccctaaagtagatcaatgtccatttcaaccatgggattaaacctttctgccaataaagagtatatgcaccttgc

SEQ ID NO: 28176 - DNA, 1172 bp, Zea mays
  Clone ID: LIB4746-054-E8_FLI
ccggggaaaaccaaaccaaaatcggagcggcggagcaaaacgatccgtagcctcgcttaccttcgattcagctcgaccagggcactaaccgggaagccaatgccgcgcgagtcgcgagatctgtagcgccaatcggcttcaccggcggcggggtgggcatggaagcgcagaacggctcctgcggaggggcgcccgtggtgctcaacgtgtacgacctgacgcccatgaacaactacctctactggttcggcctcggtattttccactctggaatcgaagttcatggtatggagtacggatttggagcacaccagtttccggcaagtggagtattcgaggtggaaccgaaaagctgtcctggtttcatctacagaagatctgtgtggatgggcacaactgacttgtctagagcagagttccgctcgttcattgaaaatcttgcaggaaagtacaacggcaacacgtatcatttgatttcgaagaactgcaaccattttacagatgatgtctgtaagagcttgaccaagaaatcaatccctgggtgggtgaataggctagcaagagtgggttcattttttaattgtcttctaccagaaagcatccaagtttccacagtaagacacgttcctactcaatctgcattttctgggcggatctacacccgggccacccggtccagggcccggggcttgatccatataactgagccttagacccgtgctctggcgtgggatagacgaggagatttttttaaccacggcctggaattcgctcccacggggagtcgaactcagtaactgagtgctactcataccacctaaccaactcagatgatgatatggattcggtatcttcatcggttcttggagacagtgatctgggagagttagaccaacaccttctgccatcgtcaactgctgacgtccattctatagacgtgccaccaaatctagccaaggatcttctctgaattatccaaccctttggattccacgtagcaggatagcttaaattgctgcagttgatgtccacttagtgcctctccaggtggcataggaatgcaggagtgtagatgaatgctgctgattgtgttgactctttgccactgaatttgttacatacgcacacacagctctcgacagaaatgacgtgctttctaattattttcctat

SEQ ID NO: 28177 - DNA, 1411 bp, Zea mays
  Clone ID: LIB4746-057-F2_FLI
ccggggaaaccaagcaacccaatccaaaccagacaagcaaggaatcccccgatggctcatcgcgttctcctcctcctctctctcgcgtcggccgccgcggttgccgccgccgtcgacgcggaggacccgctgatccggcaggtggttcccggtggagatgacaacgatctggagctgaacgcggagtcccacttcctgagcttcgtgcagcggttcggcaagtcctacaaggacgccgacgagcacgcgtaccggctgtccgttttcaaggccaacctgcgccgcgcgcgccggcaccagctgctggacccgtcggcggagcacggcgtcactaagttctccgacctcacgccggcagagttccgccggacctacctcggcctccgcaagtcccggcgcgctctcctcagagaactcggggagtcggcgcacgaggcgcccgtgctccccaccgatggtctccccgacgatttcgactggagggaccacggcgccgtcggccccgtcaagaaccagggttcgtgcgggtcgtgctggtcgttcagcgcgtctggagcgctggagggtgcgcactacctcgcaactggcaagctggaggtgctttcggagcagcagttcgtcgactgtgaccacgagtgtgattcatcggagcctgattcatgtgattcgggttgcaatggtgggctaatgacgacggcattcagttatctccagaaggccggtggccttgagagtgagaaggattacccttacactgggagtgatggcaaatgcaagtttgacaagtccaagattgttgcttcagttcagaacttcagtgttgtgtctgtggacgaggctcaaatttctgctaacctcatcaaacatgggccattggcaatcggcatcaatgctgcctatatgcagacatacatcggaggcgtgtcatgcccatacatctgtggcaggcaccttgaccatggtgttctccttgttggatatggtgcttctggtttcgcccccattcgcctgaaggacaagccttactggatcatcaagaactcgtggggcgagaactggggggagaacggatactacaagatatgcaggggttccaacgttcgcaacaagtgcggcgtcgattccatggtctctaccgtgtccgcagtccacgcctcgaaggagtagactctggtcagcggtgataatcgtgattccatatattgtagaactataatccctgctagtaatccatttgtgctgtttatgtatcgaaggcagcaaagatgtgtgaagcggcaatgggatgcttgctgtaaggtaatatgtttggcttgctaggcatgctacacgctatttggatgtagcaacgttatcaccagctgtatacgctttttaatcgacaacatttgaataatatgtacataacatc

SEQ ID NO: 28178 - DNA, 951 bp, Zea mays
  Clone ID: LIB4746-057-G10_FLI
agtgagtgaaaaacagccgtattgtcccgactcccgaccccgaccgatcctcgcctgctgcagccatggcgacctccgcggcgctctccaccgccgccaatcccacccagctctaccggtcccgcgcttcgctgggcaagccggtgaaggggcttggcctgagcatgggccgcgagcgcgcccagcggagcattgcgtgccaggcggcgagcagcatctccgccgaccgcgtccccgacatggagaagcggaagctgatgaacctcctcctcctcggcgccatctcgttgcccaccgtcggcatggtcgtcccctacggcgccttcttcgtccctgccggctccgggaacgccggcggcgggacctacgccaaggacaagctgggcaacgacatcacggtggaggcgtggctcaacacgcacggtcccaacgatcgcacgctcgcgcaggggctcaagggtgaccccacgtacctggtggtggagcaggacaagacgctggccacctacgggatcaacgccgtgtgcactcacctcggctgcgtcgtgccgtggaacggcgccgagaacaagttcatctgcccatgccacggatcccagtacaacaaccagggcaaggtggtccgtggaccggcgcctctgtcgctggccctggttcacgccgacgtcgacgacggcaaggtcctcttcgtcccgtgggtggagaccgacttcaggaccggcgaggacccgtggtggaaggcatgaggatgatccggaaccagcggtgctcagtgctcacacatgagacctatgtatgcctccgttccttgtgatgaggaaataggcttgcgttcgttctccgtgggcgttgttcctacaaattcacttgctctttgtctctctctatatatacacactgtataaaacaagaacagctgtttatcatctcttcttatataaccttttgaac

SEQ ID NO: 28179 - DNA, 1095 bp, Zea mays
  Clone ID: LIB4746-058-B3_FLI
ccgggaagacctttccaagccagcaggcaacagcgcaccaatcccgacgcgaatcgcccagaacgcgaggcggaatttcccatcctcttggacccccctctgctcttcctccttccccgctcctcgtccacacgctccgctccgattccgcccgcgtccgcggacccagatctggcgcccgcgcccatggcgacgcgcaggcgaatgctcctcaaggtcatcatcctcggcgacagcggggtcggcaagacctcgctgatgaaccagtacgtcaacaacaggttcaacaaccagtacaaggccaccatcggcgcggatttcctcaccaaggaggtccagatcgacgaccgcctcttcacactgcagatatgggatacggcaggacaggagcggtttcaaagtcttggtgtggcattttataggggagctgactgctgtgttcttgtatatgatgtcaacgtatccaagtcatttgaaaagctcaacaactggcgtgaggaattcctaattcaagccagcccatcagacccagagaatttcccatttgttgtgcttggtaacaagatcgatgttgatggtggtaacagccggactgtttctgagaagaaggctaaagcatggtgtgcttcaaagggaaacatcccctactttgagacgtcggctaaagagggcttcaatgtagaggctgcatttgagtgtatagcgaggaatgctgtaaaaaatgagccagaagaagatatgtatcttcctgatacgattgatgttgggggcgctggaaggcaacaacgttcgtcaggttgtgaatgctagaagatatggagcactgcgatttgctcggttggttggtctgattctctagggcttgtttgggtggcctgtgtcatttcatatgtgtatttagtttgcaaaactgctatttgtggacactggatagtttggaagtctgcatgcgggtgcttattgtcgactcccgtgtagatgcagagaactcatttgtaactaccgtttcggtgttgtatcgtatctgcgctagatgctagtgttgtagcgcttttgattgttgatggattgcatatatgtactatatttgtacag

SEQ ID NO: 28180 - DNA, 920 bp, Zea mays
  Clone ID: LIB4746-058-B5_FLI
ccggagttcacctacgcggaaaatcactagtgattcgctgaacaaaaaaaattacaagaaggaatcgagagcaaatgctatcatcaaccacactccgaccaccggcgtcgccggcgccggcacacctcaccatctgctcctcgcccgcagcgtggcggcgtgcgccggcggtgcgcgcggtgcggaactacgactccatcccgaagcgggagcccttcagctccagccgcagcatcctccacgagttcctcaggcaggacaagcccctcatccagcgcaccaaggatcagatcacagattattgcacggccatcgaaggcgatgagtgctgcagctgttgggacgcttactttgaactgaataaacttgagcaagagctgcccaaagacgaaatcgcaaggatggtgaaggactcggagggtgacgtgaggtacctgatagagagcatccaccatcgctcggatctgcggaagaaggtggcagagaagtctcgcaattcagtaccgtcaagctcccagggcagtagagccgcaaagccaaggccgttccccgtgcctgatgggataccgaaaacgcaagaagagctcgctgaagaagaagaggcgttgatgccggagtctccatacacgaggctgctgagaaggatgggaaggtaccctgattggtacaccccacgccctgatcatgagaccgactgaatcgagttgcccaccatcctagtgtcccttttgggagttttttggagcatggtaatctgaggctccttttatgacctgtggtacgtggtaagattagctttgtatctatgcagaattgcagattagggtgttcttactcttttccaattgtactaatgaaaaccggtgtgtgctttatgctgtaaatatgtggtaaatagctgaacgttttattcgaggtcc

SEQ ID NO: 28181 - DNA, 1059 bp, Zea mays
  Clone ID: LIB4746-059-A12_FLI
ccgggaaaacgataatcacgaaacaagctatccgacgcagttttgaccacagccgacggcaatagaagtagagaactccgacttcttcactcacacacacatggcgctgatgagccttggcgccgccgggtacaccacggccaccgcgccgcctcgtccccgaagatgcaccctgccgtttcgcgccgccgcctcccctgcggcactggaccgccggcgacggccgcataatgtggctggcgacttcttcgtcgaccaccgctgcatcgactgccagacctgccgatggatggcgccggaggtgttcaagagggtggatggcaaggccgccgtagcggcgcagcccagctccgaggaggagaggaccaaggccctgcaggcgctgctatcctgtccaacatcctcaattcacactgagaaacctccaaaagacattcttaaagtgcaaaacatgtttcctctaccaatcgacgacaagctactcccagtggaggaggctaccgcagatgttgagtggaaacttgaaggaaatggtccatggaacttaggaacagattttgaacttatccatacgccaggccataccccaggctcagtgtgcttgtacttcaaaccgctaaaggtgctgttcactggagaccatgttgcaaagtcataagaatcagacgatctgaacctctttctgatgtacagcaagcagtcagtgagccttcagctggaaagcatcaggaagctactggagctagagttcgagtggcttttacctggacatggctatcgaatcaagtacaaagatgtgcgtgccaagaatgtagccacggagtccctcctagctaattacacaagctaggagcctatgagcatcttacttgagttagtgctcgcaaataagcattccaggaggctgaatgttgatgctatgtttccagagaatagtgtgcatgatgctcatcagctcttgaatgtgcatttgttaccagagactgtaccttgtgctgcacaccaagcaagtgaatgaatcaagcatacatgactcggcccaatgaatgctttttccag

SEQ ID NO: 28182 - DNA, 808 bp, Zea mays
  Clone ID: LIB4746-059-B9_FLI
ccgggacagctgcctccgtggtcagaacaggatcgcgagacctctccccctccttttccttcacagccgcggcgctcccctcggcgcgtctgaggccggtaggagcgtgggtccgcggtggagggtacacctgcaggctccgcgccgtccgcgccatgggctccgcgccgtcgtcgtcccaatccccgtctccgcacacgccttcaggacaaacccaagggaaagcagattataaatcactgagtgaagaggagtggaagaagcgcctgactgaagagcagtattatgttactcggcagaagggcactgaaagagcattcactggggaatactggaatactaaaacgccaggcatttatcagtgtgtctgctgcgacacccctctgtttcagtcatcaaccaaatttgatagtggtactgggtggccatcctattataaaccaattggtgaaaatgtcaagagcaagcttgatatgtcaatcatttttatgccccggaccgaggtgctctgtgcaacctgtgatgctcatctggggcatgtcttcgatgacgggccaccaccaacagggaagagatactgtatcaacagtgcatctctgaaattgaagccccaatagttgctggatactttagcaagaagtcaactataacgctggtccgccctatgtaaacttcgggtttctgtatataaactactcgagttgtagcatatttattattctctttgttatgtaatatatactagaaaaggaggcgcgcttcgcggcgccctacctccattagtcaaatgcattaacaaactttatcc

SEQ ID NO: 28183 - DNA, 1719 bp, Zea mays
  Clone ID: LIB4746-059-C6_FLI
ccggaaaaatccgccgggcatcggccgcctcctaccccctctagtccaccctgtccccggacaggcagcgtcggagcgccggcgttgccaacgccaacgcggaggcgagacgatcgggaaggaggggagcagaggaaggatagtctggagcttcacctgtctgcttctgcggtctgcgggagcgatcacgtgacagttgcgacctccaactggagctggcttcgcatagacttctggaggaggcaacgggattgcgatttggaacatggggagttcgatcggctgcttgggaggcggctccaagtcgaggcaagatcagaattgtcaggtcgtcgcgggttcgtctcacagttcagtgcaggtcatgtcttatcaagagctggaaataatgtacaggtattctccctaaacgagttgaagactgccacacaaaactttcacatgttgaattgcattggccgtgggggtttcggagcagtgtataagggaaacctcaaagatggcactcaaattgcaattaaaaagcttgcagttgagtcaaaacaaagaattagtgaattcttgacagaaattaatgtcatatcaaatgttaggcacccaaaccttgtcaggctgattggttgctgcgctgaagggaaaaacagactattggtgtatgagtatgcggagaataatagtttggcgaatgctttgcttggaccaaagaataaatgtatcccattggactggcagaaaagagctgctatatgtattggaactgcttctggccttgcttttcttcatgagaaagcacaaccatgcattgtccaccgtgatatcaaggctagcaacattttacttgataagaaactgctgcccaaaattggagattctggattggccaagatttttcctgataccgttactcacattagcacgcgtgttgcaggaacaatgggttatttggcaccagagtatgcattgttgggacaattaaccaagaaagcagacatatatagttttggtgtgcttcttctcgaagtgataagtagtgaaaacagcagcaagccgacttgggggcctaatatgcatgttcttgtggaatggacatggaagctgcgggaagaaggaagactcttggaaattgttgatccagaactgaaaaagtacccagaggagcaaatgcttcgtttcatcaaggtggcactgctgtgcacacaagccacgtcccaacagaggccatccatgaagcaggttgtcaatatgctatctaacaaagcagaaattgacctgcaaaatgtagttgcaccaggtgtactgaaagaacctcggcagcgtactggcggctttgggagtttgacagcaggcacgacgtcgtcaaagccaaagcaccaaaggcaatccagctgaatcatacagtacaaagaccaacatgaacagctgtcaatttagcataaccgacgcatcaccaaggtgacgtgatagactgtcagcttgcaagcttgtttgacgtcttcactcttcaaaggtgtcacaaactctagtgatatggaaggcctgatccattttcatcctgttttagagttacatagtatgcgaaggccgctgtgaattgctgatgtacaggaattgtagctcatcttttttttttgttcttttgcaaaggaggaattgtagtttgatttgacgattgcttttacgttctggcggccacgttacaaaggacagttattttaggct

SEQ ID NO: 28184 - DNA, 795 bp, Zea mays
  Clone ID: LIB4746-060-A6_FLI
ccagggtgatcctacctatctccaatcatggcctccaccatcggtaacaacgaccgcctcacccagctcaaggccttcgacgacaccaaggccggcgtcaagggcctcgtcgacgagggcgttaccatcgtcccgcccatctttcatcacctgcctgaccctcacgacgccacctctaacgcccatgccgccatcccggtcatcgatctcgccgccttctcagcaaccaacaacgacgaggcccacgcccaccagcagctggtcgcccaggtcaaggcagccgccgagaccgtcggcttcttccaggtcgtcaaccacggcgtgcccgcggagctgctcccccgcatgctcgcgtcggtgaaaagcttcaacgaggagcccgccgacgagcggcggccctactacaccagggaccaggcgaggcgcgtgaggtacgagagcaacttcgacctcttccactcgcccgccgccaactggcgcgacacggtcttcttcgaggactcggcggcgcccgaggagatgccgccggcctttagggacgtcgtgccggagtacgccaggcaggcgcgggggctggcggcgcagctgctggcgctgctgtcggaggccctgggcctgcacgcgggctacctgcagcgcgacgccggctgcctgggcgggccctcgctcgcctgccactactacccgccgtgcccagagccgtggctcacgctaggcaccaccaggcactccgaccccagcttcctcacggtgctcctgcaggacgccgtgggcggcctgcaggtgctcctcggc

SEQ ID NO: 28185 - DNA, 701 bp, Zea mays
  Clone ID: LIB4746-061-H9_FLI
ccgggactttccccagtactctactcacccacccactcacggactcatctactgagcagcgcggtgggcatccgagcgagagggcgagcgcggaaggatcggaattccgaaggttgggcatggaggcgagcggcgagaaggctgcggtggtgcgacggctgatggaggcgaaggaggtgtccgggaagaccttctcgggaatcgccgccgagacgggtctcaccaacgtctacgtggcgcagctgctgcggcgccaggcgcagctcaaggccgacacggtgcccgcgctgagggcggccctgcccacgctcacggacgacctcatcgaactcatgatgcagccgcccttccggtcctaccaccccaacatcgtccacgagcccgccatttacaggtgcgcggcgcccccccatcccctttgcaaacgacgacggggggcaatttgctttcccccaatctgaatcggaacgtgactcgtcaggcgagcgtagcgaaatcttgtttgtttaattggctacaccaagcgcttggggtctagttagcaagggatatatttgttctccaggaatattgcggtttagtgcagtttgacgtttgaataactctgactcaatctcaagtatttgggcacagctttcctatgtttaaacagagacttttggcatttcagaagactggtttggattaaagacgagagaacc

SEQ ID NO: 28186 - DNA, 1985 bp, Zea mays
  Clone ID: LIB4746-063-F4_FLI
ccgggagcacaccagcccactcgcgccaccacctcacctcgcctccgcgcgcggtcgatcactccaccaccacacacatcctccgtcttgcacgaccagctgcacggtgtagccatggaccagctccccaagcgcccggccaactacgtgccgctgagccccgtggggttcctggcgcgcgccaatgccgtctacgccgaccgcgcgtccgtcgtctacgggggcgtccgcttcacctggcgccagacgtacgagcgctgccgccgcctcgcgtccgcgctgctgtccctcggcgtccgcaggggggacgtcgtctccgtgctcgcgcccaacgtgccggccatgtacgagatgcacttcgccgtgcccatggccggcgccgtgctcaacgccatcaacacgcgcctcgacgccgccgccgtcgccaccatcctgcgccactccggggccaagctcctcttcgtcgactacgactacgtgcgcctcgccggcgacgcgctccgcctgctcgccgccgccgccggcggcaccgtcccgctcgtcgccgtcgtcgacgacatcgactcgcccacgggggcccggctcggggagctcgagtacgaggccctgctcgcgcacggcgaccccgacgccgacctcccgccgctcgccgacgagtgggacgccgtcacgctcaactacacgtccggcaccacgtccgcgcccaagggcgtcgtctacagccaccgcggggcgtacctgagcaccaccagcctgctgctgcagtggggtgtggccaccgaccccgtctacctctggacgctccccatgttccactgcaacggctggaccttcacctggggcatggcggcgcgcggcggcgtcaacgtctgcatccgcgacgcgcgccgcgccgacatctaccgcgccatcgcgcgccaccgcgtcacccacatgtgctgcgcgcccgtcgtcttcagcatcctcctcgacggcgacggcgacggcgacggcaggcagctcgaggcccccgtccacgtcctcaccggcggcgcgccgccgccggccgcgctgctggagcgcgtcgagcggatcggcttcaaggtcacgcacgcctacggcctcacggaggcgacggggcccgcgctggcgtgcgagtggcgcgaccagtgggaccgcctcccgctcccggagcgcgctcgcctcaaggcgcgacaggggatcagcgtcctgtccctcgccgacgccgacgtcaagaacgtcgacaccatggccagcgtgccgcgcgacggcaagagcctcggcgagatcgtcctccggggcagcagcgtcatgaagggctacctcaacaacccggaggcgaacgacggcgccttcaggggcggctggttcctcaccggcgacgtcggcgtcgtgcacccggacgggtacatcgagatcaaggaccggtccaaggacgtgatcatcagcggcggggagaacatctgcagcaaggaggtggaggaggtgctgttccggcacccggccgtggccgacgcggcggtggtcgcgatgccgcacccgcgctggggcgagacgccgtgcgccttcgtcgtgcccagggacggcaaggcccacgggctcagcgaggacgacgtgctcgcgttctgcgccaggcgcatggcgcgcttcatggtccccaagaaggtggaggtcatcggtgcactgccgaggaacgcgctgggaaaggttgagaaggtcaagctccgggaggcggcacgtaagctggcgccaaccgtgccggcgcagataaagccaaaagggaagacgacgacctcaactgtggtcggcggtggtcgctgcgaggagcagccggtgtcgaggttataggtagcaaaacactacagaccataacttgtgttcaacttcttttatgtgcagtgatattgtaggtacttaattattacgtgcacaatgtaaaatacatggtgtcaaaacgtgaaggaaataaatttcttttttaaaat

SEQ ID NO: 28187 - DNA, 681 bp, Zea mays
  Clone ID: LIB4746-063-H2_FLI
ccgggtctgtccttcccaattctcaggcaaccccgtcgtcttccgccatgaaccggcaggggaaaacacggctggccaagtactatgtcgctctcgagggctccgagaagcacaaggttgagtacgaggtgcatcggctcgtggtcaaccgggaccccaagttcaccaacttcgtcgagttccgcacgcacaaagttatatataggagatatgcaggactttttttctctatatgtgtggacatcaccgacaacgaattggcatacttggaatgtatccatctgtttgttgagatattggaccatttcttcagcaatgtgtgtgaacttgatttagtatttaatttccacaaggtttacttgatattggatgagttcattcttgctggagagcttcaagaaacaagcaaaagggcaattatagagaggatgggcgagcttgagaagctggaatgaaaagaaacaatggtgtagtgtacattagcaatttagcataggtccggagctagttctgcccaatcgacaaattacctccatatttttcacaattctttgtacctgttgtgcatcatctttgcttcacttaaacctttatcaagccgtgaatcggtgtatgtctttttaacgtttcctgaggttactgagggtttttgaactgcatgtgaggattttagtttgatgg

SEQ ID NO: 28188 - DNA, 653 bp, Zea mays
  Clone ID: LIB4746-065-G11_FLI
ccgggagcagcagcagcagcacagtcatccacactaacgaacgaactcttgctccgatcacgagctagctgaggtcgacgatggcggctgtgctgaacagcaggaagacgccgcaggcggtggtggccgtgctggtggcggcggcgctgctggcttcgtccgcttcggcggcgatcacctgcgggcaggtggggtcgtcgctggcgccgtgcatcccgtacgcgacggggagggccagcgcgctccccgcgtcgtgctgcagcggcgtcaagagcctcaacagcgcggcgcggaccagcgcggaccgccaggcggcgtgccgctgcctcaagagcctcgccaacagcgtcaagagcgtcaacatgggcaccgtcgccaccatccccggcaagtgcggcgtctccgtcggattccccatcagcatgtccaccgactgcaacaagatcagctaagttacgacgaccaagctaataagcctaccgaacgtacacgtacgtcccgcgcgctgcacgagtgatgaagccagggaagaaataaaataaagccgctgtattgccaggagcagcatgcagtatcgatctatatatatactgtactgtagtactctatattatgtatgtgtgtcctgcagtgcgagttgcttcgatccaccg

SEQ ID NO: 28189 - DNA, 1566 bp, Zea mays
  Clone ID: LIB4746-067-F5_FLI
ccgcgaccccaagtcccgatcggccgccgatcccgatcccgaatccctccctggctccacagcacccctgctccacacggccgccagcaagccgccggccctaggccttaccgtcgcggcgtcgcctgctctccagcaagacttcagtcgcctgcccccagcggcccagcctggctgccgctgctctccagcaaggcagcaaacgccggcctccggccgcccgtccctacgccagaggccacccctaggccgctaggcttccaccgccgacgcccacagaaaccgtaggcgcccaccaggccaccacgagatccctgccgtgacggagaatggaggccgccgcggccgtcctccccacgctggtgccctccgggagcgcggtggtggtgctcctcgcctacctcgggtatctcgccgccgctggagccatcctcccagggaagctcgtcgacggagccctactcccggactcctctcgcctccactatcgctgcaacggtttgctctcgctcctgctgctgctgggactctcggcgttcggtgtctacatggggtggatgtctcccacggttgtagctgacatgggactcgaacttctgtcggtgacctttatttttagtgtcattgtctcttttgcactctacattgccggcatcaagtccggccacaaaagttcttctttgagaccacatgttagtgggagcctcatgcaagattggtggtttggagtgcaacttaatcctcattttatggaagttgacctcaaattcttctttgtgagggcaggaatgatggcatggttatttattaacctctctttgtttgcaaagagctacttagctggttcagccaatctttcggtcattctctaccaatttttttgtgcgtggtatatcatagattacttcgtccatgaagaattcatgacctcaacgtgggacattattgctgaaagactgggtttcatgctggtgtttggtgatctagttttcatccctttcaccttcactattcaggggtggtggcttttgaagaacaaagtagagctgtcccttttgtctggtctagctaacttatgcatctttcttattggctacctagtgttccgaggagctaacaagcaaaaacatatgttcaagaaggaccccaaagctcctatatggggaaaacctcccaaagttgtcgggggaaagctactagcatctggttactggggcatcgcaaggcactgcaattatctcggagacctgctgctagcactttcgttcagcttgccctgtggagtgagttccgtggtcccatacttctaccccacgtacctgctcattctactggtcttgagggaaaggcgcgatgaggcgaggtgctcgcagaagtacagggagatctgggcagagtactgcaagctcgtgccgtggaggatcctgccttatttgtactgaagagacggtagaaaccaaggcagctcatggccctgggccagctgtaaaccttattttgtttgcccttaaccagttggtgaatgtgatgtagcactcggtaaactgtgaccgtgcaagcttttgc

SEQ ID NO: 28190 - DNA, 866 bp, Zea mays
  Clone ID: LIB4746-069-C3_FLI
ccgggaacgcaccgtccttccctttcctcctcctcctccctctcctcggaaggtcaagtgacggtatttgtgaccatggcagggaccttactccagtcagttgccctgggaacaccatttgggggtcgcatgagaacccattgttggaggtcccatggcaccaggaggcctgcctctatgttggcagtgtcacttagccgccctgtcaagatgtcagcatttgtgggtctaagatcagtgcatagcttctcggtcacaccgacggtgtccaattccaggtcggcagttgcatcttacaggtcatcgcgacagacaagacgatctcgttttgtcactcgggcaatgtttgagaggttcacggagaaagctattaaggtcatcatgcttgcgcaagaggaagcaaggcgcctgggccacaactttgttggaactgagcagatcctcttgggtctgattggagagggcactggtattgcagctaaggtgctcaagtccatgggaataaatcttaaggatgcacgtgtggaggtggagaagattattggccgcggcaatggttttgttgctgttgaaataccattcacaccacgtgcgaaacgtgttttggagctctccttggaggaagctcgccaattaggtagtttgattatcaaggtttcttgtaaaatgctgtccttgcacgttgccttaaatttcattttctaatctctccaatttatgcatgaaaacatggtagaaggaattgctggtcaatgtccttgtgatacacttttggtcttgttttctaattttacttatttgtattcgaacaaaaatagcctattgaccaatgttctgttttcccagaaaggaatttcattttcctt

SEQ ID NO: 28191 - DNA, 951 bp, Zea mays
  Clone ID: LIB4746-069-F2_FLI
agtgagtgaaaaacagccgtattgtcccgactcccgaccccgaccgatcctcgcctgctgcagccatggcgacctccgcggcgctctccaccgccgccaatcccacccagctctaccggtcccgcgcttcgctgggcaagccggtgaaggggcttggcctgagcatgggccgcgagcgcgcccagcggagcattgcgtgccaggcggcgagcagcatctccgccgaccgcgtccccgacatggagaagcggaagctgatgaacctcctcctcctcggcgccatctcgttgcccaccgtcggcatggtcgtcccctacggcgccttcttcgtccctgccggctccgggaacgccggcggcgggacctacgccaaggacaagctgggcaacgacatcacggtggaggcgtggctcaacacgcacggtcccaacgatcgcacgctcgcgcaggggctcaagggtgaccccacgtacctggtggtggagcaggacaagacgctggccacctacgggatcaacgccgtgtgcactcacctcggctgcgtcgtgccgtggaacggcgccgagaacaagttcatctgcccatgccacggatcccagtacaacaaccagggcaaggtggtccgtggaccggcgcctctgtcgctggccctggttcacgccgacgtcgacgacggcaaggtcctcttcgtcccgtgggtggagaccgacttcaggaccggcgaggacccgtggtggaaggcatgaggatgatccggaaccagcggtgctcagtgctcacacatgagacctatgtatgcctccgttccttgtgatgaggaaataggcttgcgttcgttctccgtgggcgttgttcctacaaattcacttgctctttgtctctctctatatacacacactgtataaaacaagaacagctgtttatcatctcttcttatataaccttttgagc

SEQ ID NO: 28192 - DNA, 1032 bp, Zea mays
  Clone ID: LIB4746-070-F11_FLI
ccggggctccaatttgacgagtcgtcggcgctagcaagatcattcgctccgccgctctccgacccatttctaacaagcaccagctgctgcgtaacatatatcacacagtgtatgcacacctgcaggcagcatggccgggtgcaagcaggacgacgacgccggcggccgttctccttcgtcgtcgtccatgggcagcagcagcagcacccacccgccggcgctatccgccgcgtcgtcgtcgggcttccggccgacgacggagaggagggacgacctcagcaccgaccttcagctagggctctgcagcctgtcgccggcggcgtcctccgccctcctggtggcagcggagagcaagagcgtcccttccacgccaaggggcagcaggaccacccaagactggcccccgatcaaaccattcctcagaagcgccttgacagcctcggcacgccgacgacggcggacactgttcgtgaaggtgtacatggaaggcgttgcgatcggccggaagctggacttgctcttgctggatgggtacgacagcctcctagcgaagctccgccacatgttcaaggcctccatcacctttgctgatgctatggagtaccaccaacgagttcctcacgagaagcctgcacatgttctcacctatgaagaccgggatggagactggatgatggttggggatgtaccgtgggagctcttccttggaagtgtgaagaaacttaggatttgcaagaacagataaatgctagttagcaaagcttattattcgtgcgctgcatggactctatttctttcttctttttatttatatcggttcatacagaaagattttgctggccacagagtggacatgcatgtgataccgaggctatatatactgaccgtgtacagtatactgaagaaaagtcaatcttgataccttccctagaaaattaatttttggtattttttatgtttccttttctgttttctctgagtgccttgtaaataccatggctgtttgttaaagaagaggcgatttgcgtgaag

SEQ ID NO: 28193 - DNA, 958 bp, Zea mays
  Clone ID: LIB4746-070-F3_FLI
agtgagtgaaaaacagccgtattgtcccgactcccgaccccgaccgatcctcgcctgctgcagccatggcgacctccgcggcgctctccaccgccgccaatcccacccagctctaccggtcccgcgcttcgctgggcaagccggtgaaggggcttggcctgagcatgggccgcgagcgcgcccagcggagcattgcgtgccaggcggcgagcagcatctccgccgaccgcgtccccgacatggagaagcggaagctgatgaacctcctcctcctcggcgccatctcgttgcccaccgtcggcatggtcgtcccctacggcgccttcttcgtccctgccggctccgggaacgccggcggcgggacctacgccaaggacaagctgggcaacgacatcacggtggaggcgtggctcaacacgcacggtcccaacgatcgcacgctcgcgcaggggctcaagggtgaccccacgtacctggtggtggagcaggacaagacgctggccacctacgggatcaacgccgtgtgcactcacctcggctgcgtcgtgccgtggaacggcgccgagaacaagttcatctgcccatgccacggatcccagtacaacaaccagggcaaggtggtccgtggaccggcgcctctgtcgctggccctggttcacgccgacgtcgacgacggcaaggtcctcttcgtcccgtgggtggagaccgacttcaggaccggcgaggacccgtggtggaaggcatgaggatgatccggaaccagcggtgctcagtgctcacacatgagacctatgtatgcctccgttccttgtgatgaggaaataggcttgcgttcgttctccgtgggcgttgttcctacaaattcacttgctctttgtctctctctatatatacacactgtataaaacaagaacagctgtttatcatctcttcttatataaccttttgaacactctgt

SEQ ID NO: 28194 - DNA, 788 bp, Zea mays
  Clone ID: LIB4746-070-G3_FLI
ccggggaccccttcgccccgtatcgttccctcctcctctcttttccccaccgccccctttcttggcgtctacccggcgcgaccaggaccgaatcctaaggccgccggccgccgccgccgccgtctactcccgttggacacggtaaaacctcctccctcctcgtccgtgtcgccggggtccggggtccaagcggctgcgcgcgcggtctcgccgccggcgccgatctgggcgccgccggcgttgaccccgtccgattcgccccgggctgcgagacctgtacctccgcgaccggttactcggaacttctactcgcctgtgggatcctcgagcggatcagatgagcacatcgacttgagcaccacgctttttggttggaaggcgaatcgtagagctttcctgggtttctctgagggctcttctcagatgtggcgtcctccagagtctaccacatactgtttgaggagtcctggttcttttcggaatccggactaaccaagggctcctactgtgcacgactgcttgacaggatatttcggattattattatgtgcgtgcgagcgcgcgtgtgcgccttctagaggcatgattcttaaatcagagccttcgtgtttaaatccgagtttgccttcgtgttgaactatgagtgaatttcattttctgcgggagttgaagtcgatttagatcaggacagtgtttcttgcgatctgattaagccttttttttcttgctattgtgatttcttttttcagagtttggagtaaagaaaccaaccctgcatctgtattcag

SEQ ID NO: 28195 - DNA, 1220 bp, Zea mays
  Clone ID: LIB4746-071-D5_FLI
ccgggacagcgtccgttccctgccacagagaaacgaactctcttgagtaccacaaaaaaaaacattggcattctttgtagtagagcacagagcgaagccgtcaacgatggcttccgctccgctgccggcggccatcgagcccgggaagaaaggcaacgtcaagttcgccttcgcctgcgccatcctcgcctcaatgacctccatccttctcggctatggtgcgaacacacacacacacacttcactttatattgctttttgcatgggcatcggctcatgaggtacgtacggccggactttgcagatatcggagtgatgagcggcgcgtcgttgtacatcaagaaggacctgaaaatcagcgacgtgaagctggagatcctgatgggcatcctcaacgtgtactcgctcatcggctcgttcgcggcagggcggacgtccgactggatcgggcgccgctacaccatcgtgttcgcggcggtgatcttcttcgcgggcgccttcctcatgggcttcgccgtgaactactggatgctcatgttcgggcgcttcgtggccgggatcggcgtgggctacgcgctcatgatcgcgcccgtgtacacggccgaggtgtcccccgcgtcggcccgcggcttcctgacgtcgttcccggaggtgttcatcaacttcggcatcctcctaggctacgtgtccaactacgccttctcccgcctcccgctccgcctgggctggcgcgtgatgctcggcatcggcgcggccccgtccgtggtgctcgccctcatggtgctcggcatgcccgagtcgccccggtggctcgtcatgaagggccgcctggcggacgccaaggtggtgctggggaagacctccgacacgccggaggaggccgtggagaggctcgctgacatcaaggccgccgccggcatcccgcaggagctcgacggcgacgtggtggccgtgccaaagaagcgggacagcgaggaggcgcgggtgtggaaggagctcatcctgtccccgaccccggccatgcgtcgcatcctcctctcgggcatcggcatccacttcttccagcaggcgtccggcatcgacgccgtggtgctgtacagcccgcgcgtgttcaaggccgccggcatcaccagcgacaaccagctcctgggaacgacctgcgcggtgggcgtcaccaagacgctcttcatcctggtggccacgttcctgctcgatagagt

SEQ ID NO: 28196 - DNA, 1575 bp, Zea mays
  Clone ID: LIB4746-071-H6_FLI
ccgggattctattcctccacaccgatcactcgctgctcccctctctcgccggagctccgggccggatggcggcggcagcagcagctcctcccgcctccgtgatcgcgtgatggacgcacacaccgccgcgctccgccgatggacgacgccggaaggccaccaccacacgctcccgtggcggtgaccgcctccgcctccgcctccgccaccgccgcgcccgcccctccccaaccctcagccactgctgccgtcgacaggtcctcccccgaccccgacgcgctctatgaagaggggatgtggcaacagatggccatggacagcggtgccactatgcaacctgggtcatatcctgagcgaccaggtgaacccgactgcacttactatctcaggactggattgtgtcgatttggcatgagctgccgattcaatcatcctcccgataggaatctggctattgcctctgccagaatgaagggagaatatcctgagagagcaggacagccagagtgtcagtattatctgaagactggaacatgcaagtttggccctacatgcaaatttcaccatcccagggaaaaggctggaattgcagggagggtgcagctaaacacatcaggatatccactccgcccggacactgtaaatatgcaaatacttgtaaattccaccatccggaacttttcaatgtggtgccttcgtcacgtggttctcctatttatacctctgtacattcctctgcgagtgctggtccgcagtcctatactggaactatgccaagctgggctttcccacgagcttcttttataccaagccctaggtggcaaagtccttcaaattatgcgccgatgattgtacctcagggccttgttcaaatgccgagctggaattcatatactggtcagctgcagtcacctggggctcaacaaacttatggaagttcacaacaaggcgaagctagtacaggaaatcagggaatgctatcaccctacagatctagttcgtttcctgtgcctcaatatgcgctgcagagagagaatgtatttcctgagagacctgatgaaccagaatgccaatattacatgaagacaggagattgtaaattcggtgcagtgtgcaagttccatcatccccgggtgagatcactgccccctccagattgtgtcttaagtccaatgggtcttccactacgtccaggtgaagaactgtgcaaattctattctcgttacggcatctgcaagttcggcgccaactgtaaattcgaccatcctacagtggttgctccaatggtctatgcgtatggtttctccgcgtctgcttcccctgcatccgcttcgactaatgtacctatggcgcgacgccttctgggatccccaccggggtctggatatacatcttaggcgtcgttttttttttcagttgacctacttcgatttataaaatccatggcactgcctcaggcgctgtgaatgtttctcctaacttcctgccgggatcaaagttctgtaaattgagttgctaccggagatgtacagccccgttttttttggttaatccagatctttgggaataactccc

SEQ ID NO: 28197 - DNA, 539 bp, Zea mays
  Clone ID: LIB4746-072-F8_FLI
ccggatccacaacccgcaacatgggcgtcaccaagaccgttattctcgagggcaacggcccctcccccgtcaagggcgacaccgtcaccatgctctacaccggctggctcaaggaggctggcaagaaggacggcaagggcaagcagttcgacaccactgagaagcccggccgcgggccattcaagacccccattggcgttggtcgcgtcatcaagggctgggacgagggtgttgtccagatgaagctcggcgagaaggctcgtcttgatatcagctctgactacgcctacggcaaccaggatgttggcggcggtctcatccccgctggctccgagctcatcttcgaggttgagctcaagaagatcaactaaacgatgcggcataatgatgatggaggatggcacattgcaggtatactggaagggtggactgtatggcggaaaagctaccagacgctctttctcctgcgcggcgcatgtcgctgatgctggggttgctgtagaaaagcatttgcctgtttaatgcatgtcatcttgatg

SEQ ID NO: 28198 - DNA, 2232 bp, Zea mays
  Clone ID: LIB4746-072-G9_FLI
ccgggcataaagtctgttgatgtagcgttgagctctttcagcagtgtgtattccttgcttcccgcaatccaaagacgcctccttttctcgtctccaaatccgcaaagttttcgtccatttggcaatctcgtcagtgcttgtcaagctctagaatcaaagcctgatcccaacttctgcgccaaaatcccatctttagtgattccgtccagtccgatggggacgctcggggacagactgcgggccttctcgacgaaccggtggctggtgttcgtcgccgcaatgtggctgcagtccatggccggcatcgggtacctcttcggcaccatctcgccggtcatcaaggccgcgctgggctacaaccagcgccaggtggccgcgctcggcgtcgccaaggacctcggcgactgcgtcggcttcctcgccggctcgctctcggccgtgctgccgtcgtgggcgatgctgctcatcggctccgtgcagaacttcctcggctacggctggctctggctcatcgtcaccaggcaggcgccggcactgcccctctggatgatgtgtgttcttatctatgttgggaccaacggcgagacattcttcaacacaactgcacttgttacatgcatccagaacttccccaagagtagaggtcaaacagtgggtattatgaaaggatttgcgggccttagcagtgcaatcttgacacaactatatgccgtaatgcacacacccgaccatgcaacacttgtattcatggttgcagttggtccatcattggttgccattggtctgatgtttattattaggcccgttggaggtcaccgccaggtgcgtccatccgacaagaacagcttcttgttcatctacactatctgcttgctcctcgcctcatatcttgtcggcgtcatgctagtccaagatttcatgcaactgagtgacaatgtggttaattttctcactgtcattctactcatacttcttgttttaccaatcgtgatccctgtgaccttgacactgtcatccaaaacacaacatccaattgaagaggctctcctttctgatccatcaaaaggagagacaagcacttcacaagagaaagaggatcaaccagaggtcattttaagtgaggtggaagaggagaagcctaaggacattgattcattacctccatctgaaaggagaaagaggattgaagagttgcagaccaagttagtgcaagctgcagcaaggggtggggttagaattcggaggcagccacgccgaggtgaaaacttcaccctggtgcaggcattggtgaaggctgatttttggcttatttggtggtcgctcttacttggatcaggatcaggtctgacagtgatcgacaatatgggtcagatgagccaggctgttgggttcaaagatgggcatatttttgtgtcattgacgagcatatggaatttccttggtcgtgttggaggtggctacttctctgagattattgtcagggaacacacatacccaaggcacatagcgctggtaatttgtcagatcctgatggctgttgggcatttcctcttcgcaatggcttggcctggaactatgtacgttggaaccttcctggttggactcggatatggagctcattgggctattgtgccagctgctgtctctgaactttttggcgtaaaacacttcggtgcaatgtacaacttcctcacagtagctaaccccgcagggtcactcgtcttctcaggccttattgctagtaatttatatgactatgaagctgagaaacaagcgcagcgccgtcagataacatcactgacatctccaagattgtttcacagcatgggttttcttgcagatggaacactgaagtgtgaaggagctgtctgcttttttgtgagctcactgattatgtcagcgttctgtgttgttggagctggcttaagcctcatagttgtttacagaactagaagggtttatactcacctctatggttcaaaccgcacatgaaaattccacggagataggatatgccatttcctcttgttccatgtaccatagcttttgcatatatgtgtcatacatacacaaaattaaagtttgcctgtatattctctaaacatttgagaggttttaccacacgaactgctgttcccaaatagaaatttatacacgcctcatgtgtcggatagctagactgtagttcaagcttggaccatgaattctgtaataaaggctttgtactacgac

SEQ ID NO: 28199 - DNA, 607 bp, Zea mays
  Clone ID: LIB4746-074-H5_FLI
ccgggaaccatctaccagcgactcagcgagcgagagcagcacacacgcagctagctaggagcagcagcagcagcggcgatggcggcctccatgatctcctcgtcagctctggcggtggcgcctcagggcctgccgcccctcggccgccgcgcctcctccttcgccgtcgtctgctccaagaagaagatcaagaccgacaagccctacgggattgggggtggcctgaccgtcgacgtcgacgccaacgggagaaagggcaagggcaagggcgtgtaccagttcgtcgacaagtacggcgcgaacgtcgacggatacagcccaatctacaacgaggatgactggtctcccaccggcgacgtctacgtcggtggaaccactgggcttctgatctgggccgtcaccctcgctgggatcctcggcggcggcgccctcctcgtctacaacaccagcgccctctccggctaaggatatccaatgcatgcgcttcttgcgattcgtcatgtaaaatcagggtgtctgtctataatctagccaccatggatgatgctcaaccttcgtcatgtaacaataatcagtgctactcttcattacataattttgatgctat

SEQ ID NO: 28200 - DNA, 726 bp, Zea mays
  Clone ID: LIB4746-074-H6_FLI
ccgggaagataatgcgaaaccgaaggataacgtggaggtctgcaatgaataaagacgaagcgagtggtaactgtaattaaaaaaaaaaaacagtccagcctgcctgtgcctgtttcgtgtgtctgaggatctcctgatctcctcctcccccctcccctgctccctccccatcgtcatccacctcctccacccatcccctcctcgctcgctctctcgcggcttccctctcctcctctgacctgcgcatctgaagcatagatagcaagcaaggaccctgctcagtgctcacctcgccggaggtgctgctgctacggcggcggcggcgtactactactactacgacgagactctgcgcgcgcacaagcccacaggagtgcagaattgaccgcgcgcacgacgacgacgacgaccaccaacagcaacaggagagaggaggagatcgataagggatggagggcggcgagacgacgctgtccgggttcggcggtgccggggcccccggcgtggacaccaaggtgctgcacgcgttccagaccagcttcgtgcaggtgcagacgctgctggaccagaaccgcctcctgatcaacgagatcaaccacaaccacgagtccaaggtgcccggcgacctctcccgcaacgtgggcctcatcagggagctcaacaacaacatccgccgcgtcgtcgacctctacgccgacctctcctcgctcttcgccgcggccgacg

SEQ ID NO: 28201 - DNA, 1050 bp, Zea mays
  Clone ID: LIB4746-077-B9_FLI
ccgggtctagtagagaggctagtaggtggtcctcgaacgaagatgttggcggtgttcagcgggcaggtggtggaggtgccggcggagctggtggcggcgggcagccggacgccgtcgcccaagacgaaggcgtcgcagctggtggggcgcttcctggccgcctccgagccggccgtgtccgtgcagctcggcgaccacggccacctcgcctactcccacaccaaccaggcgctcctccgccccaggtcgttcgcggccaaggacgaggtgttctgcctgttcgagggggtgctggacaacctgggtcgtctgagccagcagcacgggctgtcaagcaagggcgccaacgaggtgctcctcgtcatcgaggcctacaagacgctgcgcgaccgcgcgccctacccggccagcttcatgctcgcccagctcaccggctcttacgccttcgtcctcttcgacaagtccaccaactccctgctagtcgcatctgaccccgagggcagggtgccgctcttctgggggatcaccgccgacggctgcgtcgccttctccgacgacatcgacatgctcaaaggctcatgcggcaagtcgctcgcgccgttcccgcaaggctgcttctactccaacgccctcggagggctcaagtgctacgagaaccccaagcacaaggtcaccgctgtccccgccgacgaagaagagatctgcggtgccactttcaaggtggtggaaggctctactgtcctgacggcgctgcactgatcgatcatcagctgctggcggaggcgatgcgatgatgatgcagaactttgtacatgcgttggtggatggtggtgtaacatagtggctgccaacaagtcatgctcatgcaaaccgatgaatctatctctgtatcatcgatctcggttgcttgctagtccagactccagacataactatatatatatagctggtgctaataaataggagtataatcgtcatatcgatcggttgcgtgtggaatgccaatcatgtgtgtaatctgttggcaaataacaaacctctgttcctcct

SEQ ID NO: 28202 - DNA, 1180 bp, Zea mays
  Clone ID: LIB4746-077-C11_FLI
ccgggacaccaacctcagcacaccaaggagagtacgtggaggagcagccatggcttcatcggtggccgccgcggcgagcacattcctgggcacccgcctggcggacccggcgccacagaacgggcgcatcgtggcccggttcgggttcgggttgggcggcaaggcgaagcctgctccgaagaaggtggcgaagacatcgacctcctctgaccggccgctgtggttccccggcgccgtggcgcccgactacctggacggctcgctggtcggcgactacgggttcgacccgttcggtctcgggaagcccgtggagtacctgcagttcgagttggactcgctggaccagaacctggccaagaatgaggccggcggcatcatcggcacccggttcgagtcctccgaagtcaagtccaccccgttgcagccctacagcgaggtgttcggcctccagcggttccgcgagtgcgagctcatccacggccgctgggccatgctcgccaccctcggcgccctctccgtcgagtggctcaccggcgtcacctggcaggacgccggcaaggtggagctggtggacgggtcctcctacctgggccagccgctgccgttctccatctcgacgctcatctggatcgaggtgctcgtgatcggctacatcgagttccagcgcaacgccgagctcgacccggagaagaggctgtaccccggcggctcctacttcgacccgctcggcctggcggccgaccctgagaagaaggagcggctgcagctggcggagatcaagcacgcgcggctcgccatggtcgccttcctcggcttcgccgtgcaggccgccgccaccggcaaggggccgctcaacaactgggccacccacctgagcgacccgctccacaccaccatcttcgacacgttcggagggtcctcttaagcccgccattgctccgccccgtccatcgaccggccggaacgtgttcttggattaattaactacgatctctatgagcctggggatggatcaacccgtcgtgcgtggtctcgttttgtgatgagtggaagagagaggatggcaagatcgatcctttgttaatggagatctcgttaattaggagagctaccgctgggacttggtggtttgtaatatatgatccaaccagtgatgaatcaatgcattcacttgtgtaag

SEQ ID NO: 28203 - DNA, 660 bp, Zea mays
  Clone ID: LIB4746-077-D9_FLI
ccgaggtgaacgctaaacagtgtctcttttccagacctgaagaaactccgaccggtggcggcaggtgcgccacccccgaggatctgtgccgcgatggcgacgtcgaataccgcgcggatggaggacggcggcggcgacctgcggagcaccatcaagaagtggaacatcatctaccctgtctacctcaactccaagaagacggtcgccgagggccgccgcatcgccgctgccaaggcctgcccggaccccacctgcatcgagatcgccgactgctgttcgcacctcaagatcccccacgccatcgagttggataaggcgtaccctcgggatttcttccaggtggggagggtcagggtgcagcttaagaaagatgacggctcccccgtcaatcctgcgattaaaacgaagaagcagctgatgatccaagtagcagagctagttcccaagcatcacggaaggacaaagaagcaggagccagcgcccaatcccggtggcagttcaaagaacacaaaaggcgggaaaaagaaaaagtgatgcagtatcattgtgttgttttttattctgttcgtcaccatacactaagcttctgtgaaaaagaaaaagtcttggacgttgttgttatgttgccattgtgccatttctcatgtataagaacttact

SEQ ID NO: 28204 - DNA, 627 bp, Zea mays
  Clone ID: LIB4746-077-G4_FLI
ccggggacctgcagccaaccatctaccagcgactcagcgagcgagagcagcacacacgcagctagctaggagcagcagcagcagcggcgatggcggcctccatgatctcctcgtcagctctggcggtggcgcctcagggcctcccgcccctcggccgccgcgcctcctccttcgccgtcgtctgctccaagaagaagatcaagaccgacaagccctacgggattgggggtggcctgaccgtcgacgtcgacgccaacgggagaaagggcaagggcaagggcgtgtaccagttcgtcgacaagtacggcgcgaacgtcgacggatacagcccaatctacaacgaggatgactggtctcccaccggcggcgtctacgtcggtggaaccactgggcttctgatctgggccgtcaccctcgctgggatcctcggcggcggcgccctcctcgtctacaacaccagcgccctctccggctaaggatatccaatgcatgcgcttcttgcgattcgtcatgtaaaatcagggtgtctgtctataatctagccaccatggatgatgctcaaccttcgtcatgtaacaataatcagtgctactcttcattacataattttgatgctatatatatagt

SEQ ID NO: 28205 - DNA, 712 bp, Zea mays
  Clone ID: LIB4746-078-H2_FLI
ccgggatcactagtcacgttcgtccaccagagacaacaatggccatggagacgtgcttcagagcgtgggcgctgcacgcccccgctggcagcaaggacaggctcctcgtcggcaacctggtgctgccgtcgaagcgggcgctcgcgccgctgtccgtgggccgcgtcgccacgcgccggccgcggcacgtctgccagtccaagaacgcagtggacgaagttgtggtggcggacgagaagaactgggacgggttggtgatggcgtgcgagacgccggtgctggtggagttctgggcgccgtggtgcgggccgtgccggatgatcgcgccggtgatcgacgagctggccaaggactacgccggcaagatcacgtgctgcaaggtgaacacggacgacagccccaacgtggcgtctacctacggcatccgcagcatccccaccgtgctcatcttcaagggcggcgagaagaaggagagcgtcatcggcgtcgtcccgaagtccacgctcaccaccctcatcgacaagtacatcggtagttcatgagcatgccatgccatgccatgcatacatgcatcgacgactaaacacatatgtgtatctctagtagcctttgcatacgggatatgatcaattcaagcagccagccgtctgctactgctgtgttatatataccatacctccatgtcgaatccagagtacattaattagttccg

SEQ ID NO: 28206 - DNA, 1263 bp, Zea mays
  Clone ID: LIB4746-079-H2_FLI
ccgccgcctcttccggcgcgacctcatcggctccccggtccgcctccttctccagcgcggcgcgggggctcccctccctccgcctggccccgccccgccgccgccgcggggacctcgccaggccccgcgccgcggccgaggccgcggcggagagctacgcgtccgcgctggcggaggtggccgtcgagaacggcaccctcgagcagacggtctccgacctcgagaagctggagaagatcttcgccgacgaggccgtcgccgagttcttcgacaaccccaccgtcccgcgcgaggagaaggccgagctcatcggcgagatcgccaagtcgtccgagctgcagccgcacgtcgtcaacttcctcaacgtcgtcgtcgacaacttccgcgcgtccatcgtgccgcagatcgtcgtcgagttcgagaacgtctacaactcgctcacgggcaccgaggtcgccaccgtcacctccgtcgtgcagctcgagtcgcaggatctagcgcagatcgcgcagcacgtccagaagatgaccggcgccaagaacgtccgcctcaagacgcagctcgacccggcgctcatcgccggcttcaccgtgcagtacggccgcgacggctccaacttgatcgacatgagcgtccggaagcagatcgaggagatcgcgtccgagttcgagttgcccgccgtcccgctcgaagtctgaggccggcttgaggcgtccatcctcgccctcgaagctataggaatcatatttgattaaatggtgaatgcactgcataccggattcaaggaatttggtttcaaataaggaaagttgtagaaatgaggagggtgtgaccataaatttcacatgaacggtgtaggaagtagagaaactagtgtccagttcctataactgcagtgctcccttggaacgcaacgcaggaatttcgagtttcacaagcaaaaaacatcccgcattccaaagagggcattaaatggttggaaatgatgtgattattcttcagcaggaagaggaatgtatagaatgctcacacaactgcggctactgtctcaaggaaccaagcgggaatgttggcactgtccccttcagtcagacctgcggatcaacggcggtggctccaaatctccaatactactacatatgaacggacactatttttgtgcgtttctgttgacgggaacctgtgtagttctttctcctttttttccctgtggttgacagacacagacactgtaatatgtttattaaaaacactcatctatat

SEQ ID NO: 28207 - DNA, 728 bp, Zea mays
  Clone ID: LIB4746-080-B3_FLI
ggcctggttttgatagctagtcatcactagtcacgttcgtccaccagagacaacaatggccatggagacgtgcttcagagcgtgggcgctgcacgcccccgctggcagcaaggacaggctcctcgtcggcaacctggtgctgccgtcgaagcgggcgctcgcgccgctgtccgtgggccgcgtcgccacgcgccggccgcggcacgtctgccagtccaggaacgcagtggacgaagttgtggtggcggacgagaagaactgggacgggttggtgatggcgtgcgagacgccggtgctggtggagttctgggcgccgtggtgcgggccgtgccggatgatcgcgccggtgatcgacgagctggccaaggactacgccggcaagatcacgtgctgcaaggtgaacacgggcgacagccccaacgtggcgtctacctacggcatccgcagcatccccaccgtgctcatcttcaagggcggcgagaagaaggagagcgtcatcggcgccgtcccgaagtccacgctcaccaccctcatcgacaagtacatcggtagttcatgagcatgccatgccatgccatgcatacatgcatcgacgactaaacacatatgtgtatctctagtagcctttgcatacgggatatgatcaattcaagcagccagccgtctgctactgctgtgttatatataccatacctccatgtcgaatccagagtacattaattagtttg

SEQ ID NO: 28208 - DNA, 1055 bp, Zea mays
  Clone ID: LIB4746-080-D8_FLI
ccgggaaagaaaccacccacccgcgcgccgtgcctcggttttacggcccttccctcaccgccccgcggccatgaagctggaggtcatgcccaagcccaaacagcgggtgctggaggcgcagcagagggaggaggccatggagatgagcggcctggacctgtggaagcacgagaagccgccaaggatctgccccttgcccccgtcgctcccgccaccgccgccagcgttcgacgaggcggcgctcgtgccgccgctcaacttcgccgtggtcgacgacggcatattccgctccggattcccagggaccgccaacttccggttcctgaagtccctcaacctccgctccatcgtgtacctgtgcccggagccgtacccggggacgaacacggagttcctagaaaagaacgggatcaggctccaccagttcggaatcgaggggcgcaaggaaccatttgtcaacatacccgacgacaaaataagggaggcgctcaaagttgtcttagacccaagaaaccaacctctgcttatccattgcaagagaggcaagcaccgaactggctgtgtggtcggatgcttgaggaagctgcaggaatggtgcttgtcttcagtcttggacgagtaccatcgctttgccgctgcgaaagcgaggatcactgaccagaggttcatggaaatgttcgacgtttcaagcttgaagcacctgacaccctcacactgttaaccaaggcgtgtgatcgattggtcccccaactctagtacatctcaaagcctatcttccgtcagctactgaaccgattcagttgtgaataattttggaatccgctagagtccgtgaggtagtgatgaaaccattgcaaaacatttgtgcttgaatggtttattttcctcctgcatagcgcactgcagagcctgagaaccagattgctgtagtcgatttgcgaggggttctctttttttttttttggtacctttcgcgaggaactcgccattgtttttgggtactgaagcatgtactcgagcagctttgctgaggagaaatgaactattctagtgct

SEQ ID NO: 28209 - DNA, 1443 bp, Zea mays
  Clone ID: LIB4746-080-F12_FLI
ccgggacacagcccggtacgtacgtgcaagagacgagcgtagtaactgtgagcagctagcacatgcatggcgtcgtcgcagctggtcgtcgtgtgcctgtttgtagcgtcggcggtgactgtgacgatgaacggtggcgcgcaggcgcagccgattgtgccggcgatcatctcattcggcgactccaccgtcgacgtcggcaacaacaactacctgccgggcgcggtgttcaaggccgactacgcgccgtacgggcagggcttcgcgcggcacaaggccaccggccgattctccgacggcaagatcgtcaccgacatcaccggtcgctagctataccaccacgcatgcattatgcatggcggcggctgcaggtgtgtgacgaattaattgaacgagttcgttctgtgcattgtttattgttgcagccgaaacgctcggcttcgagagctacgcgccgccgtacctcagcccgcaggcgtcggggaagaacctgctcaccggcgccaacttcgcctccgcggcgtccagctactacgacgacacggcggccatgtatgacgcgatcacgctgacccagcagctcaagtactacaaggagtaccagtcgaagctggcggcggtggccgggcgcgccagggctcgcgccatcctcggcgacgcgctctacgtcgtcagcacgggcaccggcgacttcctccagaactactaccacaacgcctccctgtcccgccgctacgacgtcgagcagtacaccgacctcctcgtcggcatcttctccggcttcgccaacgagctgtacaggctgggggcgcggcggatcggcgtcacgtccatgccgccgctgggctgcctgccggcgtccatcaggctgtacggcgacggcaagggagcgtgcgtgccgaggctcaaccgcgacgccgagaccttcaacgccaagctgaacgccaccgtcagggcgctcaagcggcggcacgccgacctcaagctcgccatcctcgacatctacacgcccctccgcaaactcgcgcaagaccccgcggcttacggcttcgccgacgctagagggacgtgctgccggacggggacggccaagacgagggtgtacctctgcaacccgacgacggccgggacgtgccggaacgccagcagctacgtgttcttcgacgccgtccacccgtcggaggctgccaacgtcttcatcgcggagtccacggtcgacgcgggcatcgagctggtcacctagttagtaggaataaaggagacgacacacatctgcagatctgctcacatgttttctgctccatcgaaacagaactacgtacagtgtctggaatagccagtgaaattaaaaattgtaccgtcggccctgcccttttcgtaatgttgtggagcagtttcctgttccatctgtagccgctcaccagtttcctgtttccatccaag

SEQ ID NO: 28210 - DNA, 542 bp, Zea mays
  Clone ID: LIB4746-081-D2_FLI
tgtcatcatcacccggggccgctatgccggaaagaagtgtgtgatcatttctccccttgacaacggcaccaagtcgcaccccttcccccacgccctcgttgccggtatcgagacctacccatccaaggtcacccgccgcatgtcaaagaccaagcaggccaagaagagcaaggtcaagcctttcgtcaagcaggtcaactacactcacatcatgcccacccgctacaccattgagctcgagaacctcaagggcgtcatctctgccgacacattcaaggaggtctcgcaacgggaggaggccaagaagaccgtcaagaaagcattcgaggagcgataccagtccggaaagaaccgatggttcttcactcccttacagttctaagctttccctttttggtcacggctgggcgcagatgggcatgatttggcacggaagattgtgcatgagcatgtcggtggatatcataagatgacaggaccccaaaatccggcctggcatcatggcgtgtatatcggcttgataatcaaagcatgaaaaatcc

SEQ ID NO: 28211 - DNA, 1385 bp, Zea mays
  Clone ID: LIB4746-083-E3_FLI
ccgggaatctccggtgctcgcatcccgctccgcctccatgcgccgcggcagttccacgacgccagtcctctcacctctgtcctgacccaacacccgggcggctggaacccgcaggtgcgcttagtgccgctcgaggaggctcgccgtttgctggattcgttctgtcctttgccggccggcattgtgccctccgcggcggcgacaggggcgtgcgcggtgctgctgtaggggagggtgacggccatctccctggtcggccgcggcccgggctggtggcgtgcgaggaagacggattcacaaagcacggtgctccccaagtctagcagggtgtgttgtatggcttccacgctccagctgttgttttccattgccatcacagctttggcctttttcctccacccatgcgcatcgactgatgagttccaccgtgagctctacggttggtccaatggcatcgctacatggtatggcgcagctgatggcgctggaactgacggtggtgcgtgtggataccagaatgctgtggaccagccacctttctcatccatgattgccgctggctgctcttccatctacgactctggcaagggctgtggctcttgctatcaggctgtatgcaccggcaatgacgcttgctccggtaacccggtgactgtcgtcatcaccgacgagtgccccgattgcccgtgtcccgatgagcaggtccacttcgacatgagcgggacagccttcggtgccttggcgaagccggggcaggagagccagctgcgtggcgccggcgccatccaaatccagtatacccgggtgcagtgcgagtggcctggcgtcgacgtgaccttctcggtggagccgggctccaacccgaactacctggccgtgctgatcgagtacgaggacagcgacagcgacctcgactccgtggacatgatgcagacgcagggcgggacgtcggggcagtgggtgccgatgcagcagtcgtggggcgccgtgtggaagatcaactcgggctccgtcctccagggccccttcaacatccgcctcaccttcagctctggcagggcgctcgtcgccagcaacgccatacctgcggggtggaacgccggcgtcgcgtaccggtctggcggcgtggctgtgacgagggccaggcccaggagcggtgcctgtcggggctacgaggctgccgggacactggatggtttggtgcatcgtcacgtcgtcgtgttgttatttttgtttctggtgttattgacgctgggagccgagatgcgatgcaatttttttctggttctgggagcgtgcgagtttgggctacatggactgagtagctctgtgtatttttcttgcatcgcagcttagtggatggattactgcgtcgtattgtggac

SEQ ID NO: 28212 - DNA, 1086 bp, Zea mays
  Clone ID: LIB4746-084-C12_FLI
ccgggggcgtggtcattccccaatccccaagtccccaacctgcagccctgcttccacacgaccacaaccacaggcaacgcaacccccaaacccaaaaccctaccacggcgcccatggcttcgccgccgcctcctcctgcccggcaccccacctccgcagcaaccgccgctgcggcgggcaatggccacgacacctccgcagcaaccgccgctgcggcgggaaatagccacgccacctccgcttcgccggtggacgccctcttcctccagaacctcatgacccgcgtccagctccgcccgcccttcctcgacaccaactcattcctcacccaggaccttgacgacttcctcctcaacgagttcgccgcgctatccgccgctgcaggggcgtcggatgatgacgaagacgtggaggatgaggatggtgggctcgctggcggggagggctccggggaggcgaggcggcggcggatgctggcgagggaggaggcgaagctggagaaggagattgtgcggatggtgctggccggggaggccgaggacaagctcaagcccaattcgggccagtccgtggctgtcggcgaccaccacctctgcgtcggtttccacgacgatgccagcggggagtatcgcatctgggaatggcatggccacgtcatgctgttcgacgacgaggaaggatactccgcagagtacatttatggcaaccacttcgagccgctcgctgctgccacagccagggccaagaagaaggagaaggagatgagagagaaggaattgagcatgggtcttcgggatttggtcgtggacactgacgacggtggcaatgccaatcgctccaaggagaacggtagcagcggagggcccagggtagtgcgcaggaatgtcgtcaatggcccaaccacgcctgctaggtaatggctttctagagcttgcagtgtgcttggtggaagaagcagtgccgcagtgcatcaatctgtgtgacaaaaacaaataaagatctgttgtccttttctcgcttatagctgtttaagctgtctattgtattctgttgagaaatcaatcacatctatactttgcttctgtt

SEQ ID NO: 28213 - DNA, 576 bp, Zea mays
  Clone ID: LIB4746-084-H4_FLI
ccgggcgctagctgctgcgactacacactacacgacacgggcggccaccgccctgagcatgagcatcctccgcgcgccgccgccctgcttctcgtccccactcaggctcagggtcgcggttgccaagccgctggcggcccccatgcggcgccagctgctgcgcgcgcaggccacctacaacgtgaagctgatcacgccggagggggaggtggagctgcaggtgcccgacgacgtctacatactggacttcgccgaggaggaaggcatcgacctgcccttctcctgccgcgcggggtcctgctcctcctgcgccggcaaggtcgtctccggctccgtcgaccagtccgaccagagcttcctcaacgacaaccaggtcgccgacggctgggtgctcacctgcgctgcgtaccccacctccgacgtcgtcatcgagacgcacaaggaggatgacctcctataattctagctagctatacaccgccagggcccgtcgtcttgtgccaccacatgcagtaccgcccgcgcaggagatgagacgtgtcgtctcaataattctagctatatatatatatatat

SEQ ID NO: 28214 - DNA, 1496 bp, Zea mays
  Clone ID: LIB4748-001-D8_FLI
ccgggtagctccctccctgaaatctcattcccatgaatttccacacggccagcttctgcgcttccgcggcgataggcctcccaacagcccccaaaatatcggcttcgttggctactggtcgctttgcctgccgcagtgagagatgtctggagacctggaccttcagatctcctgctatctgccttcttgctgctacccccacacgctgcaccctcacagacaccatggatccgagctccgacatcatactcgacactccgttcttccgcatctacagcgaccgccgcatcgaccgcttggtcggcaccgataccgtgccggccggctttgatcccgccaccggcgtcacctccaaagatgtcgttttagacagcaactccggcctctacgttcgcctgtacctcccggacacggctaccgggtctgaccactactccaagaaattccccgtgctagtctacttccacggcggcggctttgtcacccactcggcagcgtctccgccctatcagcccttcctcaacacccttgccgcgaaggccggcttgctcatcgtctccgtgaactaccgcctcgcgccagagcacccgcttccggcaggttacgaggactccttccgcgcgctcaagtgggcggcctctggaagcggggacccctggctatcacatcacggcgacctgggccgcatcttcctggccggggacagctccggcgggaactttgtccacaacgtcgctatgatggccgccgcgtcagagttgcaaatcgagggcgcggtcctcctgcacgccgggttcgctggcaagcagcgcatcgacggagagaaaccagagtcagtggcgctgacgcagaagctgtgggggatcgtgtgccccgaggcgacggacggcgtggacgacccgcggatgaaccccttggccgccgcggcgcccagcctgcgaaacctgccgtgcgagagggtgctcgtctgcgcggcagagctggactcgctgcgggcgaggaacagggcgtactacgacgccctcgcggcaagcgggtggggtggcacggtggagtggctcgagtctaagggcaagcagcacgccttcttcctctacgactccggctgcggcgaggccgtggagctcatggatcgactggtcgcgttctttgctgggaacttgaattcgtcatgtgtggatgtgaccacacatcacacgaccacatccggtgagaccctgagatgaatggaacaaacgaagatgcagctcattgctcaatcgaaataactaagctcagtcctcaaaacaatgaaaaaagaggaagaacagctgagatcggatccttgtactgatcagtttatgttatcgcttgggtcatcaatttctactagttgtgtgcccgtgcgttgcaacggaaacatataataccattgatagcttatgtacgttgggatgaacatcgacatatatctgaccggatcttcttcttccttggggatctggagaaaagcctat

SEQ ID NO: 28215 - DNA, 1350 bp, Zea mays
  Clone ID: LIB4748-004-F3_FLI
ctcgaggccggccgtgagaccagcctcacgcgctcaccgtgctgcctccaccaccgatggctctccctcccggcgcaggggcggtggcgccggcgacgcccttcgccgcgaatccgtgccgtctccggcgggcgtctggtcctcctgccgccgcccttcggctcgggccgctcttctggccatgggaaaaggtgaaaatcggtcccctttctgtttcccccatgggttttggaacatgggcatggggaaaccagctactttggggctatcaagaaagcatggacaacgaacttcaggattgcttcaatctggctctaaggaatggcataaacctttttgacactgctgactcttacggaactggaaggctgaacggacagagcgaacggctactcggtaaattcatccttgagtttgaagggaggattaaatctccagatgatgtggtcatagcaactaagtttgctgcatatccttggcgacttacatcggggcagtttgtcagcgcctgcaagtcttctttggaaagattacaacttgataggctcgggatagggcagctgcattggtctactgctaactatgcacccttgcaggagcgtgccctctgggatggactagttgaaatgtatgaaaagggccttgtaagtgctgtcggtgtcagcaattacgggccgaagcagcttctgaagatccacagctatctagcttctagaggagttcccttgagctcagctcaggttcagttctcgttactgagcatgggtgacgatcagatggagctgaaaagtgtgtgtgattcattgggcattcgcatcatcgcatatagcccgcttggattaggaatgctcactgggaagtatggtgcttctaacctcccaaaaggaccaaggtcagtgctgttccgacaaatccttcctgggctggagcctctgctgtcttgcctgagaaggattgccgaaaagaaggggaagaccatgcctcaggtggccatcaactggtgcatgtgcaagggcacagttcctatcccaggcgtcaaaacggtgaggcatgtccaggagaacctgggcgcgctcggctggaggctgagttctgccgagatctcggagctcgagtccgcagcgatggcggctccgaggaagatgatccagaatgtcttccagactgcctgaccgtgctgaatacatgtgtgtgtatgcatgtttctgcaatcgtctttactgaaaaatctgaaaccgggcagccgtgaaccttttcttctcgtaagattcataatatagatagtcactgccatgttctattagttgtcgtttttgacaaagtttaaataaaacttataaaattttgact

SEQ ID NO: 28216 - DNA, 2254 bp, Zea mays
  Clone ID: LIB4748-005-H4_FLI
tctcgaaaccctagtcccctgctccattctcagccgccgccaatcccttcccgtgctccgcaaccgctgagtgagaagaagagatggccggcaagggcgatggcccggctatcggcatcgatctcggcacgacgtactcttgcgtcggcgtgtggcagcacgaccgcgtcgagatcattgccaacgaccagggtaaccgcaccacgccctcgtacgtcgccttcaccgactccgagcgcctcatcggagatgcggccaagaaccaggtcgccatgaaccccatcaacaccgtctttgatgccaagcgtctcatcggcaggaggttcagtgatgcgtctgtccagagtgatatcaagttgtggcccttcaaggtcatttctgggcctggtgagaagccaatgattgttgtccagcacaagggtgaggagaagcagtttgcagctgaagagatctcctctatggttcttatcaagatgcgtgagattgctgaagcttaccttggtagcacgatcaagaatgctgtggtcacagtccctgcctacttcaatgactcacagaggcaggccacaaaggatgctggggtgattgctggccttaatgtgctgcgtatcatcaacgagccaacagctgcagctatcgcctatggtcttgacaagaaggctaccagtgtcggtgagaagaatgtcctcatctttgatcttggaggtggtacctttgatgtctccctcctcaccattgaggaaggaatctttgaggtcaaggccacagctggtgacacccatcttggtggtgaggactttgacaacaggatggtcaaccacttcgtccaggagttcaagaggaagaacaagaaggatatcactggcaaccccagggctctccggaggctgaggaccgcttgtgagagggcgaagaggactctgtcttccactgcccagaccacgattgagattgactcgctgtatgagggcatcgacttctactccaccatcacccgtgccaggtttgaggagctcaacatggacctgttcaggaagtgcatggagcctgttgagaagtgcctgagggatgccaagatggacaagagcaccgtccatgacgttgtacttgttggtggctccactaggatccccagggtgcagcaactgctccaggacttcttcaacggcaaggagctgtgcaagaacatcaaccccgatgaggctgtcgcctatggtgctgctgtccaggctgccatcctgagcggtgagggcaatgagaaggtgcaggacctgcttctgctggacgtcacccctctgtccctgggtctggagactgctggaggagttatgacagtgctgatcccgaggaacaccaccatccccaccaagaaggagcaggtattctccacctactcggacaaccagcccggtgtcctgatccaggtctacgagggtgagaggacccggacacgcgacaacaacctgctgggcaagttcgagctctccggcatcccccctgcaccccgtggtgtgccacagatcaccgtgtgctttgacatcgacgccaacggcatcctgaacgtgtctgccgaggacaagacaacggggcagaagaacaagatcacaatcaccaacgacaagggccgtctctccaaggaggagatcgagaagatggttcaggacgctgagaagtacaagtctgaggatgaggagcacaagaagaaggtggaggccaagaactcgctggagaactactcctacaacatgcgcaacacgatcaaggacgagaagattgcgtccaagctgccggccgatgacaagaagaagatcgaggacgccatcgacgcggccatcagctggctggacgccaaccagctcgccgaggcggacgagttcgaggacaagatgaaggagctggagagcctctgcaaccccatcatcgccaagatgtaccagggcgcgggtgaagacatgggcggcgctggcggcatggacgaggacgcccctgccggcagcggcggccctggccccaagatcgaggaggtggactaagcggtttgttgtcagtcttgagtgtgctgcagttgctggctggcccagttgctgccgagagttatcgtcagttggtgcggtgtgtccgcttaaactttatttgtggttggttggtacttttgtggtggttatttttttggacctcgtgatagtcggtcggttcaatgttatcgcggctactggcaaaccttaagtgatacggtattcttcttttcggtaag

SEQ ID NO: 28217 - DNA, 2165 bp, Zea mays
  Clone ID: LIB4748-006-E11_FLI
ccgggacggctccaaacaaatgcggaggtctccactcttctctcttcctccatcttatcatcgcccacgtacacacccaattcctcgcaactgggctcccccgcctccacgacactgccccccgcctcaagtccgccgcctccattcttcagctctcctatcctccgtagtctgcctgtacctattggctgaagcagagctgacccccactttatcaagagttgctcaacaatggacactggctgcctgtcatctatgaatattactggagctagccagacaagatcttttgcggggcaacttcctcctcagagatgttttgcgagtagtcactatacaagctttgccgtgaaaaaacttgtctcaaggaataaaggaaggagatcacaccgtagacatcctgccttgcaggttgtctgcaaggattttccaagacctccactagaaagcacaataaactatttggaagctggacagctctcttcattttttagaaacagcgaacgccccagtaagccgttgcaggtcgtggttgctggtgcaggattggctggtctatcaacagcgaagtatctggcagatgctggacataaacccatattgcttgaggcaagagatgttttgggtggaaaggtagctgcttggaaggatgaagatggagattggtacgagactgggcttcatatcttttttggagcttatcccaacatacagaatttgtttggcgagcttaggattgaggatcgtttgcagtggaaagaacactctatgatattcgccatgccaaacaagccaggagaattcagccggtttgatttcccagaaactttgccagcacctataaatgggatatgggccatattgagaaacaatgaaatgcttacctggcctgagaaggtgaagtttgcaatcggacttctgccagcaatggttgctggtcaaccttatgttgaagctcaagatggcttaaccgtttcagaatggatgaaaaagcagggtgttcctgatcgggtgaacgatgaggtttttattgcaatgtccaaggcactcaatttcataaatcctgatgagctatctatgcagtgcattttgattgctttgaaccgatttcttcaggagaagcatggttctaaaatggcattcttagatggtaatccgcctgaaaggctatgcatgcctattgttgatcacattcggtctaggggtggagaggtccgcctgaattctcgtattaaaaagatagagctgaatcctgatggaactgtaaaacacttcgcacttagtgatggaactcagataactggagatgcttatgtttgtgcaacaccagtcgatatcttcaagcttcttgtacctcaagagtggagtgaaattacttatttcaagaaactggagaagttggtgggagttcctgttatcaatgttcatatatggtttgacagaaaactgaacaacacatatgaccaccttcttttcagcaggagttcacttttaagtgtctatgcagacatgtcagtaacctgcaaggaatactatgacccaaaccgttcaatgctggagttggtctttgctcctgcagacgaatggattggtcgaagtgacactgaaatcatcgatgcaactatggaagagctagccaagttatttcctgatgaaattgctgctgatcagagtaaagcaaagattcttaagtatcatattgtgaagacaccgagatcggtttacaaaactgtcccaaactgtgagccttgccggcctctccaaaggtcacctatcgaaggtttctatctagctggtgattacacaaagcagaaatacctggcttctatggaaggtgcagtcctatccgggaagctttgtgcccagtccatagtgcaggattatagcaggctcgcactcaggagccagaaaagcctacaatcaggagaagttcccgtcccatcttagttgtagttggctttagctatcgtcatccccactgggtgctatcttatctcctatttcaatgggaacccacccaatggtcatgttggagacaacacctgttatggtcctttgaccatctcgtggtgactgtagttgatgtcatattcggatatatatgtaaaaggacctgcatagcaattgttagacctttgggaaagcaaaagcgataaagagatctc

SEQ ID NO: 28218 - DNA, 1961 bp, Zea mays
  Clone ID: LIB4748-007-F4_FLI
ccgggacttcccgcctgcatacggtacagtggtacacccaccgccggtgagccatgcctcccccggcggggctgcccccctggccgacgccgtccaccacgcgcctcgcgaccccgaccccgacgcggcctcctcctcgcaccacccacgttcagccgccgcctccaccttacactcgcgtccgccttcctccgcctccgcctgctacgacgccactgccgccccgcctggagcccgctgcgccaaaaccagcggccgtcgccacactcctgcctccctccactgcctctgcagcgtcttcttcgtccacctgcctcgactgcgtccattttggcaagtgctcagggtgcacgcacgaggtggacctcgacaagccgccggtgctgcaggaggtggcgaatttcttcaagggacacggggtcggagatttcaccttcagcaggggcaggctgtcccaatggcggtgccgagcaaagctagctgttcgtggaacaccagagaacccgttgattggtttataccaggaagggacgcattctgttatagatattccagagtgcagagctcatcacccaagcattaatgctgctgttaagttgttaaggcaaggtataactgagctaagtattcagccatttgatgaagatgctggagctggtgaactcagatatgttcagatggccgtgacaacatataacacatctattccggttgataaaagatacgagcaagggaaagttcaagtttcattggtttggaattcaagagacgagcgctcccagaacgcagagaagctgacttcaataatagaatacttgtggacaaatggtgggccaaaaagtagtgtccatctcattcattctatatgggccaattttcagacatcaaccagcaacataatttttgggcataaatggagacatcttaagggggagagggacatgtgggagcgttatgggggagttgatatttctctggatccttgtagctttggccaggctaatactctgtcatttaactctttgttgcataagctgaacaagtatgtaccacgtagttcaacagttgttgatttgtactctggggctggtgttattggcctatcagttgctgcttcaaggaaatgtaggtctgtgaaatgtatcgagattaacaaacagtcaaagatgtcttttgagacatcagcaagccgacttccagcgaacctgggttgcaccattacttggcacaataccgatgcttcagttgaaccttcgcactggcttgaagggtcaagtgttgttattgtggatccaccaaggaaagggttgcacccatctgttatcagcggtttacagaaagttgctttgtctgagcgcaaggcatacaaggctaaaagttcgcttgcaaaggtcaaggatgagaagagaccatggatcttacgggcaagggaggctgcagttcatgttgataatacaacaactgaagagggcaatgaaacgtggcctgaaactctcatatacattagctgtggatgggaaagttttaagagggactgcaaaagcttgatatccagcaaggcctggcagttggaaaatgctcatgcttttaacttcttccctggcacagatagcattgaaattctggctatcttcaaacgggaatcagaagctggtcaaaagaaaaagaagaaagcaaaaaagaagaaggctaagtagattaacaaaaggctgatccaccttgcggattttgtatttttgtggatcttaggcattgatccagaacttcagaatgagtgctcatgtctgttatgaggaattttgcatcgtccgaaccaatcaagtgaacaatatgacacagggtaattacagaaactttctcagctagaccaagtttttgcctgcacaggaaattatacgatagatcagcaacttcagttctgtagtatgaaataaaaataaacagaaaacacgcatatttcg

SEQ ID NO: 28219 - DNA, 1178 bp, Zea mays
  Clone ID: LIB4748-009-A12_FLI
ccgggaccaacctcagcacaccaaggagagtacgtggaggagcagccatggcttcatcggtggccgccgcggcgagcacattcctgggcacccgcctggcggacccggcgccacagaacgggcgcatcgtggcccggttcgggttcgggttgggcggcaaggcgaagcctgctccgaagaaggtggcgaagacatcgacctcctctgaccggccgctgtggttccccggcgccgtggcgcccgactacctggacggctcgctggtcggcgactacgggttcgacccgttcggtctcgggaagcccgtggagtacctgcagttcgagttggactcgctggaccagaacctggccaagaatgaggccggcggcatcatcggcacccggttcgagtcctccgaagtcaagtccaccccgttgcagccctacagcgaggtgttcggcctccagcggttccgcgagtgcgagctcatccacggccgctgggccatgctcgccaccctcggcgccctctccgtcgagtggctcaccggcgtcacctggcaggacgccggcaaggtggagctggtggacgggtcctcctacctgggccagccgctgccgttctccatctcgacgctcatctggatcgaggtgctcgtgatcggctacatcgagttccagcgcaacgccgagctcgacccggagaagaggctgtaccccggcggctcctacttcgacccgctcggcctggcggccgaccctgagaagaaggagcggctgcagctggcggagatcaagcacgcgcggctcgccatggtcgccttcctcggcttcgccgtgcaggccgccgccaccggcaaggggccgctcaacaactgggccacccacctgagcgacccgctccacaccaccatcttcgacacgttcggagggtcctcttaagcccgccattgctccgccccgtccatcgaccggccggaacgtgttcttggattaattaactacgatctctatgagcctggggatggatcaacccgtcgtgcgtggtctcgttttgtgatgagtggaagagagaggatggcaagatcgatcctttgttaatggagatctcgttaattaggagagctaccgctgggacttggtggtttgtaatatatgatccaaccagtgatgaatcaatgcattcacttgtgtacg

SEQ ID NO: 28220 - DNA, 1806 bp, Zea mays
  Clone ID: LIB4748-009-D4_FLI
ccgggagacatagacagaacgcaccctccagtaaagtccccatggctgctttctggttgctgctgctgttcgtcgctagcgcagtccttgttcttcgtacatggagagctcaaagcttcgtcaacaaggcgcggcaggcagggccgaggtacccgccggggctggagccgtacccgctgatcgggcacctgccacagttcttggctaaccggcaccgcgtgctcgactggatgaccgaggcgctcgcgcgccagacgaccacgtgcacgttcgtgctgcgccggccgggaggcgtgcggggtgcgatcaccgcgaacccggcgaacgtggagcacttcctgcgcaccagcttcgaccactaccccaaggggccccggttcgcgtcgctgctgcacgacttcctcggccggggcatcttcaacgccgacggcgaggcctggcgcgcgcagcggaaggtcgccagccacgagttcaacacgcgctcgctccgagctttcgtggcgcgctgcgtgcacgccgagctacacggccgcctgctcccgctgctgcgccgcgccgcggcgtccggctcccccctcgacctccaggacgtgctcgagcggttcgcgttcgacaatatctgccgcgtcgccttcgaccacgaccctcgccagctcccggacgatggcgacgacacggcggacagcagcttcgccgatgcgttccgcgacgctgcgaatctcagcgcgggccggttccggtacgcggtcccggggttctggaagatcaagaaagcgctgaacttgggttctgagaagcggctgcgggagtccatcgccatggtgcacgacttcgccgatcgcataatccagtcgcgccgggaggagatgttgagcgccggttttgagaagcacgatcttctgtcgcggttcatggctagccaggacgagacctactccgagtccaaggtgcccctccgcgacgtggtgatcagtttcctgctcgcggggcgcgagaccacgtcctcggcgctcacctggttcttctggctgctgtcctcgcggccggacgtgcagcgccgcatccgcgaagaggtcgctgctgtgcgcgcccgacgggcacaggacgacgtcgatagcgtcgtcgggttcgatctggacgagatccgcgagatgcgctacgtgcacgcggccatcacggagtcgatgcggctgtacccgccggtgccggtgaactcgctgctggcggagacggacgacgtcctgcccgacggcacagccgtgcgtgcagggtggttcgtggcgtacaattcatatgggatggggcggatggagtcggtgtggggcgacgacgcgcgggaataccggccggagcggtggctgaaccccagagacggaacgttccggccggacagcccctttcggttcgtggcatttcacgcggggccgaggctttgtctgggcaaggaaatggcgtacatccagatgaagtccatcgtggcgtgcgtgctggaggagctcgacgtggcggttgacggcgcgtaccggccccggcaggttgcgtcgctaacgctgcggatggcggacgggctacctgtgaccgtgaagcagagacgggactgacgagctgctgtcacaaacctgcaactccatcagccacccatgaagcctctgcagcagcacaaggcaggcaaagctgttgttcaccgacgagcctgaacaaaactgtggtttgctcaatgcgcttgtctctgaaccaatgttttcaaatcgtctcattaatcgtggatagtcgcgattaatcgtccaagtcagtttggaccaatcg

SEQ ID NO: 28221 - DNA, 2218 bp, Zea mays
  Clone ID: LIB4748-010-F4_FLI
tctccaaaaaacagcccacagctgaagcgagaacacgaaagctcagtgatatttctctccagggctgcacactcgtctcctaccgagaccgtcggcggccatcatcgcccacgctgtgctcatgctaagtgtcgaggctcacacgtactactactacccgaccgcgaggccgagacggaagctatgcgcctgcagaaacgtcttgcaagaaaccgccccgcgtgacgcggaggcaaatccctgccgccacggcgagaggaagagcaggagaaggggcgacggtgcttattacatcgacaaggacggcggcggcgtagccaggaccttcgaccggaagaaaatatccagaaagagggggggtgctatcaaagggcgtggatggaagtacggctccgggttcgtcgacggagtgttcccagtgctgagtccgatggcgcaggatgtgctagaactcgtgcagacgagggggaccgacgccgccagcgtctgggagtcactggacaagatccctcaagcacacgatctttgggacgacatcgtcaacgtcgctgtccagctccgcctgaaccggcaatgggagccgatcatcacagtctgcgagtgggtcctgcgccggagctcgttccgccccgacatcatctgctacaacctgctcatcgacgcgtacggccagaagcgtcagctgagcgaggcggaggcggcctacatggcgcttctggaggctcgctgcgtgcctacggaggacacctacgctctgctgctgcgcgcgtactgcggctccgggcagctgcaccgagccgagggcgtgatttcggagatgcagaggaacgggatccctcccactgcgactgtgtacaacgcgtacctggacggtctgctgtaagcgaggtgttcggagaaggcggttgaagtgtaccagaggatgaagaaggagcgctgcagaactaacaccgagacctacaccctgatgatcaacgtgtatgggaaagcaaatcagccgatgtcgtcgttgagagtgttcagggagatgaaatcggtcgggtgcaagcccaacatctgcacctacacggcgctggtgaacgcgttcgcgcgggaaggcctgtgcgagaaggcagaggaggtgttcgaggagatgcagcaggctgggcacgaacctgacgtgtacgcctacaatgctctgatggaagcttacagccgcgcagggctgccgcaaggggcgtcggagatcttctctttgatggaacacatggggtgcgagcctgatagagcctcttacaacatactggtggatgctttcggacgagctggtcttcaccaagaggcggaagcagcgttccaagagctgaagcagcagggcatgcggccgacgatgaagtcgcacatgctgctcctgtcggcgcacgccaggtccggcaacgtggcgaggtgcgaggaggtgatggcgcagctgcacaagtccgggctgcgcccggacaccttcgcgctcaacgccatgctcaacgcgtacggccgggccgggcggctggacgacatggagcggctcttcgcggccatggagcgcggcgacggcgcgatcgccggcgccccggacaccagcacgtacaacgtgatggtgaacgcgtacgggcgcgcggggtacctggaccggatggaggcggcgttccgctccctggcggcgcggggcctcgccgccgacgtggtgacgtggacgtcccgcatcggcgcgtacgccaggaagaaggagtacgggcagtgcctgcgggtcttcgaggagatggtggacgccgggtgctacccggacgccggcaccgccaaggtgctgctcgccgcgtgctccgacgagcgccaggtggagcaggtcaaggccattgtcaggtccatgcacaaggacgccaagacgctcttcgcattgtgaaatccgcgcaggctaaattccgatcctgctgcgtgatcacatacgaaccttgacgagagtcacctagcttgcatactggttaacaagtcacaaggccccgtttggttacatatagaataatctactttttagtcccgtttagtacttaattgtatttagtctctagcccttcactgtaagggcctcacatcacatgggtgctaaaggggacgaaaggacatcatttactctaattaccattgcatagagaatatgcaccgtatacatgcaataaaaagagaggcatttcagtctgtgtacttc

SEQ ID NO: 28222 - DNA, 1701 bp, Zea mays
  Clone ID: LIB4748-011-B1_FLI
ccgggcagaacctaagaaacgccgaagtttaataataagatgcaatgaagcaataaggaaactcgagacagtcttcctcaccgagcaccgcaaccacgcacaataatggagagctcgagcgcagcaacgacgatgaccggctccagttccggtcgagagcacggtggcgtccacgtcctgctggttcccctgccggcgcagggccacatgaacccgatgatccagttcggccgccgcctcgcgtaccacggcctgattcccacgctggtgaccaccaggtacgtgatgtccacctctcctgccgccggcgtgcccttccccttgctggccatctccgacggcttcgacgagggcggcatggcctcgtgctcggaccccgtggagttctgccggcggctggaggccgtggggtcggagacgctggcgcgggccatcgacgccgaggcccgggcggggagggcgccggccgtgatggtgtacgacccgcacatgccgtgggcgcagcgggtggcgagcgccgcgggcgtcccgaccgccgcgttcctgtcgcagtcctgcgccgttgacctcatctacggggaagcgtgggcgaggcgcgcgccgctgccgatggcggacgggagcgcgctccggcggcggagggtgatcagcgtggacctgggagcggaggacctgccgcccttcgtggtggcgccggagatctacgcccagtacctcaaggtatctattagtcaattcgagttcgtcgacgccgccgccgacgtgttcgtcaactcgttccgcgacctcgagccgctggaagcagagtacatggagtcgacgtggcgcgcgaagacggtcggcccagccctgccgtctttctatctcgacgacggccggatgccgtccaacgtggcctccggcgtcagcttcttcagcagcagcgcgccaacaatgggatggctggacaggcagcccccctgctccgtggtccttgcttcctacgggaccgtctacagcctggacgccgaccagctcggcgagctcggcaacgggctgtgcgattccggctggccgttcatctgggtcgtgaggcccgacgaggcgcagaagctgcctcaagatctcgaggacgcctgcggggagaagggcctcatcgtgcagtggtgtcctcagctagaggtcttgtcgcacaaggccacgggttgtttcatcacgcactgcggatggaactcgacggtggaggcgatcgtcgccggcgtgccgatggtgggcatgccgcggtcggcggaccagccgaccaatgcgaggtacgtggagagcgcgtgggggatcggcctgcgaatgcggttggacaagaatggcttgctgaagagggaggaggtgcagaggtgcatccggcaagtgatggaaggggagaggaagacagagttcaggcggaatgcggcgaagtggatgaacaaggccaaggaggcgatgcaggaaggtgggagctctgacaagaacattgctgaatttgcagcaaagtatttgtcagcttaaaaggcgcagtttgttgactgaataaagcctggctcacttgcatctagttagtgggttgttacttgttagtgaaaggtcatttctaagtattttggtgattgagtgtcaacacaagtgcttaagtgttaatctatgtcaattgatggacaaagtgcaaatcaagagtaaaggtatgtttct

SEQ ID NO: 28223 - DNA, 1193 bp, Zea mays
  Clone ID: LIB4748-012-F6_FLI
ccgggaaaaaaaaaaaaaaccaacctcagcacaccaaggagagtacgtggaggagcagccatggcttcatcggtggccgccgcggcgagcacattcctgggcacccgcctggcggacccggcgccacagaacgggcgcatcgtggcccggttcgggttcgggttgggcggcaaggcgaagcctgctccgaagaaggtggcgaagacatcgacctcctctgaccggccgctgtggttccccggcgccgtggcgcccgactacctggacggctcgctggtcggcgactacgggttcgacccgttcggtctcgggaagcccgtggagtacctgcagttcgagttggactcgctggaccagaacctggccaagaatgaggccggcggcatcatcggcacccggttcgagtcctccgaagtcaagtccaccccgttgcagccctacagcgaggtgttcggcctccagcggttccgcgagtgcgagctcatccacggccgctgggccatgctcgccaccctcggcgccctctccgtcgagtggctcaccggcgtcacctggcaggacgccggcaaggtggagctggtggacgggtcctcctacctgggccagccgctgccgttctccatctcgacgctcatctggatcgaggtgctcgtgatcggctacatcgagttccagcgcaacgccgagctcgacccggagaagaggctgtaccccggcggctcctacttcgacccgctcggcctggcggccgaccctgagaagaaggagcggctgcagctggcggagatcaagcacgcgcggctcgccatggtcgccttcctcggcttcgccgtgcaggccgccgccaccggcaaggggccgctcaacaactgggccacccacctgagcgacccgctccacaccaccatcttcgacacgttcggagggtcctcttaagcccgccattgctccgccccgtccatcgaccggccggaacgtgttcttggattaattaactacgatctctatgagcctggggatggatcaacccgtcgtgcgtggtctcgttttgtgatgagtggaagagagaggatggcaagatcgatcctttgttaatggagatctcgttaattaggagagctaccgctgggacttggtggtttgtaatatatgatccaaccagtgatgaatcaatgcattcacttgtgtacacg

SEQ ID NO: 28224 - DNA, 2188 bp, Zea mays
  Clone ID: LIB4748-013-C2_FLI
ccgggatctacatccatccagcacaccataccctagttcttccttcccgaaccctcgcgccgccaccgccgccgtctagcattttcctacacccaatctgatctgaccaagccctctgaacaccaccgcccatcctcctcctcctccgccgccgccgcccaagatgggcttcgacgtgggcctcgtcccctacaaccccgacgggtggggtccacctgaagttgccgccgcgccgccttccctcggtggtggctcctcgtctgtccccttcgctcccttctcccgctccgacaagctgggccgcatcgccgactggacgcgcaacccgccgggccccggggctttcgccgcagctcgcgacgccgtcttcgatttcgcggggctcgaggactccatcgggctcgcgtccgcggacgactcgtccttccgcctcgtcgatggcaaaccgccgccgcggcacccgcggtttggacctcgctggcgcttccagcagcggccccaactcccgcagcgccgcgacgaagaggtcgaggctcggcgtcgcgaggccgagaaggagcgcgcccgccgcgaccgccactggcagcagaaccgccgcacgcaccaccagttcaaccgcggcgggccctcctcgtcgtctgccaaaccgtccgttgacatccagcccgagtggtcggtgaaggagcagatccctttctcatccttctccaagctctccttcgccgtcgccgaccagcccgaggatctcctcgtctgtggcgcagtcgagtactacgaccggacctacgatcgcgtcacccccagggccgagcgtcgcctcgagcgcttcaagtcgcggaacttcttcaaggtcaccactaccgacgaccccgtcatccgccgtcttgctgagaatgacacggccacggtcttcgccaatgacaccatcctggccgcactcatgtgtgcgccccgtagcgtccagtcctgggatatcgtaattcagcgtgttggcaacaagttgttcttcgacaagcgtgatggctctcagcttgatcttctcaccgtcaacgaaaccgcccaggaggcactccctgaggccaaggaagacatcaactccgcgcattcgctggcggttgaagccacatacgtcaatcagaacttctcgcagcaggtgctgctccgcaatggtgagaaggtcacgttcgacgagcctaacccgtttgccactgaaggggaggaagctgcttccgttgcttaccgctaccgccgctggaagcttgatgaggagacaagcttggttgctcggtgcgaggttcatgccgtgagcgttgatctacgcggcgagcgccagttccttacactcaacgccctcaacgagttcgatcccaaggtcactggtgttgactggaggaagaagcttgagacccagcggggtgctgtgcttgccactgagctcaagaacaatgccaacaagcttgcacgctggactgcccaggcgctgcttgccggcgcagacatgatgaagttgggttatgtgtcacggctgcacccacgcgaccagtacaaccattccattctcagtgtgatcgggtacaagccaagggatttcgctgcacagatcaatctcaacaccgcaaatatgtgggggatcgtgaagtctattgtggatgtctgcatgaagcttggagaggggaagtatgtgcttgtgaaggacccagtgaaaccacaggtccggctttatgaagtgccaaatgatgcattcgagaatgactacgttgaggaaccactccctgaggaagagcaagtgcgtcccttctccgaggatgttgatgccagcgcgaaggaaatggatgctgccgcagaagcggaggctactggaacaactgcaggcgctgagaagagtggtgatgtcgctgctgtgtgaaggcggtggctacaacctgaagaggtctttttcggaccttgaataaggttaccttggctagctatctactacaatcatgggcatctggatacaggtttgatgtttctaccatcgaaggttatgctattattgttcgctgaatcttgagttgtgttccctttatgtgtccttatggctggacttaaatggaatcctcaaactatattgcactttccaagactcacatgttgtggattgccagttctgtttactgtgatttgagttgtggtgattgcatttgcg

SEQ ID NO: 28225 - DNA, 1874 bp, Zea mays
  Clone ID: LIB4748-013-F7_FLI
ccgggagtcaaacacacaccggcctcgcagtcgcagcctcgctccggaggcggagcgccggagccccgcccacctcccctaaacggccagggcctgaccacccccacctcagtccctctcctgtgggcggcgtcctcccgcgcccatggggatctcgcgcctccagcccgtcctcctcctcctcatgctccgggctctcgcgtcgcttcccacgcaggccgccgcgagaggcggccacgatccgtcagatgatggagcccacgggccattttcacgtaaacttcttgaagataagcctcagatcacagaagaaatggtccgtggatatatgagcaacactgagcttgagactgctgtacatgcctttggaagtcgttgttccaatatctccagggtgtacagggataacacaaacctgctatcagcattggaaagagtgtgaatcattttccattgtgggtgattgaaatatcagacaagcccaggcaaagggaatctgaaccagcattcaagttcattggcaatgttcatggtgatgagcctgttggaagagaggttcttatgcatcttgcaaattggctgtgtgataactatctgaaagattcactggcaactctcattgttgagaacatgcaccttcatatacttccgacgatgaaccctgatgggtttgctcttagatggcgtggtaatgcaaacaatattgatctcaacagggattttcctgaccaaacagcctgaaactagagccattatgaattgggtaaagcaagaacacttcacggcttctgctagcttgcatgggggggctcttgttgccgactatccatgggatggaactagagacacaagcaaacactactacggatgtcctgacgataagacattccagcacatggcatctgtgtatagtcggtctcactataacatgtctttgagcaaagaatttgaaggagggataacaaatggagcattctggtacccaatatatggtggtatgcaggactggaactatatacatggaggctgctttgagttaactctggagattagtgacacaaagtggccaaaagcagatgagcttcctatcatctgggaacacaataggatgagtatgctcaatcttctagcaagcctaataaagtcaggggttcatggaaggatatttgcagcagatacgggcaggcctgtacccggctcagtgatgataaagggcattgattccaaggtaagcgcgagcagcactttcggagattaccatcgaattgttgcgcctggtgagacatatgaagtcgtggcatcgatgcgaggcttccggcaaaaatctacacgcatcaggctggagcaggaagccgtcagcctggatttcatcctagacccggatggagccgacgggcagacgaagctgcggccccggagtaacgaccggggctgccgctgcgacaacgacaacgccgccaagccgttccatgtccacgaagctcacctctggttgtacctccttatcgtgtccgttcttctggccctctacgtagtcttcaagaggaaaacggtgccgaggctgctggcgtatagacactcatcgtcactcagacggcctgttgctgtataagaggaactaattttgtggtctaggcggatagttttgtactacctctgttctcgaatagttgttgtccgctagttaatttttatagctagttcatttttatactaaaatgtgacaaatagaaaagaacggagggaaggagcaactgaagttagtcttctctttgccaaaacggtcggttgctgtataagttgaaggatgggtaatgtaccatggaaatgacattttttttttgcatcaatgaaatacatgttgcgttgatgac

SEQ ID NO: 28226 - DNA, 2062 bp, Zea mays
  Clone ID: LIB4748-013-H8_FLI
agcagcatcctattcctccaatcctcctacttcactggctcactctcgtctcggtttacaaagcctccgccgccgcaagtccactccacccgttgtccaggttagttggttggtttcaatttcgagttcaccgagcgacagcttgcgcctgccatttctcggctccgcgtgccggagcttgttcatctccagcttctccggccgttactcgctctgaaccgacgacagtatccctccggcgacgatgccttcccgatcggattccgactccctgctggtgcgcgccgagggcatgcgcgacgcggcgctggactaccacggccgccccgccgaccgcggcgccaccggcggctggaggtcggcgctcttcatcatagtggtggagatcgcggaacggttcacgttctacggcgtgtcggcgaacctgatcaactacctgactggcccgctcggggagggcaccgcggcggcggcggcggccatcaacgcctggaacggggtggcgcagctgctgccgctgctgggcggggccctcgcggacaagtggctcggccgctaccgcaccatcgtcatcgcctcgctcctctacatcctcggtctgggtatgttggccttttctaccttcctctcctccggcagcggccaccagtgcaccgccgcaggggggcagatctgtgcgccgtctggccttaaggtgaccttcttctacgtctccctctatatcgtggccgtggcgcagggcggccacaagccgtgcgtccaggcgttcggcgccgaccagttcgatcagaccgaccccaaggagactgtctccaggagctccttctttaactggtggtacttcggcatgtgcgccggcactgccgtcacgctcgtgctcctcagctacgtgcaggacaacatcggatggggcctcgggttcggcatcccgtgcgccgtcatggcagccgcgctcgccgtattccttcttggcactcggacgtaccggtactacgtcactgccgggcagggcctgttcgctcgtgccggcgaggctttcgctgagtggcggagcaggcgaaaggcgggccagcttgttcaggattcccaagaactcgatccgcctgcagcagacgcgccaaggttcagtgctggcgtcgatgtggaggagcaggctgcagtgagcaataatggaggcctcatcaaggaggccaaggccatcctccgtctgttcccgatatgggcggcatgcctgctctacgcggtggcgtactcgcagtcgtcgacgttcttcacgaaacaggcggcgaccctggaccggcggatcgggcggcacgtccaggtgccacctgctgcgctgcagagcttcatcagcgtcacaatcgtggtcatcatccctatctacgaccgcgtcctcgtaccggtgtcgcgccggtactccggcaaaccatcagggatcaccatgctgcagcgcatcggcacggggatgttcctctcgctcttgtccatggtgatcgcggcgctcgtcgagaagcaccggctccgcgtcgcgggggacgctggcctcgtggacaagccgaaggtcccagtaccgatgagcctgtggtggatggtgccgcagtacgtgctgttcggggccgccgacgtgttcaccatggtcgggctgcaggagttcttctacgaccaggtgcccgacaagctgcgcagcctcgggctggcgctctacctcagcatcttcggcgtcggcagcttcatcagcagcgcgctcgtgtcggtcatagacagggtgacgacggacaggggcgggagctggttctccaacaacctgaaccgtggccacgtggactacttctactggctgctcgccgcgctcagcgccgtcgagctcctcgcctatgtcttcttcgcggtgacatacaagtacaagaacagaggagccgtacatgcaactgttgatggttagcgggaggagtaagtacatagtataggttatggtgcatcgtacttgtaaatctctttttttttcctcaactaggatttgtgatccaaactttaccttcgataatgattcccgttttttacg

SEQ ID NO: 28227 - DNA, 1754 bp, Zea mays
  Clone ID: LIB4748-016-F7_FLI
aaaaaaaaacagaccagtgagtgacacacacccatgccgccgccgccgccgctcgcgcgccgcctactcctccagccgctaccgagcggcgcgcgcgccctccacacgaccccgggggtgctggcctgccgcctggcgtcccgcgccgtggtccgcttcgcggggcccgaggcggcgcgcttcctccactcgctgctcaccaacgacctcctctccgccttctccgcggccggcgcgtcgtcgccgcagcggtacgcgcccacgccgaacgcgcccgcgcggggccccgcggcgcccgcctacgccgcgctgctcacgccgcagggcaggttcctctacgacctcttcctctaccggcccccgccgcggtcccagatgctcgaccgcacaggatccgcgccggagaccggtgaggcccccgaggggcacccgcacctgcaggaggtgctcgcagacgttgacgccgccgaggtggacgacctcgtcgcctgctttaagagatatcgtttgagatccaaggttgaaatagacaatgtaagtgagaattttgcatgttggcaaagatttggacatgatgtagtgcacactgaaccttctactcaagaacctgaggctcaatccattgggtggggacaaggtgttgaccatgctggcgagtcagctgcgcaagggaacgaccatggttggcaatggctcaaagatcctcggttggactaccttggttacagaggaatttttccagctgacacaataccacccctagttgagtctgacaaagaagcagatgaacgccattatcaactttggcggatagaaaatggagtcgcagaaggttcaactgagatcccaaaaggtgaagcaatcccgctggagtacaatcttgctggcttgaacgccatttcgttcgagaagggctgctacatcgggcaggagcttatcgcgcggacgcaccatcgcggtgtcatccggaagcgcctaatgccaatgaagttcgtcgacgggaatgggcaagaactcgagcaggccgtcgctccaggctcggaggtcgtggacgaggcttcaggcaagaaggtcggggcagtgagcaccgctctgggctcccgcgggatgggcctgctaagactcgaagaagcactgaaaccgggctcggccctccgcgccggcggcaacagggacgtgagggtccaggcgatcaggccggactggtggccagccgagtggacgcaggtgcttcaggaacagcgcgcagccgcttgacagcagcggagctgtatgtagtactggaccccaaacacaaaccctgcctgtcgtcagttagccgcctcttggaagaggacccaaacaaaccccatagctaaccgttttcagcttcggtttttagtcttgttgtctggtgtatcaaggcggagcctgttttttttcctcgcagaagacgaggaaggcaggagggcctgtttctcttcctctctgcctgctgctgtgttcagctgcggcatctcgttcagaacgagatgagcaaactgtgtgagtgtgtgtgtggcccaaacacgcagtgtgttcgaataagtttatctgtactacactgaataataagtttctctgtcttgatgatcttgtacaacgttttatattggacggtcatgggctctgtacgttgcgttgctctcgcatgtaaagcatttcatgctgagggttgtctcagcattatactgttttgttaggaacgcaattatgataaaaggatttgttgtgag

SEQ ID NO: 28228 - DNA, 2151 bp, Zea mays
  Clone ID: LIB4748-016-F9_FLI
ccgggatcagctgaagaaactcttgaatctgaactatataaaaaaactgagaaatgcttctatattcggtaatcggtattgtgtttgacccgttgcaattgtttccaggtaatctcgcatcagcaaacagcaccgggctccgttcaccgccttgccttctcttctccggttcctcccccgcgcgttcgctcgctctcgtggcgcaactcgtagaccgccgccgcctccgctctacgccaggtgcctaggtctagcttcgtcggtcccttcgccaacgacgagcacccacccgaagttcagctaggagtgcatcttgtttacctgttgcttaatcatggacaactctcagaatcaaccaccaccacctggtgttggaacatggccgcaggcacctcctagtcacccgccacaatgccatgctgatccacagtcttatcatccacaatttgctgctagacctgacaatgctagtgccaataatagtggtagttcagcaaacattgagtcagctgtccaggaggctgttcttcacgcgcaggacattgagactcagcaagtcatacagaatcaaagacatgcaaacacaacaagtgaacctacaaaatatggggaagacttactttcgaaccgccgtgaccctaatgcattgaaggagcatttactaaagatgacagctgatcatcgtgcagagatggcaagcaaaagggggaagccacttcatccaaacaatggcaactgtgaaattggcaatggctatggtgtacctggaggcggtgcttattatgctgcaaacttgccaagtcctcaaatgaataaacctagagatgaaactgataaagctaaatgtgcaaacgatctccctgattttttaaagcagaggttaagggcaaggggaattctcaaagatgagactacaaataagaattacacgagtacgcagactgtggattctcaagaaatcgagaacaaatctgcacaagagttgcctcctggttggattgaagtgaaggacccgacaactggagtgccatacttctacaatcaaagcactggagtgagtcaatgggatcgccctgacagtgttgtgaatatcatgcaacatcaagtttctccatccttgccagagaactgggaggaggcaattgacaaatcaacaggccacaaatactattataacacgaagacacagaccacacaatgggaacctcctacttctgtgaacaccaatgttacacctccagcttccaccaacactgcagttgagccagtcgctcaagctgcagatatttggaactctcaaatgcagagatgtttgggctgtggtggatggggagttggtcttgtccagccttggggatactgcaatcactgcacaagggttcaaaatcgtccttttcaacagtacccatcttacacaaataatacgatgcacgccagtggtaacaatgctcccaaaactcagggaaatgtttcagctaagaacagatcaagctcaaagccacctttagggaaaccaaacagaaaagaccaccgcaaaagaaatcgccccgaggatgatgaacttgacccaatggacccgagttcttactcagatgctccacgcggtggctgggttgttggtttgaagggtgttcaaccacgagcagcagatactaccgcagctggacctttgttccaacaaagaccatatccctcaccgggtgctgtgttgagaaaaaatgcagaggtagcaacccatggcaagaaacgtggtggtatggctccgataacaaaaagaggagatggcagcgacggacttggggaggcagattagtcttttggtgaactgaaatgttgtgctatccgaatctccttggtggttgtctctggagctgctaaactatcattgcacgcttgaagaaaatcgaaaaaatattggctgccagatctggaatgaggaaactcactacagttcgcgagtttttgcagcgattaacgctagtgtactcgctggacctcgaggctagagcaatgcgagctcaccccggcttgctgatgacacattcactgagttcactgcggtttgccgatgacattcaatgtgcccttggtgtgaattttatatgaaaatgaactataatctgtaattggaaagagtgatttcaatgcaag

SEQ ID NO: 28229 - DNA, 2113 bp, Zea mays
  Clone ID: LIB4748-017-F12_FLI
ccgggacaggcaaaccgtctaagacgtcatcctaattccttcacgctaatctctctgcttcctctgttcctcctctttcccctcctccccctccagttttcctttccctttttcctccacacaagcaaggcgctcaacctgccgcccgggaaaaaccctagaccggcgatgtccgtccccggcgccccctcgggcggcggctcccgcagcttcgacttcggcgccgacgacgtgctctgctcctacgatgacttcgccgcctcgtccgagcccaagcgccccgatccggccgacagtgtgcccgattttcatgatagtagattggggaggccatttgtgaaaccttatgaacaagaaagttatgggaaagaggatgtgctttctgctgttgagaaatgcatgaaaaagtatgctgataatttgctacgatctcttgagggaatcactagtcggctttcgcaactggagatttattgctataagcttgagagatccataggtgaacttcgaagtgatgtgcttcgtgatgagactgaccataggttgaagtctcttgagaaacatctaaatgaagtacacaggtctatccaaattcttagggacaaacaggagttagctgaagctcagaaggaattggccaaatttcaacttacacaagatacatctaaaaagaaggaagatgtaccaacatctattcctgagcaaaagaagcctgaagaaaaccctgacacatcaaaccagcaattggctcttgttttgcctcatcaggtgaacctgccatcacttgcccctagagcttctgaatcagtccaacagtacaagaatcaacctgtgcaaccatcagacccaacccctcccgtgccacagcaggaccgctatgttcttagccaagccatcgtctactacccacagcgccaagctccaggtatccaggacacacaagggcaaaaattgcaaccagaagtgcaatacttaccagcaagacccccagcacaagaagttccggtccatgctccatcccaaccacctcaggctggaaaccaaacacagccacagccttaccctccttaccagcagcagtggcaccagcaatcctcccagccagctcctgcaccggtggcccagacacagcagactttctcacagccatttcctccacccgcacagcagccccaattatccaatgtgcagcagtttccaccgcaaccagtacagcagccccagtccaatgctcaacagtatcctccaccagtgcaaccacagcaatctagcccacagcttcctcaggcaatgcaaccacaacatcctcctatgcaaactcagatgagacctcaaaccccaccaaactacccgcattatccaccccaccagccattgaaccccacccctgaaactcttcctggcaatgtggctatgcaagaatcatacaacactgctgttccatcaggtgccaaccgtcctgaactgccatattcgtatggaggggctggcatcccactgccacagcacaacatgcaaaggcaccagctaccaccttcaagtcagggctcctttgggccacctccaagcaaagggtcctatgctggctcttcacagtatgcaccacagggcaatccgcaaggctacaacacaggttacgcgtacccaccaaacggccctccagcagtccagccgcaacagatgccccctggcggagttggcatgagtcatccgggttcgcatatgatgcgtggccatccctacggagaaatgatggagaaggcgatcaccatgggataccctagggaccaagtgctgaacgtcacccaaaggatggccgagagtggccagtcaatggatttcaacaccttgctcgacaggctgaacgaagcagggtcgggagctccacccccacgcgcgtggtgattggatccagtttgggcgccgtgcttggtgtcggttatgtgacttacgactgttatcatgcagctaaataaataagatctgggttgatgccgtgtactgcttatctgtacaatgtgcatatgtgatttttttttccatgtaactgccactggtactacgaacgcatcgcaccaattggactgttcaaatattatgtatatatattcgg

SEQ ID NO: 28230 - DNA, 1992 bp, Zea mays
  Clone ID: LIB4748-018-A4_FLI
gcagcggccttcatcagttcgttctgcgcgggaaccgccgatgggggacgccgtggaggacatcgtcatcgccggcgcgggcctcgccggcctcgcgacggcgctcgggctacacaggaaaggggtgaggtgcctggtgctggagtcgtcgccggcgctgcgcgcgtcggggttcgcgttcaccacgtggaccaacgccttccgcgccctggatgccctcggcgtcggggacaagatccgggagcaccatttgctctacgagcggtgagccgccagcagccagaaacatcactacgagaacaaatccagcccatttgcttcggcccaagcctgaaactatagagtgcaaagcccacgtgacatgtcttacctttttttttatgattgtgacaggatgatcgccttctctgcagctactggtgaagcagctgcagaagtgagcctaaagattcagagcaaaagcgggccacacgagatccggtgcgtgaagcgggacttcctgctgcggacgctggccgacgagctgccggagggcaccatcaggtactcggccaaggttgtcgccatggaggaagacggcgtcggcggcgccaagaccctgcagctgcacctggcagacggttccaccataaaggccaaggtcgtgatcgggtgcgacggcgtgaactccgtggtggcccagtggctgggcctgccgaagccgatcctgtcggggcgctcggccaccaggggcctcgccgagtacccgggcggccacggcttcggccccgagatcctgcagttcatcggccacggcttccgctccggcgtgctgccctgctccgacacctccgtctactggaactacacctggtacccgtcccccgcggacggcgacgccgaggagagcgtggccaagatgcggagccacgtggtcgccaagctgcggggcgccaaggtcccggccgaggcgctggaggtggtggagcggagcgagatgagcgacgtggcgtcgtcgccgctgcggttccggtccccgctggcgctggtccgcggcagcatcagccgcggcggcgtgtgcgtggcgggcgacgcgctgcaccccatgacgccggagctcgggcagggcgggtgcgcggcgctcgaggacggcgtcgtcctggcccggtgcctgggcaaggccttcgccctgctcggccaggagcgggatgaggggcgggtcgtcacggcggcgctggaggagtacgcggcggcgaggcggtggcgcagcatccagctcatcaccgccgcctacgtcgtcggcttcatccagcagagcaacaacgccgtggtcaggttcgtcagggacaggttcctgtctcggctgctgtccaagacgctggtcgccatggcggactacgactgtggggcgctatgatctgccgccccctggactggtctgcaagcaatctacgcaacacactccttctagaaaaactaacgtaataaatcgctggtgtcaagtcaacggttgacctgtgaccgaatgaaaggagtttttcatcacgcccgatttatccgctgctagccgcagcccgatggccaccgaagatgcctcgaagaaaaccaccgtagcaaccattctggtccactagccatcagctatcagctatgacggctctaccctaagactgactccaacagaggccatgcaattcgaacagccattcaagattttggctggcgtctctggtttgtctgtccagccatataacacactctttcaacagtgttgggcctgtgcttcgtcgccgaaggtcctataggaagaagcggtcttcggctgaagctgtttgtgtaagatggccgaaggttccttttcatgaagcttcggtattacaaaccgacttaaagatagaatgaccttttagtccataaaggtctgagtcagtgttgtaaacttttatgaggggcataattgtaattcctcacaggctgtgtcctgtgcctataaatagtgaacaatattccttt

SEQ ID NO: 28231 - DNA, 1207 bp, Zea mays
  Clone ID: LIB4748-018-D3_FLI
ctcgaggccggccggaatctccccacttccacaattctccccgcctccccctccgaccctcccaaatcagcaccacccataggggccacggccgcgcaatgccgccctctgccgacgcaatgccggcccccggagacgccgcgtgcgccggcgacgtgcgcttgatctcctccaaggagctccgcgagcacgcgtccgccgccgacctctggatctccatctcgggcgacgtgtacgacgtgacgccctggcttccccaccacccgggcggcgacctcccgctcatcaccttggcggggcaggacgccaccgacgccttcgccgcctaccacccgccctcggcgcgcccgctcctccgccgcttcttcgtcggccgcctctccgactacaccgtctcccccgcgtccgccgactaccgccgcctcctggcgcagctctcctccgcgggcctcttcgagcgcgtcggccccacccccagggtacagctcgccctgatggccgtcctcttctacgcggcgctctacctcgtcctcgcctgcgccagcgcctcggcgcacatgctcgctggggggctcatcggcttcgtctggatccagtccggctggatgggccacgactcgggccaccaccgcatcacgggccatccgctcctggaccgcgtcgtgcaggtgctctccggaaactgcctcactggcctcagcatcgcctggtggaaatgcaaccacaacacgctcgacatcctgtgccctccttggatggattggttccatggcggcctgcagttccagattgagcaccatctgttcccccgcctgcctcggtgccaccttcggaaggttgcgccggccgtgcgtgacctttgcaagaagcatgggctgacctattccgcagcctccttcttggacgcaaatgtgcttacatggaagacactctgggctgccgcattgcaggccaggagcgccacaggcggcggcggcgctccgaagaatttggtctgggaggcattgaacacccatggatgataaacgggacgaggatatggctgagggaaggcaacttctggtgtttcagctttgtgccgacgcgattgtctggttgcttctaatctcagttgtttagattgtattggtcattgaacccgtccgagtcgggctggaatttttgtgttgacaagtgaccgtctatccagttgaagagttcatgctcc

SEQ ID NO: 28232 - DNA, 2155 bp, Zea mays
  Clone ID: LIB4748-018-D6_FLI
atttcgccgtccgtgacgcgagagacctcttcgcatcccgaggcggcgcttttggggtcggaagcgacacgggcgccgggcgggtccgcgggtggtggtgctactgctaacaagcagcagcaggcgacgctaggcgagagccccagtcggagcaggccaccatgtgcggcatcctcgctgtcctcggcgtcgctgaggtctccctcgccaagcgctcccgcatcattgagctctcgcgcaggttacggcaccgagggcctgattggagtggtttgcactgtcatgaggattgttaccttgcacaccagcggttggctattatcgatcctacatctggagaccagcctttgtacaatgaggataaaacagttgttgtaacggtgaacggagagatctataaccatgaagaattgaaagctaagttgaaaactcatgagttccaaactggcagtgattgtgaagttatagcccatctttacgaagaatatggcgaagaatttgtggatatgttggatggaatgttctcctttgttcttcttgatacacgtgataaaagcttcatcgcagctcgtgatgctattggcatctgccctttatacatgggatggggtcttgatggatcagtctggttttcttcagagatgaaggcattgagtgatgattgtgaacgcttcataacatttcccccagggcatctctactccagcaagacaggtggtctaaggagatggtacaacccaccatggttttcagagacggtcccttcaaccccttacaatgctctcttcctccgggagatgtttgagaaggctgttattaagaggctgatgactgatgtgccatttggtgtgcttttatctggtggactcgactcttctttggttgcatctgttgcttcgcggcacttaaacgaaacaaaggttgacaggcagtggggaaataaattgcatactttctgtataggcttgaagggttctcctgatcttaaagctgctagagaagttgctgattacctcagcactgtacatcatgagttccacttcacagtgcaggagggcattgatgccttggaagaagtcatctaccatattgagacatatgatgttacaacaatcagagcaagtaccccaatgtttttgatgtcacgcaaaatcaaatctttgggtgtgaagatggttatttctggcgaaggttcagatgaaatttttggtggttacctttattttcacaaggcaccaaacaagaaagaattccatgaggaaacatgtcggaagataaaagcactacatctgtatgactgcttgagagctaacaaagcaacttctgcctggggtgttgaggctcgtgttccattccttgacaaaagtttcatcagtgtagcaatggacattgatcctgaatggaagatgataaaacgtgacctcggtcgaattgagaaatgggttatccgtaatgcatttgatgatgatgagaggccctatttacctaagcacattctctacaggcaaaaggaacagttcagtgatggtgttgggtatagttggatcgatggattgaaggaccatgccagccaacatgtctccgattccatgatgatgaatgctggctttgtttacccagagaacacacccacaacaaaagaagggtactactacagaatgatattcgagaaattctttcccaagcctgcagcaaggtcaactgttcctggaggtcctagtgtggcctgcagcactgccaaagctgttgaatgggacgcatcctggtccaagaaccttgatccttctggccgtgctgctttgggtgttcacgatgctgcgtatgaagacactgcagggaaaactcctgcctctgctgatcctgtctcagacaagggccttcgtccagctattggcgaaagcctagggacacccgttgcttcagccacagctgtctaaccttatgtttatcacccagcaatgcttgaaacagcaaaggttgtccattgcttgtttcagtttccttccgatcatgtttttagttccatcaatcaagcaatggagacatgcttgtgcttcatacttggcagcatcgtgtttgggttttcactgggcagtactgtttaatttttatggactgaaaagactcagttttgtaaatattcgtcactgtgacc

SEQ ID NO: 28233 - DNA, 2250 bp, Zea mays
  Clone ID: LIB4748-018-F4_FLI
gcaggagtgattaagtacgaaaccattttacccgttgccattggtatgctcctcctctgctccctcctcgtcgtctgtcgtctcctcgcgctcgtcctccgctgcccgactccggcgtcgtccccacagtccgcaccagccgacccaaccaccgatcaagccttaacccaacatttatctgtatcccgtggcaaggagcatctgcgcgtcacatccgcgatcgcgcgctctacgtcgcctcccgccgccgccgcacggccgcaacggatgctcggccaccgcttccctaccgccctccgcctcccacatggtctgctgctgaggaggagcatcatggcccgccgcggcctgaccatcatggccggtggcgaggcggagggtccgctcgcgggtttcttcgactacatggagcggctgcgcaactacgagcgctcgggcgtgccgcgcggcgccggcaccgactccgacgacgggttcgacctcggacgcatgcgccggctcctccgccggctcggcgacccccacacccacttcccggctgtgcatatcgccggcaccaaggggaaaggttctactgctgcattcctgtccaatatcatgagggcccaaggctacaatgtaggctgttattctagtccacatcttctaacaatacgtgaacggatttctgttggaaatgatggaggccctgttccagtacgactgttgagtgatctgtttgacgaggctaagaaagccattgatgaagcaatagaatcggaaaatggatccctgacacattttgaggtttttactgctctctcatttcttctattctcccaacagaatgttggcattgccatcattgaagcaggtcttggtggagctagggatgcaacaaatgttattcgaagtactgaattagcagcatctgtcataacaacagtagggagggaacatctggttgcattgggtggctccctgcaaagcatagcaatagcaaagtctggaatcatcaaacaaggacgaccagttgtgattggtggaccattttcagaagatattgagcaaattattcgtgacagggcattcttgacacaatctcccgtgatatctgcttgtggtcatggcatcaagagctttacaaaatgcatagactgggataatggtaagccgtatcaacgctgttacatcagcattaagatttcaagggatgtacccttgtcgattgaaatgcatgacataaacctccagctgctgggagatcatcaacgtcagaatgctgtcacagctgcttgcgcagctctctgtctctgtagtcaaggatgggatatctctgacgcttctatccaagccggcttagaggagacccaacttcctggtaggagccagtttctcacagcagaggaagcctcggcacttgggttcgatagcgcatccactgtactaattgatggagctcatactgaggaatctgcaaaggctttatcaggcgtgataaaaactgtcagaccagaagggcctctagcgcttgttgtcggaatggctagtgacaaggagcatcttgcgtttgccgagcagcttctctcaggtcaaacgcctgacgttgtgctgctgacggaggcgagcgtcgctggaggaacctcccgcgcaatgccagcctcgtccctgaaagaagtatggatagccgcggcacgcgatcgtggcatcgagtacgtggacatcggtggcgtcagtggcgctgaaatcccagagcacattgatgatctgttggactgcagtccatcgtcgagttccggaagaaagcccatggtgatcgggtgccaagacgtggcgccgttctcctcgaacctgatcgttgctgcctcccagctcctggagagcagaggcacggctccaggcctcatctgcgtgaccggctccctgcatctcgtcggggccgtactgcaacagatgggacggcattagaggaaacaaccatttcatctttcatgccatatactacactggatgattgtgtctacactgaactcggagtggtgggtggtgctgctgctgaagctgtactggctcctgatcgagagataattcgagattggggaaaaagaaatctcgaattgcctttttattttccttaggttccgagatggatcattcttgtggtgtgcattgcatcattgtaatcacaggcctatttgtttggctttaatctatgccggattttactacttttacagtgttctatttttatggattacagttgtaacagtc

SEQ ID NO: 28234 - DNA, 4142 bp, Homo sapiens
  Clone ID: LIB4750-126-A8_FLI
cttttcaccggcgccgggccgcctctgaggccagggcaggacacgaacgcgcggagcggcggcggcgactgagagccggggccgcggcggcgctccctaggaagggccgtacgaggcggcggcccggcgggcctcccggaggaggcggctgcgccatggacgagccacccttcagcgaggcggctttggagcaggcgctgggcgagccgtgcgatctggacgcggcgctgctgaccgacatcgaagacatgcttcagcttatcaacaaccaagacagtgacttccctggcctatttgacccaccctatgctgggagtggggcagggggcacagaccctgccagccccgataccagctccccaggcagcttgtctccacctcctgccacattgagctcctctcttgaagccttcctgagcgggccgcaggcagcgccctcacccctgtcccctccccagcctgcacccactccattgaagatgtacccgtccatgcccgctttctcccctgggcctggtatcaaggaagagtcagtgccactgagcatcctgcagacccccaccccacagcccctgccaggggccctcctgccacagagcttcccagccccagccccaccgcagttcagctccacccctgtgttaggctaccccagccctccgggaggcttctctacaggaagccctcccgggaacacccagcagccgctgcctggcctgccactggcttccccgccaggggtcccgcccgtctccttgcacacccaggtccagagtgtggtcccccagcagctactgacagtcacagctgcccccacggcagcccctgtaacgaccactgtgacctcgcagatccagcaggtcccggtcctgctgcagccccacttcatcaaggcagactcgctgcttctgacagccatgaagacagacggagccactgtgaaggcggcaggtctcagtcccctggtctctggcaccactgtgcagacagggcctttgccgaccctggtgagtggcggaaccatcttggcaacagtcccactggtcgtagatgcggagaagctgcctatcaaccggctcgcagctggcagcaaggccccggcctctgcccagagccgtggagagaagcgcacagcccacaacgccattgagaagcgctaccgctcctccatcaatgacaaaatcattgagctcaaggatctggtggtgggcactgaggcaaagctgaataaatctgctgtcttgcgcaaggccatcgactacattcgctttctgcaacacagcaaccagaaactcaagcaggagaacctaagtctgcgcactgctgtccacaaaagcaaatctctgaaggatctggtgtcggcctgtggcagtggagggaacacagacgtgctcatggagggcgtgaagactgaggtggaggacacactgaccccacccccctcggatgctggctcacctttccagagcagccccttgtcccttggcagcaggggcagtggcagcggtggcagtggcagtgactcggagcctgacagcccagtctttgaggacagcaaggcaaagccagagcagcggccgtctctgcacagccggggcatgctggaccgctcccgcctggccctgtgcacgctcgtcttcctctgcctgtcctgcaaccccttggcctccttgctgggggcccgggggcttcccagcccctcagataccaccagcgtctaccatagccctgggcgcaacgtgctgggcaccgagagcagagatggccctggctgggcccagtggctgctgcccccagtggtctggctgctcaatgggctgttggtgctcgtctccttggtgcttctctttgtctacggtgagccagtcacacggccccactcaggccccgccgtgtacttctggaggcatcgcaagcaggctgacctggacctggcccggggagactttgcccaggctgcccagcagctgtggctggccctgcgggcactgggccggcccctgcccacctcccacctggacctggcttgtagcctcctctggaacctcatccgtcacctgctgcagcgtctctgggtgggccgctggctggcaggccgggcagggggcctgcagcaggactgtgctctgcgagtggatgctagcgccagcgcccgagacgcagccctggtctaccataagctgcaccagctgcacaccatggggaagcacacaggcgggcacctcactgccaccaacctggcgctgagtgccctgaacctggcagagtgtgcaggggatgccgtgtctgtggcgacgctggccgagatctatgtggcggctgcattgagagtgaagaccagtctcccacgggccttgcattttctgacacgcttcttcctgagcagtgcccgccaggcctgcctggcacagagtggctcagtgcctcctgccatgcagtggctctgccaccccgtgggccaccgtttcttcgtggatggggactggtccgtgctcagtaccccatgggagagcctgtacagcttggccgggaacccagtggaccccctggcccaggtgactcagctattccgggaacatctcttagagcgagcactgaactgtgtgacccagcccaaccccagccctgggtcagctgatggggacaaggaattctcggatgccctcgggtacctgcagctgctgaacagctgttctgatgctgcgggggctcctgcctacagcttctccatcagttccagcatggccaccaccaccggcgtagacccggtggccaagtggtgggcctctctgacagctgtggtgatccactggctgcggcgggatgaggaggcggctgagcggctgtgcccgctggtggagcacctgccccgggtgctgcaggagtctgagagacccctgcccagggcagctctgcactccttcaaggctgcccgggccctgctgggctgtgccaaggcagagtctggtccagccagcctgaccatctgtgagaaggccagtgggtacctgcaggacagcctggctaccacaccagccagcagctccattgacaaggccgtgcagctgttcctgtgtgacctgcttcttgtggtgcgcaccagcctgtggcggcagcagcagcccccggccccggccccagcagcccagggcaccagcagcaggccccaggcttccgcccttgagctgcgtggcttccaacgggacctgagcagcctgaggcggctggcacagagcttccggcccgccatgcggagggtgttcctacatgaggccacggcccggctgatggcgggggccagccccacacggacacaccagctcctcgaccgcagtctgaggcggcgggcaggccccggtggcaaaggaggcgcggtggcggagctggagccgcggcccacgcggcgggagcacgcggaggccttgctgctggcctcctgctacctgccccccggcttcctgtcggcgcccgggcagcgcgtgggcatgctggctgaggcggcgcgcacactcgagaagcttggcgatcgccggctgctgcacgactgtcagcagatgctcatgcgcctgggcggtgggaccactgtcacttccagctagaccccgtgtccccggcctcagcacccctgtctctagccactttggtcccgtgcagcttctgtcctgcgtcgaagctttgaaggccgaaggcagtgcaagagactctggcctccacagttcgacctgcggctgctgtgtgccttcgcggtggaaggcccgaggggcgcgatcttgaccctaagaccggcggccatgatggtgctgacctctggtggccgatcggggcactgcaggggccgagccattttggggggcccccctccttgctctgcaggcaccttagtggcttttttcctcctgtgtacagggaagagaggggtacatttccctgtgctgacggaagccaacttggctttcccggactgcaagcagggctctgccccagaggcctctctctccgtcgtgggagagagacgtgtacatagtgtaggtcagcgtgcttagcctcctgacctgaggctcctgtgctactttgccttttgcaaactttattttcatagattgagaagttttgtacagagaattaaaaatgaaattatttat

SEQ ID NO: 28235 - DNA, 4086 bp, Homo sapiens
  Clone ID: LIB4753-025-C5_FLI
gacgtcgcgagcgctgagactgccgggcctcccagcccatctggcattcgagcgcaggaccgggcgccccggcaccgccgcgcgccacccgctaggatgccggtggccccagcgccctcagccgacggaggagccctttttcaacgccctcgctggagtctggcctgcacgccttgctgaatgaagccggaacctcagccccgcttccctttgaaatgaatgttcctggggcgccctctcgtggattttggagctaatcgtctgtgaatgccaagtgatggcaactgccctcccgccgcgtctccagccggtgcgggggaacgagaccctgcgggagcattaccagtacgtggggaagttggcgggcaggctgaaggaggcctccgagggcagcacgctcaccaccgtgctcttcttggtcatctgcagcttcatcgtcttggagaacctgatggttttgattgccatctggaaaaacaataaatttcacaaccgcatgtactttttcattggcaacctggctctctgcgacctgctggccggcatcgcttacaaggtcaacattctgatgtctggcaagaagacgttcagcctgtctcccacggtctggttcctcagggagggcagtatgttcgtggcccttggggcgtccacctgcagcttactggccatcgccatcgagcggcacttgacaatgatcaaaatgaggccttacgacgccaacaagaggcaccgcgtcttcctcctgatcgggatgtgctggctcattgccttcacgctgggcgccctgcccattctgggctggaactgcctgcacaatctccctgactgctctaccatcctgcccctctactccaagaagtacattgccttctgcatcagcatcttcacggccatcctggtgaccatcgtgatcctctacgcacgcatctacttcctggtgaagtccagcagccgtaaggtggccaaccacaacaactcggagcggtccatggcactgctgcggaccgtggtgattgtggtgagcgtgttcatcgcctgctggtccccactcttcatcctcttcctcattgatgtggcctgcagggtgcaggcgtgccccatcctcttcaaggctcagtggttcatcgtgttggctgtgctcaactccgccatgaacccggtcatctacacgctggccagcaaggagatgcggcgggccttcttccgtctggtctgcaactgcctggtcaggggacggggggcccgcgcctcacccatccagcctgcgctcgacccaagcagaagtaaatcaagcagcagcaacaatagcagccactctccgaaggtcaaggaagacctgccccacacagccccctcatcctgcatcatggacaagaacgcagcacttcagaatgggatcttctgcaactgatcgtctccatgcgccctgctctgcggctgtgttcttatttattgcatgcgtcgcttccacaggggcccctcaagagctgtgactcgggagagctaccttactttgaccaacagcctgcccagtgtggatgtctcttacagagggggcccaaggaatcaccaccccgcttcagtgtaaacaacgtgccttgtccactttgggctccagagtctttcagatgtactaagctgctgacatcatccactgccttctgctgcatcctagacaccctccctgttgttcacagagagggaaggtcgtgggccacacaatgctgtgtgaccctctccgtgtgcctctgaatggtgttttgatgattttacactacatttcctgtgcgtagaatggatgcttgtatattcgtacatctctatgttacacagaatttgtgttgcaggtgtttgccatgtggtacctacatagaatctccatacaacacacaggtaacaggttatacaagtggattcagactgaacccccagtacaaggacattgttttgaactaggtggacatgccatccctggtctccttagactgacatgattctcatgttaaccaagttttaaaagttcaaattccccaaaaaggcttgtccaaggctggccccagatgtgtgggtctgacccacaccagccctgtgtcctgtcctttcagtcatttgtccctgcgtaattttaatcgtattccaaagcccaattatgtgatggttttcaggtttctgcaaattacagaagagccagccaagatcacccaggagcttgtgcccccagatgggccaaagaaagagcctatgaaggagaagcagaagcagacggctggcctggctcaccttcccacgccagtggggcaggggtctgcttcaggaaatggaagctgtccaggaaatgagcagagattcacaagacagcactttgattctatgttgagtttgtttctatattagaaaagcagcaagtcagtaatcccccgtggcatcacagctaagtagctgtggccaccggcagtttcacagcatcctgaaagctggcactgatcgtgactatcagtgaaagaagtttaattttcaggttagaaaatgtgatctggcagtttatgcattcttcagagtaatgtaataatacctatgtgatgctgtaattttacttttcaacataagttgaacccgtagcagtctgtttaccttgtaaagggattacttagaagacatttttgtacatgctcttccccaaggattgtacgtattatacaaatagatggaaagaaaagtgaacacgtttgtagaactttcataagcacacagttgctgtgttgagttctctttaaaaacaaggacaaaaccaaccagcgttcaaaggaacctcccatcagagtcccctaaagtattttaggttcagtgagcatttgcctgaataaaacctaaaagagtagtcttaacacattactaactttttctaagagaaattgattcctgttttgtcatctgatgcaatttgctcttataaagagacattttcataggttcagagtaactcacctccatgggctgaccaaaggcttttctaatttttgttactgatgagatgaaacctatttgtaaggagatcttccccaggagcatttctgttgccttcttgacatcaatgaaaagtagcatattctcttatgaaatagcatgagaaaacacagggcatttctaggacagtaaaacgttaaagtactggattaagaaaacaacaacaggctgggcgcagtggctcacacctgtaatcccagcactttgggaggctgaggcgggtggatcacctgaggtcaggagtttgtgaccagcctggccaacatagtgaaatcctgtttctactaaaaatacaaaaattagctggatgcgatagcacgtgcctgtagtcccagctactcgggaggctgaggctggagagttgctcaaacccgggaggcggagattgcagtgagccaagatcgcaccactgcactccagcctgggtgacagagcgaccctctgtctcaaaaaataatgataataataaataaaacaacaacaaaatgcatcagagagccaaaacattcagtattgcattttcacataggtgatgaaatgactttggaactttatctgtgttatagttatgagttgctttgggagacttggagctctctgtagctattgttcataacactttgctccataaccctgatgtccgcagtatctaagtatctcagccttcatccattaactctactagggagcccacagccaccatttccactaggaggtatcaatatttgtggtatgacataaggctcccttgaaataacaagacttttgagcaatctgaattaaaaatacatcaaaaaagtaatagcgctcatttgctaaatgcaaaaaataatcacctttgataccaatgtgcaccaatatgcctaactagctagccagctggagataatttaccagggaatgtttcaaagccctaaccttgaagtttggaaacaggtggtcttctatgctgcagagaaactatgcattaggtctcttttcaattagaaacctttactatttccaatgtatgtttgttaaaaataataataataaaaccaaaagcctttgtggaaaccc

SEQ ID NO: 28236 - DNA, 891 bp, Zea mays
  Clone ID: LIB4756-001-A11_FLI
ccgggggagagatggctgagtggactaaagcggcggattaaaacaaccccgcttctgccggccgttttgcaggaggcgttgcggccatggcggcttcgaagcccatcttgtatagcgcgtggatcagctcctgctccttccgagtccggatcgccctcaacctcaaaggtgtggattatgagtacagggctgtgacaaggaacgatctagattacgaaaagatcaatccaatcaagtatgttccagcattggttgatggggattttgttgtttctgactccctggcaatcatattgtatcttgaagataaatatcctcaacaccctcttttgcctcaagatctcaaaaagaaagctataaatctgcagattgcaaatatagtttgttcaagcattcaacctcttcaatgttatgctgtaattggtctgcttgatggcaccttaggctgtaaccagagccttcagattgttcggaattacaccgacaagggatttaaagcaatcgaaaaacttctggaaggttgtgacagtaaatatgctactggagacgaagtccaactggcagatgtgtttcttgcgccccagatgtatgcaggcgtgacgcgcttcggaattgatatgtcaaagtaccctcttctggagaggttctacaaagcctatatggagatcccagcatttcaagtcgcggttcctgaaaaacagccggatgcgcctgcgtccccatactgaaacggaggcagcaaccatattgatattcaaattgatttggttatcttggaatcatgttgcatgtagcatgacatagaaggccacgatgtatgcctatttgtttcgtacacattctggtttgtccgaagaatttcacagtaaataaggcccgatgatttgtgtt

SEQ ID NO: 28237 - DNA, 931 bp, Zea mays
  Clone ID: LIB4756-001-F12_FLI
ccgggatttcgaagcccaccgaattccctgcgattcctctcccctcgcctcctcgtctccccctaggggatcgtcggagaggaatcgcaaagagggccgtctcatccgagttaaggaagccatggagcacaaggaggctgggtgccaggcccccgagggacccatcctctgcatcaataactgtggcttcttcggcagcgcggcgaccatgaacatgtgctccaagtgccacaaggagatgataacgaagcaggatcaggccaagctggctgcctcctctatcgacagcatcgtgaacggcagcgacgccgtcatggagccggttgttgctggcagcaacacggtagtagctgttgcccaagttgagttgcaaacaatgaacgtgcagcagcccgctgatgttgccggacccagcgagggggtggcggcgatctccaaaggggggaaggtagggccgaaccggtgcagcgcctgcaggaagagggttggacttacgggattcaactgccggtgtgggaacttgtactgcgcactccaccgctactccgacaagcacgactgcaagttcgactaccggactgctgccagggacgccattgccaaggctaatccggtggtgaaggcagacaagctcgacaagatctaggggggttccctacggttgggtatcaggaagattgtaaaccgcggtaactcgtcatgcggaactgctgccttgccccccgcgcctttctcttccatgtttgctgctacaatcttgttgttgggcattgcagtgcacggtgcacacttgtgtagcccgcctcgagaattcctgcctctgcatctggtcagttctaaaatgatttgcatgttggctatgttgtgtaagctctatttatggtggtctcgctgagacgggtatttggcttcgcagttatctagctatgtg

SEQ ID NO: 28238 - DNA, 1184 bp, Zea mays
  Clone ID: LIB4756-001-G4_FLI
ccgggacacaccaacctcagcacaccaaggagagtacgtggaggagcagccgtggcttcatcggtggccgccgcggcgagcacattcctgggcacccgcctggcggacccggcgccacagaacgggcgcatcgtggcccggttcgggttcgggttgggcggcaaggcgaagcctgctccgaagaaggtggcgaagacatcgacctcctctgaccggccgctgtggttccccggcgccgtggcgcccgactacctggacggctcgctggtcggcgactacgggttcgacccgttcggtctcgggaagcccgtggagtacctgcagttcgagttggactcgctggaccagaacctggccaagaatgaggccggcggcatcatcggcacccggttcgagtcctccgaagtcaagtccaccccgttgcagccctacagcgaggtgttcggcctccagcggttccgcgagtgcgagctcatccacggccgctgggccatgctcgccaccctcggcgccctctccgtcgagtggctcaccggcgtcacctggcaggacgccggcaaggtggagctggtggacgggtcctcctacctgggccagccgctgccgttctccatctcgacgctcatctggatcgaggtgctcgtgatcggctacatcgagttccagcgcaacgccgagctcgacccggagaagaggctgtaccccggcggctcctacttcgacccgctcggcctggcggccgaccctgagaagaaggagcggctgcagctggcggagatcaagcacgcgcggctcgccatggtcgccttcctcggcttcgccgtgcaggccgccgccaccggcaaggggccgctcaacaactgggccacccacctgagcgacccgctccacaccaccatcttcgacacgttcggagggtcctcttaagcccgccattgctccgccccgtccatcgaccggccggaacgtgttcttggattaattaactacgatctctatgagcctggggatggatcaacccgtcgtgcgtggtctcgttttgtgatgagtgggagagagaggatggcaagatcgatcctttgttaatggagatctcgttaattaggagagctaccgctgggacttggtggtttgtaatatatgatccaaccagtgatgaatcaatgcattcacttgtgtacacg

SEQ ID NO: 28239 - DNA, 904 bp, Zea mays
  Clone ID: LIB4756-002-D2_FLI
ctcgaggccggccgaccctcacgcatacgcttcatagcgctgatctcgcgcagcaggagaaaactgcagcagcgcttgactactgcatccatggcggccacttccagttccatgtcgtcggtcatcttcctcctactcgctaccttggccgccgatgccagcgcggccaccttcaccgtcaaaaacaactgtaactacacggtgtggccagcagtcatcccggccggcggaggcgagcggctggacccaggacagacgtggaccgtctccgtgccccccggcacaaccggccggttctggggccgcacaggctgctccttcagcggtggtggaagcggcggccactgcgataccggtgactgcgctggcgccctcaattgcaccgtctccgggcagcctcccacgacgctggccgagttcagcatcggcggcgccgaggatttctacgacatctcggtggtcgacggttacaacctgcccatggccttctcctgcagcaccggcgttggtctggtgtgcacgagtcccgcctgccctgccgcgtacctgtttccgaacgacgattccaagacccgtgggtgcagcagcaacagcaactaccagctcaccttctgtccatgaggtgtcggctactctcggatgcaccgtgcacgcacagcatagatggcattagagtatgtatgcatggaacacctcctaaataatttttaaaacgtattaagcaaataaaggtgtgggttttaaaataaaagcttgtgatgagttgtatagagaatttggaacagcgccgtagacatcgtctgccatagatatatgcgcttgtgattcaagattgtgatgagtgagatcgtgtggttagaattgtatacaagaaatcataatcttaatggatcgatatgtatcc

SEQ ID NO: 28240 - DNA, 761 bp, Zea mays
  Clone ID: LIB4756-002-G1_FLI
ctcgaggccggccgggcccacttccacccaaatccaccaccgccataccagcgtgtccgcgattccgtcgagttagaccagtcgagagagcagtcccagacgagaagaggtgaatatgagttccggcggcggcaggggcaagcccaaggggtccaaggctgtgtcgcggtcgaccaaggctgggctgcagttccccgtcggccgcatcgcgcgctacctcaaggcgggcaagtacgccgagcgcgtcggcggtggtgcgcccgtctacctctccgccgtcctcgagtatctcgcggcagaggtgttggaactggcgggcaacgcggcgcgcgacaacaagaagaaccgcatcgtgccgcgccacatccagctcgccgtgcgcaacgacgaggaactcagtaagctgctcggagctgtcaccatcgccgccggcggggtgttgcccaacattcatcagacgctgctgcccaagaaggccggtggcaagggcaaggccgacatcggctccgcatcccaggagttctaagctgccgcggcggcggttgcaggcttctctgatttgttcgaactggagctccgacatgcgtgaagtccccccgtcgctcgagtttcgtcgattagtagtgttaggtgtgttttctatctttggttaggtttaggttgtctgatggatggtttatcagacgaaagtttggtgatcgagggcttcctgtacgtatcaatcaatcttgctggaatggaagaaatcgttggttgcagac

SEQ ID NO: 28241 - DNA, 1073 bp, Zea mays
  Clone ID: LIB4756-002-G5_FLI
ctcgaggccggccgggagaggcacccacccactcatccgtccgtccatccaatgcgatggtgtcgttggcgcgccggccgctctccgccgccgtacctgcgggcaacctcctcggcatccatctcttccggtgccccgacgccgttggcatcgtcgccaagctctcggaatgcatcgcctcccgcggtggcaacatccacagcgtcgacgtcttcgtccccgacgacaaacccatcttctactcccgcagtgagtttacctacaatccaaggctctggccgcgtcatgagctccacaaggatttcctcaatctctcccgctgcttcaatgcgcaaacctccaccgtacgagttcccgatcttgaccccaaatacaacatctccatcctcgcatcaaagcaggaccactgcttgttcgatttgctctatagatggcaagaaggcaggcttccagtacacattaattgtgtcattagcaaccatgatagaccacaagataatcatgtacggcgttttctccagaggcatggaatcccataccactacttacccaccgcacctgccaacaaaagagagaaagagatcttggaattgatccagggtacagattttgttgtgctggcaagatacatgcagatactctcagaaaacttgttaaaagcatatggtaaagacattatcaatattcatcatggccttcttccctcatttaagggagggaatccttcaagacaggccttcagtgctggggtgaagttaatcggggcaactagccatttcgttactccagaacttgatgctgggccaatcattgaacagatggttgaacgagtctctcaccgagacacgttacagagttttgttgtcaagtctgagaaccttgagaagcagtgcttagcagaggctatcaagtcatattgcgagcttcgtgtcctaccatatgaactcaggaagactgtcgtgttctgatctgagctccctttattttctgtcttattgtacttttatatggattgataaagtgatttttttagcttaaatatatccatcccctcgacattattttaggtaagg

SEQ ID NO: 28242 - DNA, 927 bp, Zea mays
  Clone ID: LIB4756-003-D10_FLI
ctcgaggccggccgggaaccacaactcttcgattctttcctcccaatacgcacatttcattcctgcaaacatgggcttcaccgacctcgtttccgatgcgggcttgaccctcctcaacagctatgtgaggacgcgctcctacattgttggctactccccatcgcaggccgatgtcaaggtcttccagcaaatcaaggagattcctgcccccgagaagtacccatacgcatggcgctggtacaaccacatcctcaccttccagggtgagttcgactcgctccctggcgacccaaccaaggagttcactgcctacggccccgagtcttcagagctgcccctgaaccccgccaaggcccctgagaaggaggctgaggatgacgaggacatcgacttgttcggcagtgacgacgaggaggaggatgccgaggccgccaggatcaaggaggaacgtctggccgagtacaacaagaagaaggccggcaagaccaagcctgctgccaagtccattgtcacccttgacgttaagccatgggatgacgagacaaacatggacgagctcaaggccaacgttctctccattgagaaggacggtcttgtctggggtgcctccaagttggttgctgtcggtttcggtatcaagaagctccagatcaacttggtcgtcgaggacgagaaggtctcgctagacgagctccagcaacagattgaggagtttgaggaccacgttcagtccaccgacattgttgccatgcagaagttgtagacgactgccgctaggtgctttgatgactatttgacgaagagtatgcatgatcatgacggtagggtttgggctcggttcacggtttgatgtctttatgagcagtcgctagacgagagccaaaataacgacatggtagagataccacttcccactgcgggacaagg

SEQ ID NO: 28243 - DNA, 811 bp, Zea mays
  Clone ID: LIB4756-003-H4_FLI
ggccggccgggaaatttcatgcgttccttatcttccgttccgctcggaagtctctctaccaccttctccccattccgctgttccgccctctcgcgtcgcgtgcctccaggtccctcctctgcgtaactgggtggccgccgatccgccgccaccgccctgcgtcaggtgttccggtgacaagcgtccacctgtgcccggcctcggcggctgcactgcgcgccgcgggagccagcagccgcttctccaccaaggcgaccgtgccgctttcaagatgttggaataccaaaacgcaattggggggagactgaagctgaagggtaaagcgctggacgtaaaggatggtggggtgaagaaaaagaagaagaagtaccagcgtgaggagtcgtctcggattgcgcacgatgagctccacaaaggggggagatctgaatcaccaattgatcccaacaatgagcggattgaatctgacaagaccggagatgaagggaacccacatcctgactatggccatctcacaccagcagagcgacgctacatggaacagaagcagaatatcgacatgcagaagatggccaaagtcgccaacaagtcccatagagaccgcatccaagacttcaatcagtacctggcaaacctaagcgagcactacgacatccccaaagttggtcctggctaacatagccaaactggctgtgttacgcacaacaattgtgtgctgggtctatccatttatgttagcatgttatgtatcgtttaaaacgatttgttgccaccagaaattgatatttaatttcaaaagcatgttccaact

SEQ ID NO: 28244 - DNA, 2010 bp, Zea mays
  Clone ID: LIB4756-004-C12_FLI
ccgggagagtctagcggacgccccccctccccagttcccacgagatcccgactcggacgaagctctcctcgccggccaccgtcgcggcagcttgctacgcacagggagtctgcggcgcgcgaggaatacagcgagggatggggtggggcacagtggtttacgagggcgcggtcgtcggctcgtcgctggtggggctcggctgggcggggctgtggttcctgaaccggcggctgtacaaggagtacgaggagcggcgggtgctggtgcagatcctcttcggcctcgtctttgccttctcctgcaacctcttcgagctcgttctcttcgagatcctgcccgtcctctccaagcacgcgcgcttcctcaactggcacctcgacctcttctgcctcatcctcctcctcgtcttcgtactcccctactaccactgctatcttctgctccgtaactcagggatgaggagggaccgggcgtggctcgtcgcggcgctctttctgctggtcttcctatacgggttctggcgcatggggattcacttccccatgccttcaccggagaagggtttctttacgatgccgcagttggtcagtaggattggggtgattggagttagtgtcatggctgttctttctggttttggtgccgtcaatctgccatatagttatctgtcgctattcatcagggaaattgatgaaacagacatcaaaaccttggaacgacagttgatgcaatccatcgagacatgtactgctaagaagaagaaaattattttgtcccagatggagatggagaggattcaaggatcagaggagaagttaaaggccagatcgtttctgaagcgtatagtgggaacagttgttagatctgtgcaggaagatcaaactgagcaggatataaaaaacttagaagcagaagtccaggcactggaagaactttccaaacagctgtttcttgagatatatgaacttcgtcaagctaagatagctgctgcgtattctcgaacttggagagggcatcttcagaatgtacttggatatgctttatcagtctattgtgtttataagatgctcaagtcgttgcagagtgtagtctttaaggagtcaggctctgttgatcctgtaacaatgtcaataacgattttcctgagacattttgacatcggcattgatgttgcactgttatctcagatctttgatgttcatcgggatgttggttgtcatatctgttcgaggtttcttggcaaatgttatgaagttcttcttcgctgtttctagagttgggagtgggtcgacaaccaatgttgtccttttcctatcagagatcatgggaatgtacttcatatcttccattcttcttataagaaaaagcctggcaaatgaatatagggtgatcattactgatgtcttgggtggtgatatccaatttgacttctaccatcgctggtttgatgctatatttgtggctagtgcgttcctgtccttgcttctgatatctgcccaatacaccaccaggcaaacagacaagcatccgattgactgatgcatcttgcccacatgtgtgcatgttgtctttttaaccactattcatccaaggttgacccattctttgtaccacagtttcccaaggcactgtttctccatacacttccatacacagttacaaaacataatacgtcagttaacttgaacaaagtctctattttgtaatatgtttcccgattgcattggtttatggtaaacagttcctccaacagcgactatctgagtcacgtctggtgatgcagtgacgggacacgggattcattgtaatgcagtctgcacgatactacattttgacttggacaattgtggaagcccatattaggaattgattttgactttgtaaaatagcttgaaactagtgtcctaggaccgtagcacggtatgttggtgtatcttatatattattttggctgtttcatgtataacacacttcgcgacaactctgaatggtagatagatctgtttcttc

SEQ ID NO: 28245 - DNA, 1362 bp, Zea mays
  Clone ID: LIB4756-004-G3_FLI
ccgggcagaaggagtccaccttgcatctggtgttgcgacttcgtggtggtatgcaaatctttgtcaaaacgttgaccggcaagactattacccttgaggttgagtcctccgacacaatcgacaacgtgaaggccaagattcaagataaggaggggatccctccggaccagcagcgattgatctttgcaggcaaacagttggaagacggccgcaccctcgccgactacaacatccaaaaagagtctacactgcatttggtccttcgtctccgaggcggtatgcaggtctttgtcaagaccctgactggtaagaccatcaccttggaagttgagtcctcggacaccatcgacaacgtgaaggcgaagatacaggacaaggaaggcattcctcctgaccagcagcgtcttatctttgctggcaagcaacttgaagacggccgtacccttgcggactacaacatccaaaaggaatctaccctccacctcgttctccgtctccgtggaggaatgcaaatctttgtcaaaaccctcaccggcaagaccatcactctggaagtagaatcgtcggacaccattgacaatgtgaagaccaagatccaggataaagagggcatccctcccgatcaacagcgtctcatttttgctggaaagcaactcgaagatgggcgcactctggccgattacaacattcagaaagaatcaacactccacttggtcttgcgtctccgcggagggatgcaaatttttgtgaagactctcacaggtaaaacaatcacccttgaggtcgaatcatcggataccattgacaacgtcaagaccaagattcaagacaaggaaggcattcctccggaccaacaacgtctcattttcgccggcaagcaacttgaagacgggcgcactttggctgactacaatatccaaaaggagtctacccttcatctggtcctccgccttcgaggaggaatgcaaatttttgtcaaaaccttgacggggaaaaccatcaccctggaggtcgaatcgtcggacacgattgacaacgtgaagaccaagatccaagacaaggaaggcatcccgcccgatcagcaacgtttgatttttgccggcaagcaacttgaagatggccgtaccctggcggactacaacattcagaaagaatccactcttcacttggtactccgtcttcgtggaggcgtatagttgattcatggacaccttatccatattccatttgtgtaacgatacttgtgcgaacctgttagctccctcgttaaattgcgatgctgtacccttgttaatacaacctttgatgggcaccactgtatcgcgtgcccagttgctagcactctgctgccttacaccaact

SEQ ID NO: 28246 - DNA, 933 bp, Zea mays
  Clone ID: LIB4756-005-D7_FLI
ctcgaggccggccgggagaagaccggccgggatcaaaaagatagacacactcaaacaccgcaagctaagaagatcccttgctgaattcagagagcacaaacacaaaagcgagtgcaaaaccaaatggcagccttgacctacttccttcttgttgcctttctagcgttggtcacatctcaggccattgcctctgaccctagcccgcttcaagacttctgtgttgccgacaaatactctccggtgaaggtaaatggatttgtttgcaaggaccccatggctgtgaacgcagatgacttcttcaaggcagcaaaacttgaccaaccaagggacaccaagaacaaggtgggatccaacgttactttgatcaatgccatgcagttaccaggactcaacacattgggcatctcgttggctcgcattgactacgcacccttaggtcaaaatcctccacacacccacccacgtgccacagagatcctcaccgtgcttgaggggaaactctatgttggatttgtcacctccaaccaagctaacaacaacaacaagctatttaccaaggtcctcaacaagggcgatgtgtttgtattcccccaaggacttatccacttccagttcaacccggtccatgacaagccagcagtcgcgatcgctgcactaagcagccagaaccctggagttattactattgcgaatgcagtctttggatcaaagccacctatctcagatgatgtcttggccaaggccttccaggtgcaaaaggggacaatcgattggcttcaagctcagttttgggagaacaaccactactaaaacaatgaagtctgggttcatcatttgatattatagaaatttatttgcattttacatactactccatgtatttactttttcctaggctacgacccataataaaataaatgttctatgtttccg

SEQ ID NO: 28247 - DNA, 928 bp, Zea mays
  Clone ID: LIB4756-005-E12_FLI
ctcgaggccggccgggacggctctacggagggataggtcgctcttcttcctcactgagaccatgaccatgagacgggtcgagacgacagcggcggatgcgccccacgacctcccgtgactctcccagccccgccttcctcccgcctccgcgatggcagtcttgctgtggcggtgcatatgcgggccccaacaatccttcagtaagaatcgaggcgcatccaccccttctcctcctgcaggcaggagatccaaatactcgggacaatctgtgaaagcaatgcccatgcgtttgttaacggttggaaagaagaggtatcgggggacacaactccttgttgaagaatacaaggagaagctcggtcactattgcgagttcgaggacactcttatcaggtccaacccaaagcttacaagtgatgtaaaggtgcaagttgaagcagaagacacggctatgatgcagcaactcaagtctgacgattttgtagttgtgctggatgaaaacgggaaggatgtcatatccgagcagatagctgatctgattggggatgctggcaacacaggatcatcaaggctcacattctgtatcggtggaccatacggtctcgggttacaagtgcgagagcgtgcagatgcaacgattaggctgtcctcactagttttgaaccatcaagttgccttgatagtcctcatggagcagctctacagggcatggactataataaaaggacagaagtatcaccattaggcctaagtgctatcatcattcgctgctgtatgtaggacttgaaaaatggaagactgcattaataaatttgcaggtatagtgttcaaggactcattgtactttccattcgtgtagaaccccaaattgctcaaaatggtttctttgacatgttcgaatgttcattatcgatgactgtcagtttac

SEQ ID NO: 28248 - DNA, 1170 bp, Zea mays
  Clone ID: LIB4756-005-G7_FLI
ctcgaggccggccgggacaccacccaaactaaacaacaccagcttctctaaagatcacaatgatgagagccctggcggtggtggccatgctggccaccgccttcttcgctgtgcccgctcgcgccgagcagtgcgggtcgcaggccggcggcgcgctgtgccccaactgcctgtgctgcagccagttcgggtggtgcggcagcacctccgactactgcggcagcgggtgccagagccagtgcagcggcagctgcggcagcaccccgaacccgccgagcagcggcggcgtggcgtccatcatccccgagtcgctcttcaaccagatgctgctgcaccgcaacgacgcggcgtgccccgccaacggcttctacacctacgcgggcttcatcgcggcggccaacgcgttcccgggcttcggcaccacgggtgcgcccgacgtgcagaagcgcgagctggcggcgttcctggcgcagacgtcccacgagacgacgggcgggtgggcgacggcgcccgacgggccctacgcctggggctactgcttcaaggaggagcagggcggcgcgtcggggccggactactgcgagcccagcgcccagtggccgtgcgccgcggggaagaagtactacggccgcgggcccatccagatctcctacaactacaactacgggcccgccggccaggccatcggcgccggcatcctcgccaacccggatatggtggccaccgaccccaccgtgtcgttcgagaccgccgtctggttctggatgacgccgcagtcgcccaagccgtcgtgccacgacgtcatgacggggcagtggacgccctccgccgctgacacggccgccggcaggctgccgggctacggcgtcgtcaccaacatcatcaacggcggcctcgagtgcggccatggcgctgacagccgcgtcgccgaccggatcggcttctacaaacgatactgtgacttgcttggggtcagctacggcgacaacttggactgcgccaaccagacgcccttcaacggctagttaataagctagctacctcaccatgcatgtctgccttattattagagaacacaataagacctgatcgatatgatgatgggtatgcatgtattactttactacacgcagatccagcaatcaagaataaagcaaattaatgtttact

SEQ ID NO: 28249 - DNA, 994 bp, Zea mays
  Clone ID: LIB4756-006-G5_FLI
ctcgaggccggccgggaaccacccgttccgcgcccgtcctcgaccctcccacctattcgctcgctcgctcgccgtccgcgcccgcgcgggccgcgagatctaggccagtcgccgcggccgtggccgcgggctgacgggatctctgtcctcccgacacgacgaacctctaggaaggcgcctaagacgaggaggaagcgggggctatggaggcgtcttcctgggacgccgttcgcaagcaggcaaggaggttggaagctcagttagatgaccaaatgattgcataccgtaaattggtttctatgaaatcagacggttcagaggacaacattgagtctgatatagaaagatcactgaagcagttacagcaagtgaattcgcaaatgcaaacttgggtatcatcaggaggttctgaagttctttctcatactctgactcgtcatatggagattttgcaagaccttactcaggaattctatcggcttcgatcaagtctcagggcaaaacaacagcatacttctctccttgacttgagagattttgacagagcaaagtttgatgttgaggagccgtcagactcagctgatcaagttcttctcagggaacaaactgcgattggcaggagtactggacagatggataacgtgatatcacaagctcaggcaacacttggttctctcatgacccaacggtcaacattcggtggcatcactacaaagataagcaacgtcagcagccagcttccaacaattaaccacgtcctctcatcgatcagaaggaaaatccatggataccatcattctttcgctcgttgcatctgtctgcacgtttctcatcttcatctactggctgtcgaagtaggtttaccagagcaaagatattacagtgttgtaagcttgggaccacaccaccagtaccggtacagatagtcttcattggtgtttgtacaatattattggttgattgaatgctgttacgattcgggcgtgctgtaaag

SEQ ID NO: 28250 - DNA, 730 bp, Zea mays
  Clone ID: LIB4756-007-E9_FLI
ctcgaggccggccgggacgatcccgaattcagatctcctcaccaagtcaccttctttctcaacaccgcaaatatggatcacgcaaagttggcgcgtatgcaggcgtcagtgcgcattggcggcaagggcactccccgcaggaaggtcaagaaggtccacaggggcgctggtaccgacgacaagaagctccagaccgcgctgaagaagctcaatgtccagcctatccaggccattgaggaggtcaacatgttcaagagcgacggcaacgtcatccacttctcggcacccaaggtccacgcctcagtacccgccaacaccttcgccatctacggacacggtgaggacaaggagctgacagagctcgtccccggcatcctcaatcagctcggccccgactcgctcgcatcgctacgcaaactcgccgagtcttaccagagcatgcagaaggagaagggcgaggacggcgagaagaaggacgacgacgaggaggatgacgatgacatccccgacctcgtcgctggcgagaacttcgagtcgaaggctgaggtcgagtaagaagctactccagtcttagccaaacaaagactaggcagtgttgaggaggaggctacgtgcaatgatggcctgccgcatgtacattggttttgaggacttcatgaatgcaatgatcattacggtcagcagccgcggcgagttttgcatgcacataccgggctggtgttatacctcg

SEQ ID NO: 28251 - DNA, 1150 bp, Zea mays
  Clone ID: LIB4756-007-F8_FLI
cgaggccggccggatcaatttttcttctctcgtggctccgacgctcctttctttctcggaggcgacagctcgaactcgaatcccccctcatccagcctggcgctggcgtcgcccgtcgccgccgctcgattgcctccgcctgaatatcccttgccccataaggcctgaccttgaaagcctcgcctcttgatcccggcggcggcggaggggagggcgatgccgaagcggacgacacacacctactcgagcgaggacgcactgccggagggccccgagtccgaccttttcgtatactactgcaagcactgcgcctcacatgtcctcatcaccgatacccaattgcagaaaatgcccaagcgaaggactgacagagcacatgttttagacaaggctaagcatctttcaaggctaaatgttaaggaggcaggaaaagtaatgttgaaacgtggtgaaggaaagcttgaaaagcagtttcgcatgagctgtgtgggatgtgacctttttgtttgttaccgatcagaagaggatctggaggtttcccctttcatatacgttattgacggagcactgagttcagttgctgctgagacaaatccacatgatgctcctgtacctccttgcatcacacaactggaaggtggacttgtccaagtagccattgaagtggaagacagggcacaacgttcagcaataacaagagtgaatgctgatgacgttcgagtaacggtagctgcccttgctgctcgaggggaagctaacagtgagttgctagaatttatgggcaaggttcttggcctaagattgactcagatgacccttcaaagaggatggaataacaaatcgaagcttctaattgttgaggatttgtctgcacggcaagtgtatgagaagctcctagaagctgtacaaccttaggcacccgagcgatggagcaatgtggtatgcagtatgcgtctggatattctctttcgagagcataggagaagatttccatctataatgtgcaacaagaggatcagaacgtgtcgagacgaggtcgaaacatggctcaaatgtataactagaccagagcagtatccggttcattgtttctgtcgtgactcagatattgtatcctgtggtctccagggaggttgttctgtgatttcct

SEQ ID NO: 28252 - DNA, 630 bp, Zea mays
  Clone ID: LIB4756-007-H4_FLI
ccgggcaagtaatttcttcatctggtggtcttcttgttcaatcctcatctcgatcgggaggccaccaaccaccatatggcgggagggaaggtttactcgttcgaggaggtgaggaagcacagcgaccgcaaggactgctggctcatcatcgccggcaaggtgtacgacgtcacgccgttcatggaagagcaccccggcggcgacgaggtcctgctggcgtccgtcggcaaggacgccaccgcggacttcgaggacatcggccacagcgcctccgccaaggagctcatgccccagtactgcatcggcaaggtcgacgcggctaccttcccggccaagcccgcctacgtcgtcaccaaggacgacgccaggtcgtccgagaaggccgcgacgagcgccggcgcttgggccacgctcctgcagctcgccgcgcccgtcctgctgctggcgctggccttcgcgctgcagcagaactatgccagggccaaggcggagtagacaagatacagatagataccatcgttgattccgctgagtcgcggccctgcggcctctttggaagcatctgaattacattttcttcctggcaaaattaactgctcgtggtttcgtaataatggttacattttctcc

SEQ ID NO: 28253 - DNA, 1301 bp, Zea mays
  Clone ID: LIB4756-008-C2_FLI
tcgaggccggccgggaagcagtcgccgcaccccctctctgtctctcgcatctagtctagacgttgtactgcagcggcagcgcaccacatctgaccctaccaacatggcatccgcggggacgacggcggtggtgcccgaggtggccctgcggtcgggcaacgcgaggacggcgatgccgatggtcggcatgggcacggcgtcgttccctctggtgcacgaggccgtcaaggacggcgtgctctccgccatcgaggtggggttccgccacttcgacacggcctccatgtacggcaccgagaagccgctgggcgacgccgtggccgaggcgctccggcgcgggaccctgcggtcccgggaggatctgttcgtgacgtccaagctgtggtgctcgcagaaccacccggacctcgtgctgccgtccctccgggaaacactcaagaacctgcagatggagtacgtggatctgtacctgatccactggccggtgtgcctgaaaccggggccgcccgagctcccgaccaggaaggagaacgccgtgccgctggacctcgcgggcgtgtggcgcgccatggaggagtgccagcggctgggcctcgccaaggcgatcggcgtgagcaacttcaccaccaggcacctcgacggggtcctggccgtcgccacggtcccgcccgcggtgaaccaggtggagctgaacccggcgtggcagcagcggacgctcagggcgtactgcgccgacaggggcatccacgtcgcggcctactcgccgctgggagggcagaactgggacgggcagggcagcgccgtgctggactccgaggtgctcgccgcgatagccaaggcgagggggaaaaccgtcgcgcaggtggcgttgcgatggatacatgagcagggagtgacatgcatcgtcaagagttacagcaaggagaggctgaggcagaaccttgggatattcgactgggagctgaccgacgaggagcggctcaagatcagccagatcccgcagaggaaggttgtccagactagtagcttgttctcgcaagagggtgagttcacggctgttgatccagcggaacttaatattttagaggaatagggggaaaatgacccgccacacatacactgcatcagtgttgctgcatacaaaagtgtatttcgtagaccatttgaataaggctgttggaaacggtgacatctagtgctgtttggtttcgttgccgggacggtaacatcaacagttaatgctgcaatccattaacggaacggaggggaatggatagcgctcgtttatgagtggtttcatt

SEQ ID NO: 28254 - DNA, 1403 bp, Zea mays
  Clone ID: LIB4756-008-D3_FLI
atccattcttatgatcaaaccaaacataccactatagccgtcgccaatacccgataagactcggcaaatcagctggacacatagcacatctatcccgcttccgtctcccgctccagtcgccatggcggaagccctcgtgggcctccgcgtcgctgccctcgccgtcccgcagcctaggagccaccgcagacggcttcttcccgctgcgcgcctcgctgcgttccggcgcgaccggctgagcaccgcccgcgcggccgtcgcagggccaccggaggtggacgaggacgattccatgagtatcgacaacttgcatcgtttcttcgacctcaacgtcggaaagtgggacgggtcattctaccaattcgacgcgcacgggagggttcttcaggagattagcacgcggctgtccgtgagcacgtacggggaggacaacctcatcagcctccttcaatcgttgtacattaagcaagcatcctctgcaatatcaatcgtggacgaagaggattctgaacctgaatgggtggaatacaagatcaaagagacgaacatattcactgtggacaaatatcagcagatagggttctttcctgaagaaaaggcatttgctctgaggtatcagactgctggaatgctggagactgttcttcgggttggcacgcttggagaagatgatactggtgaagaatctcccaaaaacctgaagataccttctcgcaagccatctatcgtatgtgaaaattgtctttactcccttgaaggcaatggtcgaatgagggctttccacataatggatccaaagggagtgcttgacacacttcttatttttcatgagaagaggcagggatctgaattggcacaatcatttaaacactattcagtttgtaccaagagtgccagcagtgataggataagtacagtacttggaagatgggagggtcattctgtgactaagaggagtggggtgtatggagcaacacttgctgaagcagatacagctgttgttctcaaaatgggctctaatggccaattgattcaggatactttatcaactaaaatcggaaccggtacaacaacaacggtcaactggacaggatcagcaaatgaaaacttgcttcagtttgatggaggatatgaaataacattgctacctggtgggatgtacatgggatatccatcagacattagcaaatctatttcccaattagattcttttcatttagagttttgttggatggaatcacctggaaagaggcagcggcttgtccgaacttacgatgcagctggtttggctgtttcatcgacctatttttttgaaaccaaagtttgagtcatagcttctacaaaatgtattgcaacggttttgtaagtcatacagtaatctcactatttgtgtccttcggtgg

SEQ ID NO: 28255 - DNA, 1258 bp, Zea mays
  Clone ID: LIB4756-008-F7_FLI
ccggggtgcacggcactgcttagttctttccaaagagagagagaaacaatcaggggtccatccatttttgtcagccatgacgaacggctatctgttccgcgagtacatcggcgcgcagtccaccggcgtccagttctccgacgtgcccatcaacgccttcgttagcttccacttcatcctctccttcgccatcgactacacgcccgtggggcagcagccgaagccggtgccgaccaacggggtgttcagcccgttctgggacacgggcaacctgtcccccgccgccgtggccgctataaaggcctcgcaccctaacgtcgccgtcatggcggggctcggcggcgacagcgtgcaggacatcgtcaaggccctcttcaccccgacctccgtcgacacgtgggtggccaacgccgtgacgtcgctcacgggcatcattaacaggtacgggctggacggcgtggacgtggactacgagcacttcgccgacggcgccgacgtgaatacgttcgtcgagtgcatcggccgcctcctgacacagctcaagcagacgatgcccaacatcgccacctccatcgcgccgttcgaggacccagtggtccagaagtactaccaggcgctctggagcaagtactccggcgtcatcgactacgtcaacttccagttctacgcctacggcgacaacaccgacgtgcccacgtacgtcatgttctacaacaaccagttggcgaactatcccggcggcaaggtcctcgccagcttcaagaccggcaacgtgaccggactgctctcgccggaccaaggtatcagtggggccaaggagctgcagcggcagaacaagctgccagggctgttcatctggtcggcggacagctccaagaagagcagctacggcttcaagtacgagaccgaggcgcagcagatcattgccaaccactgatcgatctgcgatcaggacttagcttaacaagggatcacacattttacaataaataaatgataacctctcaggtcaacaacaattacttgcaggttaaggagttcggctgttgatttaaggacagaatgatggtgtgtgaaaatgcaagtttaaagaaaatcgtcattattctgtcctttaaacttgtactagcaaagtaccagtgtgttgttacgatttacatttatgtttaagtatacaataaaaacataaacacatgtgtgttatgttggttggatatatgtaaatatgagtttagagccaacaatcatggtttaaact

SEQ ID NO: 28256 - DNA, 172 bp, Zea mays
  Clone ID: LIB4756-008-H2_FLI
gagggccgctcgttgtgtacctcagccatcgatcgctgctgtggtccggtgacggtgagcggcgctgtgcagggaggggggaaaaggagaggagaggcgagacgagacgagacggatgatgccggccactaccgctggtagtagttttttttttttcccggccggcctcgag

SEQ ID NO: 28257 - DNA, 1271 bp, Zea mays
  Clone ID: LIB4756-008-H4_FLI
ccgggacatttggatcgtgatctattaccacccctacccacatcacggagcatcccccttaataacagcaaactaccacacccatgtccacctccgtctccgccgccgccgttgccgctctcgtcccacccctcaccggccgccgggcgccgccggcatctcgcgtaccgcagatttgccgcagaagaatcagatccaaaccccgtatcttctcttcttccccctccttccccattgtccccgccgctgccatggccaccggcggcgccgcccccaccgcctccgatgccgggtccaagaagaagttgctcatcttcgactccgaggaggatctcgcggtttctcttgcgaagtacactgcggagctgtcggagaagttcgcggccgagaggggtgccttcaccgccgtgctctctggcggatccctcatcgaggcactcaggaagctgacggagccgccgtacctggattcagtggactggagcaagtggcacgtcttctgggtggatgagagggtcgtgcccaaggaccatgtggatagcaactacaagctcgcctatgatgggtttctctccaaggtgccgattcctcctggacaagtttatgctataaacgatgcgttgtcagctgaaggagcggcagacgactacgaagcgtgcctgaagcagcttgtcaagaacggtgtgatttctatgtcagcggcgactggatttcctaggtttgatctccagcttctgggaatgggacctgatggccacattgcgtctctcttccctggccaccctcttgttaacgagaaagagaggtgggtgacatacattaaggattctccaaagccacctccagagagaattacattcacgtttccagtaatcaactcatctgcatacgttgcgatggtggtgactggagctggaaaggccgcagcggtgcagaaagcgctctcagacaagcaaacctcgtcagacctgctgcctgttgagatggctgtgctgcaagatggagaattcacctggttcactgataaggcagcggtgtccttgctgcagaacaagtagagtctccatggtaaccttggctcggctcgaagccattttagctcataaaataaaagatccaggggcctgcgtgcatagctgcattcgtcctccaggatttcgtgtaacggagactcgatccttttatgtagtgtgtgttgttcggagtaatgttcaaaaactctattggcttccggcttttctgaaacattgctcgttaagtgtttggtttag

SEQ ID NO: 28258 - DNA, 357 bp, Zea mays
  Clone ID: LIB4756-009-A7_FLI
taccctcgaggccggccgggactcgcgcacccatcacaccccctaaccactccacctccctcagcagccctcacggccactacccactgcggctgtaccacctgtacggctgcactgtccgtcgatcggctttgcaccacacgtccgcgcgctcgctccgtcggtgtcggtagccatggcgctggcggggacgggggtgttcgcggagatcctgggcagcgaggtgtacaggtactacgccgacggggagtggcgcagctccgcctccggcaagtccgtcgccatcgtcaaccccaccacccgcaagacgcagtacagggtgcaagcatgcacgcaggaggaggtgaacaaggcgat

SEQ ID NO: 28259 - DNA, 742 bp, Zea mays
  Clone ID: LIB4756-009-C3_FLI
ctcgaggccggccgggaagataacgcagccaagaacaagagacaccgccgagcgagcgaggcggggagaagcaggtccaggaccaggagaaaggaaaggaagcccagctctctctagcctggagccgagaagccgagggggcgaaggagcagcaaggcatggaggagcccgttccggctgatccccccaggattttctggaagtcaaggagatcagccaatggccggagcctgcaacaagagcctgacaaagacgctaccgaggaaactaacgagcaggctcaagaggaacccatgaagaccgacgacgcaacggatacagcagcagcagcagcagcagctacagctgagccgtacccgaaagctaacctatccgagaagcggaaggctctcttcgagcctctcgagccgatcaacggcaagcgcggcgctgccgagacgctgctcccaccgccggactttgagcccgcgtcgtaccccaaggggtggctggtgggcaagaaacgcaagctcgtcaacgtagacgtcgtggagagcatgcggaggatcgcgatccaggaaatgaacagaaaggttcatgcgtaatcacatctttctagtggtcaggcaatgctgtttcttcactcgatcgtaaatgcatcgatgtgttcagttcaggttgacacatttgaaaaaaatacatcctcaaatgttgttggcttctgtttttaatctgtgataataaagagtacgcgctcatgtat

SEQ ID NO: 28260 - DNA, 759 bp, Zea mays
  Clone ID: LIB4756-009-E8_FLI
ctcgaggccggccgggaagaaggaacgacccatgttcagggagaaggccccgactgggctaggaggcgctaggccatcgccgcagccgccgttctctcacctgctgcatcgctgcttccgcctccgccctacaaggctacaccaggtgcccagattttcgtccggttcttctccggcaacgagcagccaccaggtgtcttagtatttgcaaacagtgacaaaaggttctgcttcgctgtagagtcatggctgcaaagatacgcgtagtgatgaagtcttttatgagccaaagcaaccaggtctcagggcttatgccattcacaaagaagattggactacctgaatcacgagccctgtacaccgtgttgcggtcacctcatatcgataagaagtccagggaacaattctcgatgcatgtcaagaaacagtttgtggaacagacagccaaaccacacgaacttcacaggaagttcttctggttaaaacgcctgcggatacctggggctcagtatgaaatccaaatttctttcaagacacgtctcgatatggcgggcccaaggtcccaagctccttgctgactctcagatcttccttaccgtcctgaatgttcgaagtgacttgtatccatcgacatttcatatgttatgaagacatgcttattttgatggcttttgaaaaaaaaacaatgtacctgctaagtcttcattaccttcacagataacaagtcaagaaaatgcagcatgatatgacttgattcat

SEQ ID NO: 28261 - DNA, 1173 bp, Zea mays
  Clone ID: LIB4756-009-G1_FLI
tggagtcgcggtcgctgccgcatggccctggcctccctcgcggcctcgctcccagtcgccgccaccgccgccgcggtgagattcccattccgtttccgcatcggtcgcgccatggcctccgccgccgcaggggcctcgccggcgagggtggccgtggtacagatgacctccgtgggggacgtcgacgccaactacgccacctgctcccgcctcaccaaggaagcagctgcttctggagtgaaatttctttgcttccctgaggtcttctcattcattggatccaaggatggcgaggctatgaagctagctgaaccattagatgggccaataatgcagagatactgctcacttgcaaaagaatcaagcatgtggctatctcttgggggttttcaagaaaagggacctgatgattctcaccagtacaatactcatgtattaattgatgacactggaaaagttaggagctcatatcgaaaaatacatttgtttgatgttgatgtacctggcaatatggtgtacaaggaaagtcgtttcacagccgcaggtgatactattgttgctgtggatagcccttttggacggttggggcttactgtttgctatgatttgagattcccagagctttatcaaattttgcgttttaagcatcaagcacaggtattactagtgccatctgcattcacaaagataacgggagaggcacactgggaaattctcctccgagctcgtgcaattgagacacaatgttatgttattgctgctgctcaagctggaaagcacaatgaaaaaagagaaagttacggtgattctataattattgacccatgggggacagtgatagctcgacttccagatcggctctccactggatttgcagttgcagatcttgatttgtcaaaagttgaggctgtgagaactcgaatgccaatttcagagcaccggaagttcgacagcgattggaaacccacgcctctttagtagctgagggtttattttgtgtttcctatgtttaatgtgcgtatacacatatagttgatatattcatctatgcataattattaccacaggtttggtcagtttgtgactgggaactcgcaagagaggttgctgaactaaataaggttcctaaattgccaaacgatgggactaaaacatggactaaattgtttgccg

SEQ ID NO: 28262 - DNA, 653 bp, Zea mays
  Clone ID: LIB4756-009-H1_FLI
ccgggatattggctagcttttggctcggcagctaacgacctgcagccaaccatctaccagcgactcagcgagcgagagcagcacacacgcagctagctaggagcagcagcagcggcggcggcgatggcggcctccatgatctcctcgtcagctctggcggtggcgcctcagggcctgccgcccctcggccgccgcgcctcctccttcgccgtcgtctgctccaagaagaagatcaagaccgacaagccctacgggattgggggtggcctgaccgtcgacgtcgacgccaacgggagaaagggcaagggcaagggcgtgtaccagttcgtcgacaagtacggcgcgaacgtcgacggatacagcccaatctacaacgaggatgactggtctcccaccggcgacgtctacgtcggtggaaccactgggcttctgatctgggccgtcaccctcgctgggatcctcggcggcggcgccctcctcgtctacaacaccagcgccctctccggctaaggatatccaatgcatgcgcttcttgcgattcgtcatgtaaaatcagggtgtctgtctataatctagcctccatggatgctcaaccttcgtcatgtaacaataatcagtgctactcttcattacataattttgatgctatatat

SEQ ID NO: 28263 - DNA, 1093 bp, Zea mays
  Clone ID: LIB4756-010-B1_FLI
tcgaggccggccgggctctgcttcaaaaaaccgctgatagaatccatttacttttcatctgattcctgagtacaagcattgaaaatataccatgtcttccgacaaaggacagttcgagcagggcttccagcctgatgtccagcaccagcaggtgcctggcctacagtccaagcttgaccccacgcccaaagtggatgagcttcccacacctgaaggcggcgccgaaaagtacaaagctgccggcaagctaaagggcaagaaggccatcatcaccggcggtgactcgggcattggccgctcaatagcagtcttgtttgctatggagggtgccgacagcttcattgcctacctgcccgaggaagaaaaggacgcccaagagaccaagaagatggttgaagagaagggccaaaaatgctatactctcgccatcgatctcaagccaaaggaaaactgcaagaaggtcattgacgaggctgtcaaggccatgggcggcattgatatccttgttaacaaccacgcttaccagatgatggtcaacgatatcagcgacctctccgaggatcaatggctccacaccttcaacaccaacatccacccattcttcttcctctccaagtacgccctgccacacatgaagcgcggcgctaccatcatcaacaacgcctcaatcaacgcatacatcggccgcccaaacctcctcgactacacctctaccaagggcgccatcatctctttcacccgtggtctgtcaaaccagtacgtcggaaagggtattcgcgtcaacgctgttgcccccggccctgtctggaccccactcatcccagcgactatgaacgatgaggctatcaagcagttcaccgcgccaatcggcaggccgtcgcagcctagtgagattgctacttgctttgtcttcttggccagcaacgacagcagctccatcagcggtcagactatccacgccaacggcggcaccattgtcaatggttaagccgtgcgctggttcccacgacacccgcgattttgatttcagaacaagatgcatgttacgaagttatgagtaaattaccatagttcattgaatgagaatttaatc

SEQ ID NO: 28264 - DNA, 674 bp, Zea mays
  Clone ID: LIB4756-010-E1_FLI
ctcgaggccggccgggaaactaacctccaggaccaccaacaccgccaaaatgggacccaagccagcatccaagaccgccaccaagaccggcaagcaggctaacgccgctgccaaagcggcccttaagggctcgtatgcgaacaagaagcgcgccatcaggaagagcaccagcttccaccgccccaagaccctcgagctgtcccgcgcccccaagtaccctcgcaagtcggtcccccatgctcctcgcatggacgctgagaaggtcctcatccaccctctcaacaccgagtcggccatgaagaagattgaggagaacaacactcttgtcttcatctgcaacgttaaggccaacaagcgccaaatcgctgccgccctcaagaagcagtacgacgtcagctgcgtcaagatcaacaccctgatccgccccgacggctcaaagaaggctttctgccgcctcactgccgatgtcgacgctctcgacattgcggctaccaagctcgccattgtttaaatgaggcggtgtttgtacgaagagagggcatgggatggtcatgatagggtcctggttatacccggcaaaggaaaaaagcgatgtgatatgcatggcgggcgttcatgggataaacgtagtcaaggttgacttcgaatgaaacaaatttccgcatggcgccaat

SEQ ID NO: 28265 - DNA, 744 bp, Zea mays
  Clone ID: LIB4756-010-F9_FLI
attgggtacctcgaggccggccgagcttgctcgctgcgccgccgcctccgacatcgtcccttcgtccccacgagcaaccgataatccgccggcgttgagatgttggtttatcaggatctcctatctggcgacgagctcctgtcggattcattcacctacaaggagctcgagaacggcgtcctgtgggaggtcgagggaaagtgggtcacccaaggtcctgttgatgtggacattggtgccaatccatccgccgagggtggtgaggacgaaagcgttgatgacacagctgtgaaggtggttgatattgttgacacattccgtctacaggagcaacctccttttgacaagaaatcatttgtgtcttacatcaaaaaatacatcaagaatctcactgctgtgttggagccagagaaagcggatgagttcaaaaagggtgtcgagggtgcaaccaagtttctccttagcaagctgaaggacctccaattttttgttggtgagtccatgaaggatgatgcgtctgtggtattcgcctattacaaggatggtgccactaatccgacattcctctatttctctcatggtcttaaggagatcaagtgctaggcgtgcggcgaaattagttacccatgttgggtactatctatgtactattattatatccaaaactatagttgtcctggctgaattgaactcaaaagggtttgtttgagaaaaaattgtcccaagattggattgcttgttaac

SEQ ID NO: 28266 - DNA, 1128 bp, Zea mays
  Clone ID: LIB4756-011-A11_FLI
accaacaccaccgggcaagcacagctcccgacatcgtccaatccagcactcgaattgtacccactgcacaagcagagtggctgtttgagcacgacttgaacacgacaccaattacacacgaccgtcataaccacccacttcctccaccatgacgtcaataggcacaggctatgacctgtccaactcggtcttctcgcccgacggtcgcaatttccaggtcgagtatgcagtcaaggcggtagagaacggcggcacagctctgggcatcaggtgcaaggatggtgtcgtgctcgctctcgagaagcttgtcagcagcaagctgatcaagcctggcgccaacaagcgcatagcaaccgtcgaccgcaacatgggcgtcgtgtcttctggtctcctccccgacggtcgccacttcgtctcccgagcccgtgacgaggcggcgcaatggcggcagctctacaaggcccccattccttcctcgtctctcgccgaccgcatgggaagctacgttcaggcatacacgctttactcgagtgtacggccattcggcataacggccattattgccggctgggattccgaggccgagttgcccgtcgacggacaagttggctcgggtccttctgttggctcgggaggcaagagagagggcgccaagcacggcggcccatctctctacatgattgagccgagtggcctctactggggatactacggtgcagctacaggcaagggccgccaggttgcaaagtcggagctcgagaagttgaatctgcacgagggccagctttcattagaagaaggcgtcaaggaggcagcgcgcatcatctacgtcgcacacgatgacaacaaggacaaggaatttgagcttgagatgacgtggatcagcaatctcgacggaccgaccaagggtagacatgaggaagtgcccaaggacattcgggaagaggctgagaggcttgcaaagaaggcgctcgagggggatgatgatgatgacgacgaggaggagaagatggaagagtaaatgaatggctgctcgagtcgagccagtggataaaagtacagaccctgacgatgcgtaacgagcggcttttgcacaagccttaacgatcaatgaacaagattcacact

SEQ ID NO: 28267 - DNA, 869 bp, Zea mays
  Clone ID: LIB4756-011-B7_FLI
ggccggccgggaaatagcgcccgctcgcccatcagcccacgcggccacgccgaagtatggcgctctccgtctcctccctcgccgccgccctctcccacctctccctcccatcgacctccacccccaagcctcacccggccccgctcctgcgcctgcgctccacctaccgccgcgctgttagcctcgcgctccgcgcctccgcagccgaagccgccgaatcgttcgaggcggacctgcccgccgaggaggtgatggctgtcgaggaggaggcggaggaggatgcgctgtcgggaatcgcgctgcgaaagtatgtgaagcagcggctgccgggcgggttcgcggcgcagcggatcaccgccacgggccgtcgcaagacggccatcgcccgcgtcgtgctccaggagggcaccggcaaggtcttcatcaacttccgcgacgctaaggagtatctgcagggaaatccaatgtggatggagtactgcaaggtacccttgatgactctagggtttgagaagaactatgacgtctttgtgaaagtacacgggggtggtctctcaggccaggcccaggcaatttgccttggtgttgcccgtgcgctggtgaaaatcagcaatgccaacagggttcctctgaagtcggaaggtttgctgacaagggacacccgtatcgttgaaaggaagaaggctggtctcaagaaggcacgcaagcggccccagttctcaaagcgttgaggacgttcacttgttgcattgccacttccagaggcccttttttttctgtcaactgctgtgcaaaatctgtaatggacacgatatatctgtagtgttattttcctgaagcaaatttcatgaggtggctatctgattcag

SEQ ID NO: 28268 - DNA, 1387 bp, Zea mays
  Clone ID: LIB4756-011-G11_FLI
ccgggaccgatgatgaaatcgctctgtggcaacatgggtcgtcacaaccttgtcatcttcccagatgataccgagcacctctgagtttatgcacaccacacaacacaataatacagcaaaggagctagcagaggtgcaggattaataagctaagctagataaggctagctaccgaggagaaattaagcaaagcataggcacagccatggctacctcctctggttcttgccttattagcctgttggtggtggtggcggcgctgtcggcctcaacggcgtcggcacagctgtcgtcgacgttctacgacacgtcgtgccccagcgcgatgtccaccatcagcagcggcgtgaactccgccgtggcgcagcaggctcgcgtgggggcgtcgctgctccggctccacttccacgactgcttcgtccaaggctgcgacgcgtccattctgctcaacgacacgtccggggagcagacccagccgccgaacctaactctgaacccgagggccttcgacgtcgtcaacagcatcaaggcgcaggtggaggcggcgtgcccgggcgtcgtctcctgcgccgacatcctcgccgtcgccgcccgcgacggagtcgtcgcgctcggcgggccttcgtggaccgtgcttctggggagaagggactcgaccggttcgttccctagccagacaagcgacctcccacctccgacgtcgagcctccaagcacttttagccgcgtacagcaagaagaacctcgacgcgaccgacatggtcgctctctcaggcgctcacacaatcgggcaggcccagtgctcgagcttcaacggccacatctacaacgacacgaacatcaacgcggccttcgcgacgtcgctcaaggccaactgccccatgtccggcggcaccagcctggcgccgctggacaccatgaccccgaccgtgttcgacaacgactactacaagaacctgctgtcgcagaagggcctgctgcactcggaccaggagctgttcaacaacggcagcaccgacagcacggtcagcaacttcgcgtccagctcggccgccttcaccagcgccttcacggcggccatggtgaagatggggaacctcggaccgctcaccgggaccagtgggcagatcaggctctcctgctggaagctcaactcgtcctaataattataaggacggacgtccgatagacgatcctgcgcaatcgtacatacatgatatgcatacatctggagactactataccaaacagagatctatacgtacgagtatgtataacgacgagtgatgtttgtatggatctacgtatgtaacaaggacctctcgtagcgcaaaggcgcgcgttgggagattaattaggtacacaagctattaccacattatatatct

SEQ ID NO: 28269 - DNA, 1164 bp, Zea mays
  Clone ID: LIB4756-012-B6_FLI
ccgggaaaacgacgggcccactccccgacggctgacgccctcccacggccccttccatgaggcagctgcacctctcgccgcagctctccccctccacggtcctctcctcttacttctcgccgccgccggcggaggcctcgtcctggcggcggcggctgcaccggggacgggccttccaactgccgctctcctcgctgcgggatcccaacaaggccacgctccgcaaggcctcgtccaacgtccccttccgcctcggcggtggcgggagcggcagccccaaggaccgccgccccgccgacgacgacaaggcggaggaggaggccgagggcgagggcggcgcaggggcactcacggggacgctggtcgctggagcgctactggttggtttcgtaggggggtttggggcggccggatacgtgtacaaggaccagatcaacaccttcctcacgcagttctcagggttcattgacggctatggtccagccggatatgctctgttcgtacttgtatatgcaggattggaggttctcgctattcccgcaatacctttaaccatgtcagctggtctattatttggtagtgtgaccggtacaattattgtttcaatcagtggaacactagctgcagcggtggccttccttatcgctagatacttcgccagagatagaattcttaaattggttgaaggaaataagaagtttctggcaattgataaagcaataggtgaaaatggattcaaggttgtcactttgcttcgtttgagtcccctgttacctttctcccttggtaactatctatatggcctgacttcagtgaagttcttgccatatgtcttgggcagttggttgggaatgcttccaggttcatgggcttacgtcagcgctggtgcattcgggcgagctataattcaagaggagtcggaaattggttggggaggaaatggacagctatggacattgggtgttgggttattgtttacggccatggctgccgcttatgtaacaaggctcgcaaaggatgctgtaaaggagatcgatgactagaatagtaggattctctagtagaaagggccctctggagtctgatagtatactagcacatcgtacatcactggcacctttggtgcaatcaaatctaatagaaattcagagcaattttctgagt

SEQ ID NO: 28270 - DNA, 708 bp, Zea mays
  Clone ID: LIB4756-012-D11_FLI
ccgggctagcctccaccccgtccggcagcagccaaaccctacataggcgccgccgcaggcggccccccgcatcgtcgccaaagatgcagatctttgtgaagactctgacggggaagaccatcactttggaggtggagtcctcggacaccatcgacaatgtgaaggccaagatccaggacaaggagggcatccccccggaccagcagcggctcatcttcgccggcaagcagctcgaggacggtcgcacccttgccgactacaacatccagaaggagtccaccctccacctggtgctccgcctccgcggcggcgccaagaagcgtaagaagaagacgtacaccaagcccaagaagatcaagcacaagcacaagaaggtgaagctctccgtgctgcagttctataaggtggacgacaccactagcaaggtgacccgcctccgcaaggagtgccccaactcagagtgcggcgcgggcgtcttcatggccaaccacttcgaccgccactactgcggcaagtgcggcctcacatatgtctacaaccagaaggcgtaattgcttgccccgatttgctttatccgcctaccctatcgaacatccagctgttggttactcgaattgtatctcatgtagatctgtctgaggttgaaacttaaatggagcagtagtatctgccatattgatacccctgttactgaattgatgtgatgct

SEQ ID NO: 28271 - DNA, 1522 bp, Zea mays
  Clone ID: LIB4756-012-E4_FLI
ctcgaggccggccggggtccccaacccgcgcactgcccccggtctctctctcaacacaccgataagcccagtccaccggatctcccgtagtccagagactcagttgagggaaggaaggaaaccgagcccgaccctaggtagtcatgatgatgatgagcgaaggcgtgggcatgccgccgtggtcccaccacgtccctgtgagcggcgtcgacgaaggcgacgagatgacgccgtacctgctcgcggcgctgcgccagtacctgccgtgcaacgacgccggcgccgaggccgaggccgaggaggatgaggcggcggcggccatggcggcgggcgtggacggctacggctgcgacgagttccgcatgtacgagttcaaggtccggcggtgcgcgcgcgcgcgcagccacgactggaccgagtgccccttcgcgcacccgggggagaaggcgcggcgccgcgacccgcgcaagtaccactactccggcgccgcctgcccggacttccgcaagggcgggtgcaagcgcggcgacggctgcgacatggcgcacggcgtcttcgagtgctggctccacccggcgcgctaccgcacccagccctgcaaggacggcacggcctgccgccgccgggtctgcttcttcgcgcacaccgcggaccagctgcgcgtgctcccgcccacgccgcagcagcagtccagccccaggggcgccgcctgctcttccccgctcgccgagtcctacgacggctccccgctccggcgccaggcgttcgagagctacctcaccaagagcatcatgtgctcgtcgccgaccagcaccctcctgtcgccgcccaagtcgcccccgtcggagtccccgccattgtcgcccgacttccgccgtgggtgctggccgggcgccgggtcccccgtcaacgacgtcctcgcctcgctccgccagctccgcctcagcagggccaactcgtccccgtcgggcgggtggtgcggctaccctgcatccgcggtcgcgtacggatcgcctacggggggcgcgctctacggcctgtcctccaccccgaggtccaccgccggctccggctacatggccaacctggaccctctcgacgtcaccttcggcggcgacgaggagcccgtggagagggtggagtccggccgcgcactccgcgcgaaggtgttcgagcggcttagcagggagggcgctgtttccggcgacgccggtggccccgacgtcgggtgggtctccgacctcatcaactgaggcggcggcgggtccctggcatggcagtggcaatggcaatgggcatgggcatggagaaaggtgatggtgagccgtatcggagaaggatggcatccaaaaaaaatatttccctgcatttgatttcgttcctcagttaattccgctaatccccgtgtacatatctatcaccctgtgaatattctcggttggtaagagggaggatgatgctaggcggtggatggatgggtggatttgttttggggttcttgaggtagcggaaaatatccagg

SEQ ID NO: 28272 - DNA, 1247 bp, Zea mays
  Clone ID: LIB4756-012-G11_FLI
cctcgaggccggccgggacacatttcccttcgcccttcccctcctcacacacacacggtgtatccaacttcaagatgccttacccagagaccaccgacgcttttgccgtcactgacatcaagaactggagcaactttacccgcaaggagctgcccctcaagaaattcgaggagcacgacgtcgacatcgctattgatgcctgtggtgtatgtgcttcagatgttcacaccattagcggtggatggggcgagtcaattcctcttcctctctgcgtaggacacgaggtcatcggcaaggtcatcaaggttggatcaaaggtcaccaaggtcaaggttggcgaccgtgccggtattggcgctcagattggcgccgacttgacctgcgatcaatgcaagaacgaccaagagaactactgccccaactctgtcgacacatacggtgctaagcacaccgatggcactgttgcacagggtggctacgccagccacatcagaggtcatgagtactttgtcttcaagatcccagacaacatcgagacttccctggcggcgcctatgctgtgtgctggtctcaccacatattcgccattgaagaggctaggagccggtcctggaaagaaggtcggtatcattggactcggaggtctcggtcactttggtgtcctctggtccgtcgccatgggcgctgacacctacgtcatctcacacacccccaacaagaaggacgacgctctgaagatgggagccaaggacttcatcgtcaccaaggaaaagggctggtccgagccatggaagttccacttcgacttcgtcatcaacaccgccgatgccaccgacaagttcgacctcgcagaatacttctccatcctcaaggtcaacggcaccttccacatggtcggcttccccgacaacccgcttccccccattcccgcccagatctttgcccccaacggctgctacatgggcgcctcgcacattggcaaccgacccgagatggaggagatgttcgagctcgcttccaagcaaaacatcaagagctgggtgcaggaaatccagatcagcgaggagggctgcaaggaggccgttgagcgcgtctacaagaacgacaatgttaggtacaggataacgctgacgggctttgacaaggtctttggtaagagggcttagaaaactgcaacagacagacactattatatacccgcaggctgtcagtgcttctattacaaaaatatatactgatatattccc

SEQ ID NO: 28273 - DNA, 623 bp, Zea mays
  Clone ID: LIB4756-012-H5_FLI
ccgggaactgcagccaaccatctaccagcgactcagcgagcgagagcagcacacacgcagctagctaggagcagcagcagcggcggcggcgatggcggcctccatgatctcctcgtcagctctggcggtggcgcctcagggcctgccgcccctcggccgccgcgcctcctccttcgccgtcgtctgctccaagaagaagatcaagaccgacaagccctacgggattgggggtggcctgaccgtcgacgtcgacgccaacgggagaaagggcaagggcaagggcgtgtaccagttcgtcgacaagtacggcgcgaacgtcgacggatacagcccaatctacaacgaggatgactggtctcccaccggcgacgtctacgtcggtggaaccactgggcttctgatctgggccgtcaccctcgctgggatcctcggcggcggcgccctcctcgtctacaacaccagcgccctctccggctaaggatatccaatgcatgcgcttcttgcgattcgtcatgtaaaatcagggtgtctgtctataatctagcctccatggatgctcaaccttcgtcatgtaacaataatcagtgctactcttcattacataattttgatgctatatatgc

SEQ ID NO: 28274 - DNA, 1169 bp, Zea mays
  Clone ID: LIB4756-013-C8_FLI
ccgggatccgcttctatccctgcggccctccctgcccatctcccgatttccccgcgtgcgctctctctctccgtcggcgacgagtctgggcgaccagcgccgccgcccctagcccaggtctccatcggacgcttcgccaggtcttgtttagaccctccgccggcaacgagcaactcttgatgcatgatttagcagcgacaaacttggagtagtcaaaaccgcaaaaggttcctcccttatgattagttttatttatcggatcccgcatcgtggaatgcttgccaaagggaggaaggtagctggaaggcgtgaagaaatgtctgcaaattatgcgtttggaccacaggatgatgatgcgattattaaacacaggcttctgactaggacaacgaccaccaggggtgaaccgccactaaagaagcttcagaagaagttcatgtcctttgcaactgagatcgagaaggatgcagataacataagtgactgtgaaagactgtacaaggcctttctacatgaaattaacacctttgagctacctcttctgaaaagcaaggctgtggttgatgcaaacattagggagaaagaaagctttaatgagctgcaggttgagattgagcggcagatcttgcatgctaagactgatattgaggaccttaagaagcaacttgagcagagcaagattgagaggcagcacaaagaagagtgtgaagccatccggaagctgattagtttgcagcctccacggtcagaaactgaaaaactcattgcagaccttgagaaggagataactgatttgaaggcggagaatgtagcatgcataaggactttggaactgaggaagaagcagtttgcccttcttctacatgtggttgaggaattgcagatctcgattgaagatgagcagaagagtatagcagatgagctgagagctattgctggagagcagaagatgagcatggaagaagggagcgtcggtgcttcagattccatggttgttgactgatcgagatacattcacatatgttgcagacctgcttgccaaaatccatcacatggtttttggacaatatggcgatttggtagatgtcttttgcggtgtctttgtacctcatgtaaattgaactgtatgctagtatgaagtgaaattgaagtacacgttgttgtgtaac

SEQ ID NO: 28275 - DNA, 876 bp, Zea mays
  Clone ID: LIB4756-013-H7_FLI
ccgggactcttagtcgttcttgttgctcttcctgttgtgttgctccgttttcgttaggagtcatcgttttgcaagattatcataaaggatcacaaaagaatttacagcgatgttgaagaatatcatctttaataacgataagaacaagactttcaagcctaagaagagcttttctaaaggaacaaagcgatatgagcttcacaaacatgctaaagctacactcggaagcggaaatttgagacaagctgttgttctacctgaaagagaggacatcaatgaatggttggcagttaatactgtggatttcttcaatcagattaatctcctttatggaagtatcacagagttctgcacacctaagacatgtgaagttatgtccgctggacccaaatatgagtatttgtgggctgatggtgagacaatcaagaagccaatcaaagtatcagctcccgaatatgtagactatcttatgacatgggtacaaagcatccttgatgacgaaagcgtcttcccatctcgagttgatgttcctttccctaagaacttcagagatatcatcaagcagatcttcaaacgactattcagagtctacgctcacatctactactcacatttccacaagatcgtcagtcttggagaggaggctcatctcaatacttgcttcaagcacttctattacttcatctgtgaatttaacttagtggataagaaggaaatgtcacctcttcaagagcttatcgataaccttactcgaaatgacaagtaattgagtaatattgacaataactacgattacgatcatttgtataatccagatcatcgtgctctttacagatcatctgattgttcatttgtaaaataaacacaacaacaagg

SEQ ID NO: 28276 - DNA, 661 bp, Zea mays
  Clone ID: LIB4756-014-C6_FLI
tcgaggccggccgggtctactaacccgacaacccgcccattccacagcaaaaatgaccaaggtccagtcaatggtcgcgagctctcgccgcaaatcgcgaaaggcgcacttcagtgcgccgagtagtgtgcgtcgggtcatcatgagcgcgcctttaagtaaggagctccgcgagaagcacggagtgcgcagcattcccattcgcaaggatgacgagatcaccgttgtccgcggttccaacaagggccgtgagggcaaggtctcctccgtctaccgcctcaagtactgcatccacgtcaacggcatcgtccgcgagaagagcaacggccagtcggtccccatccccatcgctccctccaaggtcgtcatcaccaagctcaagctcgacaaggaccgcgagtctatcctagagcgcaagagcgccggtcgcgaggagaagaagaagcagagggaggcttaagcgtctcgctttttgtttctttgtttgacgacacaccacggcttcgaggcacatgggcatgggctgtcccaccgcctctgagtggatgaaatgcatatcatgggttcacggtctgggcatgcgatgtgcgcatggaaaagcagggcgttttaccggctactagctccaacaatggacttgccgccatgcggccccgtcaag

SEQ ID NO: 28277 - DNA, 1010 bp, Zea mays
  Clone ID: LIB4756-014-D4_FLI
atcgaggccggccggggccagcaagttatagcttttaactttctcaggacacgggagcccttcttgccacaaaagttttagttccaactgggagagctagcatggcaagttcgcgctgctttgagaacccgccggtgctggagccggccagcggaggaggcgaggtggttgacgacttcggcgggcagaaggcctacgtcagcggctccgccgggtccaaggccgccgtcgtcctcatctccgacgccttcgggttcgaagcgccaaacctgaggaagatagccgacaaagttgcttcgctcggttacttcgttgtggtgcccgatttcctgcatggggatccatatgaccccagcaataatgcccatagcaatcctggaacgtggatacagtcgcacaatccgcaaacggcattcgaagaggcaaaaccggtaattgcggctataaaggagaagggtgtgtcgagcatcggagctgcaggttactgttggggcgcaaaggtggttgtggaactggcgaaagttcacgagatccaggctgctgtgttggcacacccttctttactaactgtcgatgatatgaaagatgtcaagtgccccatttccatacttggagctgaaatcgacaggtcagccccgcctgaattgctaaagcagtttgagcaagttctttcagcgaaccccgaggtcgatcactttgtcaaggtttttcctggcgtagcgcatggatgggctgtgaggtacagcgacgacgacgcagcggctgtcacgagtgcggaggaagctttgcgcgacatgagccactggttcaacaagtacctgaactgaattatgtggcggcatatgtgcgtgcaataagctcctaatggtgaacattatgcagggcccccatgctatgcgtgtgttttaaaagtcctcttagtggtggtatttgtactggtctcttacgcaatttttataacatttatcgagaataaagtgatgacacggtgaatgggtatttttataacc

SEQ ID NO: 28278 - DNA, 1637 bp, Zea mays
  Clone ID: LIB4756-014-E3_FLI
acagtccacacaggccccagccatggaggcggccccaacccccgagccggggccgcacgtgcttgtcatccccttccccgcgcaaggccacgcgctgccgctcatcgacttcgtcgccctcctggcggcgcgcggcctccgcctcaccgtggtcacgaccccggcaaaccttcagcttctctcctctctcctcgccgcacaccccaccgccgtccgcgccgctaccttcccgttcccctcccacccatccctgcccccggggctcgagaataccaagggttgcagcccggtgcagttccccgccttcgtccacgccttggccgagctgcgtgggcccatcctcgcgtgggttaaagcgcagcccgatcccgtcgtcgccgtggtcgccgacttcttctgcggatgggctcagccgctggcccgcgagataggcgccgctgggatcgtgttctcgccgtccggcgtcctcggcaccgccgtcccgcactcgaccttccgccgcctggtgaggcgccccgcggagtgcgatggcgacgacgagttcagcgtctcgttcccggcgattcccggcgagccgtcttaccagtggagagagctcttgatgatgtacaggaactacatggcaggcgctctggacgagcaggtcggcgcgtcggtgaggcagaacttcatgtggaacctgcacgacagctgggggttcgtgttcaactcgttcagagcgctggaggggaggtacctggagcagcctctcgaggacctgggcttcaagcgcgcctgggcagtgggccccgtggctccggaggcggacgccgcggttgcccgcggcgggcaggcaaccgtcgagctcgccgatctcagcgcgtggctggacgcgttcccggaaggttcggttgtatacgtgtgcttcgggagccaggccgtgctgagccccgccgtggcggcggcgctggccgaggcgcttgagcgcagcgccgtgccgttcatgtgggccgtgggcgacgccgtggtcccggacgggttcgaggcgcgcgccgcggcgtcggggcgcggctcggtggtgcgcgggtgggcgccgcaggtggcgctgctgcggcatccggcggtggggtggttcgtgacgcactgcggctggaactcgactttggaggcggtggccgcgggggtgcccatgctggcgtggcccctgacgggcgaccagttctttgacgctcggctgctcgtggacgaggcccgcgtcgcggtccgcgcatgcaagggcggcctcggctttgtccccgacgcaggtgagctggcgtccgtgttggccgacgccaccggggagaagggccacgacgtgaggacccgcgccaaggcactcgcggcagaggccgcccgcgccatgaagcctggcgggacatcgtacgcggatctagagctgttggtgcaggaaattcggaatcggaagcttagctagctccctctccaggaatacatcagatcgattcccatgcgatctaacttgatcgcactgaaagatgatgcaagatgatacaagactgaaagatgatacaagactttaagttatgtaattttagttgttttgtatgaattgtataattttatccgttcaattatgtatttggatgtatttattcaag

SEQ ID NO: 28279 - DNA, 892 bp, Zea mays
  Clone ID: LIB4756-014-F7_FLI
tttccgaggccggccatgctcttccttcactgccagtctcgcatcccgtccccgtccgcgccggccgacgccgccttttcgtccccgcgtcagcgtcgcggctccactgagcgtgcgcgtcaccggcggcaggcgagggcaggcggtggtggcgatggcgtccgctgatgcgcgcttggcggggatcgcctcctccatccgcgtcatccccgacttccccaagccagggatcatgtttcaggacatcacgacgttgctgctcgatcccaaggcgttccgtgacaccatcgacctctttgtcgagcggtacaaggaccaagggatcaccgtggttgctggtgttgaagctagagggttcattttcggtcctcctatcgctttagccatcggcgcaaaatttgtgcctttgaggaagccgaagaagttgccaggcgaggtgatctccgaagagtattctttggaatatggaactgacaagatagaaatgcatgttggagctgtacaggccaacgaccgggctcttgtagtcgatgatcttattgctaccggtggaacactctgtgcagctgtcaaacttattgaacgtgttggagcaaaggttgttgagtgtgcttgtgtcattgaattgccagaactgaagggtcgagacaagcttggggacaggccagtttttgtccttgtggaagcagacgcctgagcggaatttgggaattctcagagagtttggtgccgtcgatgctccctctctggagacaacacagtttcccatgttaccatgttggctattttctggctgacgcgtaataaagttttattccaaattgtgaccccctgaatgatttgtcaatgtagacatgattgctggtctttgtaaactggcttatgttttgcc

SEQ ID NO: 28280 - DNA, 918 bp, Zea mays
  Clone ID: LIB4756-015-D10_FLI
agtgagtgaacaccagccgtattgtcccgaccccgaccgatcctcgcctgctgcagccatggcgacctccgcggcgctctctaccgccgccaatcccacccagctctgccggtcccgcgcttcgctgggcaagccggtgaaggggcttggcctgagcatgggccgcgagcgcgcccagcggagcattgtgtgccaggcggcgagcagcatctccgccgaccgcgtccccgacatggagaagcggaagctgatgaacctcctcctcctcggcgccatctcgttgcccaccgtcggcatggtcgtcccctacggcgccttcttcgtccctgccggctccgggaacgccggcggcgggacctacgcgaaggacaagctgggcaacgacatcacggtggaggcgtggctcaacacgcacggtcccaacgaccgcacgctcgcgcaggggctcaagggtgaccccacgtacctggtggtggagcaggacaagacgctggccacctacgggatcaacgccgtgtgcactcacctcggctgcgtcgtgccgtggaacggcgccgagaacaagttcatctgcccatgccacggatcccagtacaacaaccagggcaaggtggtccgtggaccggcgcctctgtcgctggccctggttcacgccgacgtcgacgacggcaaggtcctcttcgtcccgtgggtggagaccgacttcaggaccggcgaggacccgtggtggaaggcatgaggatgatccgaaaccagcggtgctcagtgctcacacatgagacctacgtatgcctccgttccttgtgatgaggaaatatgcttgcgttcgttctccgtgggcgttgttcctacaaattcacttgctttctgtctctctctctatatacacactgtataaaacaagaacagctgtttact

SEQ ID NO: 28281 - DNA, 1219 bp, Zea mays
  Clone ID: LIB4756-015-F1_FLI
cctcgaggccggccgggatagcagtcgatgggctccggggccaacaggcccgacaccaacgccattacaccaagttgtagttgctctcctccgagaaccctcgccgccgccgcccaccggagctccggtttgcagttcttcgctgaaggccatggaccacgacagattgaattcgccgagcacgtcggctatttcgctggaggtgatgggccaccggctacatatttcacaggatccaaactccaagcaccatgggaccacggtctgggatgcatcaatggtgtttgtcaagtttttggaaaagaatagcagaaaaggtcgcttttgtccgtccaaactaaaaggaaagagagtgattgaattgggagctggctgcggtctagctgggttcggaatggccttgttgggtggtgatgttacaacaactgaccaagccgaggtgctcccactgcttatgagaaatgttgaacgcaacagatcttggatctcacaatcaaactctgactcagatatattggcaaacacaaaaacagattccgttggctcaattacagttgcagaattggactgggggaacaaagaacatatcaaggccgttgaacctccatttgattacattgtaggaactgacattgtttattcggagcatctgttgcaacctctaatggagacaattactgcattatctggtcctaaaacaaaaatattgctagggtacgagatccgttcgacaactgtccatgagaagatgatggaaatgtggaaaagcaatttcattgtgaaaacgatctctagatcgaagatggatgtgaaatatcaacatcctagcatacatctctacatgatggacctgaaggcaccattgatccctgaggttgaggctgccgacaatgggaactacgaggaagaggttgaggttgctgcgaatcaagaggaagacgaagatcctggagtgaagagcgaatcttgttccggctcgtcaccagaggctaagagcggcagtctggatgattgggaaatcagaaggtgtggggctatggctgcaaggcttctgaaggatgtgaaactgtaaacatgaatcctagagatcgttttccccccttggcagagaactctagagctcctttatgttgttgtccttgatagttgttgtactgcccatggcagtctatgttattgtatcttgttgcatcagtggatattgataccattccaaagg

SEQ ID NO: 28282 - DNA, 1405 bp, Zea mays
  Clone ID: LIB4756-015-F5_FLI
ctcgaggccggccgggattccgcggccacgacgagcacaatcctgttcgccacgccatgcctctccacgcccgcgcaccgccgctccgccgctcccaccttctactcaccgccgccaccgctcggctccgcccgtgcgcagcgccagcgaccaagccccgccgccgctccctcgtcctcgtccgcgcctccagctcggaccctccgcagcagcagcagcagctcaacctctccgtgctccgcttcaccctcgggattccggggctggacgagtcgtacctccctcggtggataggcctcggtttcggcgcgctcgttgtgctcaaccacctcctctctgcgtccccgacacccgcgcagctcaggtccgaggctgtggggctgtgcctggccgcgttctcggcgacgctgccgttcctggggaggttccttgagggcgctgatgctgccagccgagtgccgttgcccgaggggagcatccaagtattcgtcatgtctgagaacctgtcagccgtgcagaaggaggacatggcgtgggcgtcgtacgtcctgctccggaacacaaacaccacgtctgtggtcatagcaattggggatctcttgtgcgtacgaggatactggaatccacctgcaaatacttcaaaatattccatgattgagtggttcaaaagtcagatgcagcaagtaggtcttgttgatttgagagatgctttgtacttccctaattcgtcaggaaagtttctcttacgctgtcaatcatgctgctctgaccagattctcagcttgcgaaaattctgccagatgggattctttctgtgctagcgcaacctattctgagtcctgatccagctaataatgaaacaaaaactgaaggtgtcatcctgttggcctccaatgcaaattatgcatatagtgagaaagatagggcttggataagaacagttgcagacaaatttcaacttgcttaatttagagaaatgttgacagtcaggcagtactggaaaatggaccggaaagattgggaagtgtaaagtagactgactggtccaagaaggatttggagtcttggcaaacgtggacggagcagaataagagagttttgcagttgggaggagatcagcattaagctactgtttattaggattggtgctagttgaagcaaaatagtccagcaatagtttgttcagttggctagagactaagtggtgatgtgtttggtttgtctctgtacctcttgctttggtatgtatgtctgattggatttggcattgaagcagaaaggctgctccagagattagtgacatgtgcaaagtagcaatgctgtcataatttacgcatgctccagtcaattgaggcagttgatcacctggctgcatttatataagcagtaaaagcatttttagttc

SEQ ID NO: 28283 - DNA, 1412 bp, Zea mays
  Clone ID: LIB4756-015-F9_FLI
ctcgaggccggccggggctttgctaataataataatcaggactcaggagagcgagcaaagaagaagaaggcaacacgtacgacaggcacagtagccatctttcccatcctctctggctagctctttcctaagcttaggctagctagaggtagctctccatcctttgggaattaatagtaagtgtttgggacttgggagagggagaggcgtcatgtacctgaacccaagaatcgtaggctctggggagaggacactggttctctcccatggctatggaggcagccaggctatctgggacaaggtgctgccgcacctctcacggacgaacaaggtactactcttcgactgggacttctcgagtaccgccgccgccgccggagaggaggaggaggacgcggagcacagctgctacacgttctcgaggttcgccgaagagctggtggcgctcatggacaagatgaagctgagcggcgccgtgtacgtggggcactccatggccggcatggtcggctgcattgcgtccatcacgcgccccgacctcttcacccacctcgtcctcgtcggcgcatccccgaggtacatgaactcggaggactacgagggcgggttcgacgagctcgacatcaaggcgatgctgtcgaggatctcgtcggacttccgcggctgggccgagggcttcgtgccgctcgccatcggcggcagcgcggacgaccaaccctcggcggcggagctgctggcgcggagcttcttcgccatggacccgcgcgtggcgcacggcctggcgcgcatgatcttcctgggcgaccagcgcgagctgctgggtgacgtggccgtgccgtgcacgctggtgcacgtctccggcgacttcgcggcgcccccctgcgtcgggcgctacatgcaggcccgcatgcgcaccgcctccatgtataccatcgactcggtgggacacttcccgcagctcgtcacgcccgacgagatgctcaggatactcgaccgcattctcgtcggctccgctgcttcccaagaggaggagactaccgcggcggcggcggctgccgccaagaccgagacgacgagtagcgaggtcgtatcctctggtggtgttgccgatgcgctggagtccaagggccgtatcgacgtggcgacatagtgctcctgctgctctggtgcaacatccctctcgaagtctcgatctatcagccttggctggctcttgtgctggtctcagttgatttgcttcggtccacactccacacgtttaacttacattattgcgcttttggattttctaatgcgtagaaacattaccatggttcgttcggaatttttagccatcacgtcacccaaactgcgtgtattattggtttgatcatggattgaattaaatgaaacactgagtgttaaagcattgt

SEQ ID NO: 28284 - DNA, 749 bp, Zea mays
  Clone ID: LIB4756-015-G3_FLI
ctcgaggccggccgggagtccatagggttatttttctgcagtatttgtcagcaaccgatcctttggttatggctcgtgtcctacaggatgtgttggatacctttacaccaaccattccactaagaataacatacaacaatagtcaagttctggcaggtgctgagctaaagccatctgcggttataagtaaaccacgagtcgatatcggtggcaatgacatgaggactttctacaccctggtactgattgacccggacgccccaagtccaagccatccatcactaagggagtacttgcactggatggtgacagatattcctgaaacaactagtgtcaacttcggccaagagctagtattttatgagagaccagatccaagatctggtatccacaggctggtatttgtgttgttccgccaacttggcaggggtacggtttttgcaccagaaatgcgccaaaacttcaactgcagaagctttgcacggcaatatcacctcagcattgccagtgctacacatttcaactgtcaaagggaaggtggatcgggtggaagaaggtttagggaagagtagagaccatagaccactgcatggctacactatataattatcatcaataacgtgcactatattgaatgtcaatgcaccacctctatatgctgaatgctatgtatctcaaactatgatttgtaatgacttgaaggattgagagcttattctcttaacggaatatagaccaatattattagg

SEQ ID NO: 28285 - DNA, 571 bp, Zea mays
  Clone ID: LIB4756-015-G7_FLI
ccgggatggcctccctctcctctgccgccgtcaccgccccttccttcgccgcaccagcgccagcccgcgccgtggtcagaaggaggtccttcaccgtgcgcgcctctctccgcaaggccaccggcaccgccgccgtggcaatggctgccagcgccctgcttgccggcggtgccatggcccaggaggtgctgctgggcgcaggcgacggcgggctcgtcttcgagcccagccagttcaccgtcaaggccggcgacaccatcacattcaagaacaacgccggcttcccgcacaacgtcgtcttcgacgaagacgaggtgccgagcggcgtcgacgccaccaagatctcgcaggaggagtacctcaatgcgccaggcgagacctactccgtcaccctcaccgtgccgggaacctacggcttctactgcgagccgcatcaaggagccggaatggtcggcaagatcaccgtcaactaattaagctagctatcgatcgatatccattcatgtattagctgttgcttcctgctttgtactccgccgatctgtccatctctacatgttttcgtcttcac

SEQ ID NO: 28286 - DNA, 1302 bp, Zea mays
  Clone ID: LIB4756-016-A1_FLI
ctcgaggccggccgggatcctgaaacgccaatccgataaaaagcgcgcaccggcgtggcgcgcatcgcccccaggagccccgatcatctcccgctcccttccttcctcctcatcctcctcatggctctgtcgtccgccggctcgttcgtggcctgcagcctccggccaagcggagctagcatccatgccccgaggtcgacgccgcacctgaagccgggtgctgcggcggcgtcgttcacgaggacgccgcagcgccgggcgaacgcgaccaagggcggcgtgtccaccgtgtgcgagccgctgggccccgaccggccgatctggttccccggcagctcccctccgccgtggctggacggaagccttccaggagactttggatttgaccctctcggactaggttcggagccggagctgctgcggtggttcgcgcaggcggagctgatgcacgggcggtgggcgatgctggcggcggcgggcatcctggtcccggacctgctggcgcggtggggcttcatcgacgcggggttctcgtggttcgacgccgggtcccgcgagtacttcgcggacccctggacgctgttcgtgtcgcagatggcgctgatggggtgggcggaggggcggcggtgggcggactacctgaggcccgggtgcgtggacatcgagccgcgcttcccgaaccgcaagaacccggtgcccgacgtggggtaccccggcgggctgtggttcggctgggccaactggggccgcgggtccccggagcccgtgatggtgctgcgcaccaaggagatcaagaacgggcggctcgccatgctcgccttcgtcggcttctggttccaggccgtgtacacgggccagggccccatcgacaacctgctcgcgcacctcgccgaccccggccactgcaacatcttctcggcattcacgtcccactgatccgatgttgcttcggagctggcggagagaccgcgaagaattaaaaaaaagggcatcctgttgagggagaaagaacttcgcttggtcggtatcattttggccctgctggacatgtcaacattttgtttgtagtacctgcgtagaaatgtcaaaccacctgtacaaacgtacaaataccaccccagggatcgcgatgatgctagccagcagtccagcacacactagcttgtcctgatgatccatccaacaccgtatacagaggaaatttatggacacggcaatgtaaacatcccccatatcctcgtcctagcataacagtgtcatctacggtacagatcccttatatatatattttgcacgataaac

SEQ ID NO: 28287 - DNA, 1924 bp, Zea mays
  Clone ID: LIB4756-016-B5_FLI
ccgggattcgttgagtgcgcgcgcggcgcggcgcggcggcttgccattacccgtcctctctcttaccccgtcgtcctcttcacctgcaattgagcatttgcttgctccccctccccgacaaaaaccccctgtcccgtcgagcctcgcatccctagttccctacaagcaaggaaggaaacccgggcaacacgacaccggcggtgccagtgccacggaaaattagccggctccctccccgacgtccggcggcggccgagcaacggtgctggctcccaacatggagacatataccacagacgacgcgcttaccattatggggtttggaaaattccaagcgcttgttcttttctacgctggaatgggctgggttgcagaagctatggagctcatgctcttgtcgtttctcgggccattcatacgagaggagtggaacgtctccccagagaacgagagccccctttcgagtgttgtctttgctggcatgctgctaggtgcctgtgcttggggctttgtttccgacaaatatggacggaggactggtttaatattttcaactctatttactagtggaatgggttttctaagcgctttatctcctaactacttatgcttggtggctcttcggtttctggttggagtaggagtgggtggcagccatgtgtttatatcttggtttttggagtttgttcctgcacaaaatcgtggcacttggatggttattttctcccttttctggactctcggcacgatcttggaagcttcacttgcatgggtcgtattgccagcattgaattggaggtggctgctagtcttcaccgcccttccatgcttcctcttgcttcctttctttggactaacacctgagtctccgcgctacctttgtgcacaaaatagaatgtctgatgccacatctgttctagagagaatggccaacgcaaaccaatcagctcttcccccgggagttctcacgtacaatagacaaacaaaatgtgaccacgacgttctcgctcccgagagtgaatgtcttcttcctgtcagagagaaggaatgcacagttgacaatgccaagagctccgaatctggcagtcttgctgcactgcgcatgctattatcgcgcgaactgctcagatcaactctgcttctttggtttgttttctatgcaaattcctttgcttattacgggttagtattgctgacatcgcagttgagtgatgcaaataaaagttgtgcatctggtgtgtcttttggtctgcgccaaaaggaaatcaatctttacaaagacactttcatcactagtttagcagaaatcccaggtttatttttgtctgctgttcttgttgattggtttggtcgaaaagcttcgatgtggtctatgatgttcgcatgctgtgctttccttggaccacttgtacttcaacagactgagttgttgacaactattcttctatttggtgcccgtgcatgtgccatggggagctttacagtcttgtgcctttatgctccagaggtgtatccaacatttgtccggtcaaccggtgcaggaattgcgaccgccattggtaggattggtggggttgtttgccctctcgttgctgtcgccatgctgcggagctgccatcagatggaagcactcattgtgtttgaggtgatattatgccttgctgcagttgcctgcatgttcttccctgtagagaccaagggccgtggaatggactgatgcaatatcaggcttcagcatctagatgagcttgtagttcatcactgtttgttttatgccatcattatgtacagagaatatacatgtaacatggtgtggatagttcctcaaaatatgtgcaggactttccaaatttgtaagacagattttgtactgaaagacagctggttctgtactgccaaaacactgaaagacagagttgtacag

SEQ ID NO: 28288 - DNA, 630 bp, Zea mays
  Clone ID: LIB4756-016-B8_FLI
ccgggaaaaaaaaccggtccggcccgcatatatataaccactccgacaccctcgctgcacgtcatccgcgacaccgaacccagtggaatcgaccctactgctaccggcagaatgattatccccaaggaagaccgtcgcacaatttacgaaaaccttttcaaggatggcgttatggtagcaaagaaagactacgatgcccccaagcatgtcgaattagacgtcaagaacctctacgtcatcaaggcttgccaatccttgaactccagaggtttgatcaaaacccagttctcctggaagtttcactactacacccttacggatgagggaatcgaatacctgcgtgaatggctcaacctcccctccgaaattgtcccggctaccttcaaaaaggtccaacgagccgttcccgccggacgaccccaacaggcctctggtgtctaccgtcccccgcgaggcgaaggaggtggtgatcgggaaggctaccgcaagaaggagtctggtgccgatggtagattccgaccccgattcgctggaatcggccgaggcgcccccagcggtgatgcccctgctgccggtggctggtaattccatgcctagtctggcaatccaaacatctttgtcccgcctttc

SEQ ID NO: 28289 - DNA, 937 bp, Zea mays
  Clone ID: LIB4756-016-G5_FLI
ccggggtctaaccactacccagcgggcgtccgtttctcacacggtcacacacaccgcctcaactcgcgctgcccgtcgcccccaagcctcggttccgccggcgcgcgaggggattcgagctgggtcttgggtagcctctcaccgtctcacgatgccgccagcacccaagtccggcgacgccctcttcgccagcgtggatcgcgtcaatgcggagctgttcacgctcacgtacggcgccatcgtgcggcagttgctcacggatctggaggaggtcgaggaggtcaacaagcagctcgatcagatgggttacaacattggaacacgattggttgatgagttcttagcaaagtcaaatgtatcaaggtgtgttgacttcaaggagactgccgatgttattgcgaagcttggcttcaaaatgttcttgggcgtgactgcaaccgtgaccaattgggatgctgagggtacaagttgcagccttgtcctggaagacaaccctcttgttgatttcgtcgagctccctgacacttgccaaggccttcagtattgcaatttgttaagtggagttattaggggggcattggaaatggtgtctatgaaggcggaggtgacatgggtgcgcgacatgcttcgcggggacgatgcctatgagatgcgggtgaagcttatcaagcaagtgccggaggaatacccctacaaggatgatgactagttctattttagtgcaagattgcttgtttggattttgacatcgttttcgtcgatggtccgtagttctgctataacctgatatcatacgaggaaagctgcgtctgttttgcttgtgtattgtagaaatcatacataatctttcctgagttgcggctttgaattagtctgctggattcagggcgttcgctatgcaaattggtgttatctagaaataaagtattttcgatct

SEQ ID NO: 28290 - DNA, 1383 bp, Zea mays
  Clone ID: LIB4756-017-G6_FLI
ccggaggaaacttgattctatgtcactttgtgccttgcgattcccgcgagtacccatataccagcttcgtagtacgccacgtttgcgccatctttttttcccgacacaatacatacgatctttctccgcgttagataagcctacagccatggacaaagctcccggacaagagagcaagggatcaatcacagattgggtcaagcctggcgataagagcggcgagttcaagcgtcaaacctctgtcttccgaaattggattgagaataaacccaacgccgaattcccaccagaaaaaggccgataccatctttacgtctcgtacgcatgtccatgggcccatcgcacactgattgtgcgccaattgaagggcctcgaagatattatttcgtacaatagcgtccactggcacatggcagaaaagggatggcggtttgcgtcatccgatgaaagaattccaggaaacactacgccggatccattgcaccaagattacacacatctccgagacatctactttgagcagaacccagactatgaggggcggttcacagtaccgacgctttacgacaagaagacgaacaagatagtgagcaatgagtcagcagagatcatcaggatgatgtacacagcctttgacgacatcatcgaagaaaagtacaagaaggttgatttgttccccaaagatctacaaaaggacattgaggagatgaatgagtgggtgtacaatgatgtcaacaatggtgtttacaaatcaggattcgcaacaactgaagaagcatacacaaaggctgtcactcaactgttcaagtctctagaccgactagaagagtcactctcacagtcgaagaccccatatcttttgtcagcaccacacgttacagaagcggacgttcgtcttttcacgaccatcatccgcttcgacccagtctacgtacagcatttcaaatgcaacatccgtgacatccgctccggatacccgcacattcacaaatggctgagacatttatactgggactaccctgccttcaaagacacgacgaattttgagcacatcaagaagcattacacaaagagccacggtcaaatcaacaagttccagatcacgcctattgggcctctgcctgatatcctcaacaaggaagacgaggtgccgagtgtgaaggctgcattagcgaagtaagcagatatacacatgtataggcatgcagacaatttttaaagtgtcatggtagtgtatgccggtagttgagagtgtttatcaagagtgtgcaaattatcgggtttccttgggtatctagttttgtgaaatttccagacttttgcagcaaatacatgtcaaacgcgccgacctggtggctagtaccattcccatcagtctatacg

SEQ ID NO: 28291 - DNA, 735 bp, Zea mays
  Clone ID: LIB4756-018-H8_FLI
aggaagatggggctcgcgttcgggaagctcttcagccggctcttcgccaagaaggagatgcggatcctcatggtcggcctcgacgccgccggtaaaaccaccatcctctacaagctcaagctcggcgagatcgtcaccaccatccccaccatcggtttcaatgttgaaactgttgagtacaagaacattagcttcactgtctgggatgtcgggggtcaggacaagatcagacctctttggaggcattacttccagaacacccagggtcttatttttgttgtggacagcaatgaccgtgaccgtgttgttgaagccagagatgagctccacaggatgctgaacgaggatgagctacgtgatgctgtgctgcttgtttttgccaacaagcaagatcttcccaatgccatgaatgctgctgagattactgacaagcttggattacactccctgcgccagcgacactggtacatccagagcacttgtgccacaactggcgagggtctgtatgagggcctggactggctgtccagcaacattgcgagcaaggcttgaggcctaccttgaatatcaactgcgaactgactaggagctccggatgtatcatggaaactcaggacagaatcgcagttgcaatctgttagatgtcttctaccggcactatatatattttttgtttgatgtgtaatgatgttactgttcaacgcttattaccctactatactgttggatgttcgt

SEQ ID NO: 28292 - DNA, 933 bp, Zea mays
  Clone ID: LIB4756-019-B11_FLI
ggccggccgggaatcggctatcctgtcagtttccctctcccctcccgaaaccggattccgtaccgaatctggtctcgccttggagccgaggttgcacgcggttcgtcctgcggccatggaggacgaggagcacgaggtgtacggacaggagatccctgttgacggcgaggacgtcgacatgtccgccggcgacgacgcgaccaagctttaggagctcgatgagatgaagcgccggctcaaggagatggaggaggaagccgccgcgctccgcgagatgcaggctaaggtcgccaaggatatgcaagatcccaatgcaaccacatctgaaaacaaagaggagatggattctcggtcggtattcgttggaaatgttgactatgcatgcactccagaagaagtgcagcagcatttcaattcttgtggaactgttaacagagtgacaatcctgactgacaagtttgggcaaccaaaaggttttgcttatgtggaatttgttgaagttgaagctgttcaggaagctattaagttgaatgaatcagaattgcatggtcgccagctcaaggtggcaccgaagaggactaacgttcctgggatgaagcaaccccgcggtcgaggtttcaatccataccggccatatggttatagtccttatggttatggctatggctacgggagattccccagattccgccgcccgcgaagaccttatttttgaagctcgtatgtccatatggtttgcagaacatggacgatgagacggcttgaccttatattcccgcgtcctattacttcatagcttattcgggatgttctcagacatgttattcccatattgacgatgcttaagatttgtactgtattgtttcagtgacagttacgcaaaacgattatgatctagttacgcggaaaggtactgttgtgacgctaaaaaac

SEQ ID NO: 28293 - DNA, 929 bp, Zea mays
  Clone ID: LIB4756-019-C11_FLI
ggccggccgggaatccgctttgtggcgcctatgcgcccgcagcaaccaacgaggcaacggatcgagttcctctccgaactccaactctgcgccgcaatccactcaagaaggttagccctcgtggtctcggatttggataatcctccgccgaggtatgaaacaggaggcggccaccagcatagtggtgacccaggaggacgtcctgcaccactacaaggagcctccaccccgccgcgaggacgatccgccagcactggctgcgtcgctgtcgttgccgtcgtcactgtcggaggacgatggcgacgccatgccgcagccatcttcatacgcggtcttgccgcgccgggaaggcgagctggtgtctgcggaggagctgctgctggtgccgccgctcaacttcgccatggtggaccacggcgtgtaccgctccggattcccggacgcctccaacttgccgtttcttgagacgctccgactccgctccgtcctgtgcctgtgcccggagccatacccggaggctaatctggagttcctccgtgcccacgggatcaagctcttccagttcggaatcgacggctccaaggaaccatttgtgaacataccagaagatagaatccgtgaagctctagaagtcatcctagatgcaagcaaccatccggttcttattcactgcaagcgaggaaagcatcgaaccggctgtgtggttggatgctttaggaaattgcaacgctggtgtctaacttcaatatttgacgaataccagcgttttgctgctgccaaaacaagagtttctgacctacggttcatggagctatttgatgtatcgagcataaagcatttagcatttgagtcgtctgtatgatagtaacattggtgcatgataacaactcaatactggttccattacggtgtcatctttttcatttaag

SEQ ID NO: 28294 - DNA, 1587 bp, Zea mays
  Clone ID: LIB4756-019-E4_FLI
ccgggaaagagtagccatagtttgttagagcattcccccaaggaatataacaccattgtgtgacgagcaacccttcaccaaaaactaaggactgataaactgcaagagaccgttcctatcaggattgtggagtctgcaaccagatatcaatgcataacagaattgaagagatgtatcatcatcaacaacagcttcagagccacagtcatttcctgtcttctaggcagacattccctccagaaaggcacatgcttctgcaaggagggagcattccagcagagccagggcttgtgctttccactgatgctaaacctaggttaaaatggacacctgaactacatgagcgttttgtggaggcggtaaaccaacttggtgggcctgacaaagctacaccgaagacaatcatgagactcatgggtgtccccggactaacactataccaccttaagagtcatcttcagaaatacaggctaagcaagaacatccatgcccaagctaatggtgtaaatgcaaaaaatgtgattggttgcaccatggcaatggacaaaccacttgaaggaaatgggtcaccagctagccacttaaaccttggaacccagacaaacaaatctgtgcacataggtgaagcccttcagatgcaaattgaagtacagcgccgactgcatgagcaactagaggtacaaagacatttacaactccgcattgaagcacaagggaagtacctacaatctgtgctagaaaaggcacaggagacactttcaaagcagaatgcagggtcagtcggtgtagaaaccgcgaagatgcaactgtcagaattagtctcaaaagtatcgacagaatgcctccagcatgcatttacaggctttgaggagattgatggttcccaaattctacaaggccataccatccaacttggcgatgggtcagttgacagctgcttaactgcctgtgacggctcacagaaagatcaagatatcctgtcaatcagtctttccgctcacagaggaaaggagataggaggcatgacctttgatatacaagagaaagaaagaggaagagaggatttgtttcttgacaagctaagcatgacgcctccaggccaactagacaggcgtgagagaggaagttttagtatgacacggaaggcagcaaaactggatctgaacatcaatgataccactgatgggccacagaactgcaagaaaattgacttgaatgggttcaactggacctaggaagagttagcaaaagaccttgcaaattaaatctgacttgattcatcaagagtgacaagcttataagcttgagattggctccttctgccaagatagcagcaaagagaggaagtgaaaccgaatgagttattccaaagaccagcagcatcgacatatcctccatggcaggacctgggtgatcctcggaacagctgcgctgtcggcccatcacgattcagcgaaataagtgatgaaattacaataagtagggcatgtagattggtagagtgtatttgagagagtctagtgttctcctccggctataccttattgtgattctgtacacaagcatataaatacaacgatttttgtt

SEQ ID NO: 28295 - DNA, 1255 bp, Zea mays
  Clone ID: LIB4756-021-E6_FLI
cgcactcccgccccttttccttttgctccttccttcctcgggaagcctagggcttaggctttaagcgccgcgatgtacggcggcggcggcggcgggcactacgacggaggcagcggtggcgccgggaacgctaacgcgctcttcggcggcgggggcttcatgccctcacagtccacggtggtcccggagaacagcggcctctctaagggtcggagcgcgcagacgctgctcccgctcaccgtgaaacagaccatggacgcggcgcaaaccagcggtgacaggtctaatttcgccatcaacggcgttgaggtgtctacgattaggcttgttggacgcatgctaggtaaggttgaacgtgtcacagatgttgtattcactcttgatgatggtactggcaagatagatgtgaatcgctgggaaaatgaggcttccgatgctaaggagatggctgatgccaataacgagaactatgtcatagtcattggcggtttgaaaggttttcaaggaaagcgccatgtagttgcctatgctgtgcggcgtgtgacaaacttcaatgaaataacctgtcactttctgcactgcattcaggtgcatatggagctcacagggttaaagatctattcttcagctgcaacatatggaggagtagcccatgccccatcacagccaaatccggttgatggaaactacatatccaacttggtcttgagtgtttttcatgacccatctgtcatggaccaggagcatggactgcacatcaaagatgtcatagatcgtctcaaacaccagatgatgtagtcagtgcggccatccaaggtcatgttgatgtgggcaacatttacaacacaattgatgacttccactacaaatctgtccggaatggatgaccacgttgcaagtccagcgttcaggctccgtgtaggtatggagccgtttcaaggaagaagaaatgtaaaccctcttcaggatcgcctacatcttgcagataggcttcatggtcaacagcttagcatatcggtttaggtgtgtattgctctcatatgtaatgatacataagatgtgagtagactaggtctacctgcaggacatcagtccgttcctacggaaatttgttatgaacgttttacattctaagacctatataaccgtgaagcacgcaaatcaagaatagaaccgccaaaaaaatggcagagggacattgagtaagacttctcctgaaacgaactgactacacggacgaagatttgttcaccag

SEQ ID NO: 28296 - DNA, 991 bp, Zea mays
  Clone ID: LIB4756-021-G1_FLI
gtcggccggagcacacgctaatttgcattgctaaccgttgcaccggccatctccatctctcatagcctcacagtcacaagggtgaggagtggagagacgtcggtgagtttcaccatatggcggtggggaagggaggagggctgctggtcctcgtcgttgtaggtctgctcctgcacggcacccgtgtcgccgacgcgcagtctctccgggttgggtactacagccagacgtgcggcagcgccgagtccatcgtcgccgacgaggtccagaaggcgtcgtacagggataggggcgtcctggccagcctcatccggctgcacttccacgactgcttcgtcaatggctgcgacgggtcggtgctgttggaggccagtgaccggcaggcggagaagaacgccaagcccaacctgagcctgcgagggttcgacgtcatcgagaggatcaagcagaggctggaggccgcgtgcgcgctgacggtctcgtgcgcggacatcgtggccttcgccgccagggacagcgttaagctgagcggtggcctttggtacgccgttcccggcgggcggcaggacggcatggtgtcgcgggcgagcatgaccggcgacctcccgcctccgaaccagcgcaacgtggacctgctcgcgcagtacttctaccgcaagggcctgacgctggacgaaatggtcctcctctcagccgcgcacacggtgggcatcgcgcactgcagctcgttcgactaccggctgacgagcgaccaggacaagggcatggacccggccttccgcaacagcctacggagccagtgccagtacaaccccagcaactacgtgcccttggacgccggcagccagtacgcgttcgacaccggctacttctccaacgtgctggccaaccgcaccgtgctcgactccgacgccgccctcgcctcgccgcgcacagcagacaaggtcaagcagtggaagaacaacccggactggttcaagaacagcttcgc

SEQ ID NO: 28297 - DNA, 1372 bp, Zea mays
  Clone ID: LIB4756-022-E10_FLI
ccggggcttcaacgacctgccactgctccccggtgtagctgcaattgggtcccaccaacaactctctactcgctcaatatgctggctgctcgctcttttgcctcgcccgcgcgccaatgcctgcgccaggccaaccgctcaagatgggcgcccgcactgtcccaggtctccgcccgcacatacgcctctgaggtcgccaagttccacggcacaaagggtagcgatggcaagtactgcgtcactctgattgagggtgatggtatcggccccgaaatcgcgcagtcggtcaaggacatttactcggccgccaacgtgcccatcaagtgggagtcggtcgacgtcaccccgcgcctgaacgaggagggcaagacggtcatctccgacgagtcaattgccagcgtcaagaagaacctcgtcgctctcaagggcccgctggccactcccattggcaagggccacgtctcgctcaaccttaccctccgccgtaccttcaacctcttcgccaacgtccgtccttgcaggtccattgccggctacaagaccccctacgacgacgtggacactgtcctgatccgtgagaacaccgagggcgagtactctggtattgagcacattgtggtagatggcgtcgtacagagcatcaagctcatcacccgcgaggcctctgagcgcgtcctgcgatacgccttccagcacgcccgcgacattggcaggaagaaggtccgcgccgtccacaaggccaccatcatgaagatgtccgacggtcttttcctcagcactgcccgcgagattgccaaggacttccccgacattgagtttgacgccgagctccttgacaacacttgcttgaagatggtcaccgaccctgtcccctataacgacaaggtcctcgtcatgcccaacttgtacggagacattctctccgacatgtgcgctggtctcattggtggtctcggtctgactccttccggaaacatcggtgacaactgctccatcttcgaggctgtccacggatccgcgcccgacattgctggcaagcagctcgccaaccccaccgcgcttcttctcagctccatcatgatgctgcgacacatgggcctcaacagcgaggccgctaacattgagcaggccattttcaaggttcttgctgagggcaagaccatcactggtgacctcggcggcaaggccaagaccttcgagtacgccgacgccgtcatcaaggcgctcaagtagattggaatatggaattgatgagcattgacacgaccgaatggtagccattgcatatctggatatgtactagtccctgtactatagctgccatttagctagatacacgcctataccacttgaaatttgcatattgataaag

SEQ ID NO: 28298 - DNA, 956 bp, Zea mays
  Clone ID: LIB4756-023-H12_FLI
ccgggaaaaaagattctctctccttttctttttcttctctccacccgcttctctctgttgatttctggccggggttgcctggcttggttctccttctggctgctcgctggcctgcaaccgccaagggagaggaagcaagaaggattggaccgccgtccgccgggacacctcttcctgatccaaatccaagggacggacagctaaagtagctgtgtaatatggaagtcgagcaggccgccgaagtaagcgctccagatacggctgatcttaacaagcctgctaagacgcaggcacacggtgatgataaagaaaatgtacccaatggtaatacaaatttgcaagtcaaggaaacacacaatgatgaagacgatggaactggatctgatgggtttgaactgatagatgtggaggaaaactttgactcagcaaaagtgggggaagaaatcgccgcttcaagaagtactacggttgatacatctcctgttacagaacaaagtgaaacacaagaagaaaaaataacagcacctgaagaacaatcagttgcagcaaacacaagacatgtagagtcctcaatgttgaaccaacaaacagaacagttggaaaagctgacaaggcgtattgaggagcttgaatctgaaaaagataaactagtaaaggacttgacagaagcagaaaacaaacagagcatgcactacagttctctacaagaagctcaaagctctctttctatgaaagataaggagctggctgaagcaacagagtcgctgaaggagctgggttctgagcttgaaacctcaaaaaagaggattcaagaaattgaagctgaattggattcatcagcagataagcttcgtaaacttgaagagctgaaggatgaaagaagcttgcatgctgcacaggaggcgaagagggcttcagaacttgataagatgctggaactggcacagtcaaacacg

SEQ ID NO: 28299 - DNA, 1228 bp, Zea mays
  Clone ID: LIB4756-024-A3_FLI
ccgggagttgagtgcgctttgtcttggactcgccgaattgaggatggcaggacaaggcatcacgtccatgcttgccgccgctgcattgctcgtcggaatctttgcgtccatccctacagcggtgcagtccatcggcgtgtgctacggcaccaacggcgacggcctcccgtcggcggccgacgtggtgcagctctatcggtccaacggcatcgccgggatgcgcatctactcccccgacgccaccattctacaagccctccgcggctcgggcatcgacctcatcgtcgacgagaccaacctcgactccctcatctccgacgcgccggggtgggttcaggccaacgtgcagccttacaaggacgacgtcagcttcaagtacatcgccgtgggcaacgaggtggaaggcggcgacacgcaaaagatcctcccggccatgcagagcctcagtgacgcgctctcggcggcggggctcggcaacatcaaggtgtccacggcggtgaagatgagcgtgctcgccaccccgtcctcgccgccgtccaccggcgcgttcgccgacccctccgtcatgggccccatcgtccggttcctggccggcgtcggctcgccgctgctggccaacatctatccctacttcgcgtacagggacgcggcgggacgatcgacctcaactacgcgctgttccagccaagcaccacggtggtgagcgacggcggcggactggtctacaccaacctcttcgatgccatggctgacgcgatgtactcggccatggagaaggaaggcggctccggcgtgcccatcgtcgtgtcggagagcggatggccgtccggcggcggaggcaccggcgccgagactgtagacaatgcacggacctacaaccagaacctgatcaaccacgtcggcaacggcacacccaagaggtctgggccgcttgagacctacatattcgccatgttcaatgaggacaagaagcagggggacgaaacggagaagcattttggcctcttcaacggcccggaccagtcgccagtgtaccagattagtttctccacatgaaagttctacactgcacgattgaggtgttgtacctattaacgccttcgatgagtattactgtagaaaatacaaccgtacctggcacccatatatatctcttcaataaatccaggctatgagctagctataacaaaagaaagtaggttctttttgggaaaaaatctatatttac

SEQ ID NO: 28300 - DNA, 899 bp, Zea mays
  Clone ID: LIB4756-024-B12_FLI
tcgaggccggcggggccttcactcgtcacatgcgctgacgcgcatcccccccggcgtggcgtgcgctttgatctagctcttcttctcgaatccagcccgaggcttctgcggtttcatccgtacccatcctgcacacgaagcctagaatagccctcccctgctccgccacctcctcggatcccgaccaccccacccccaccccagacaacaggttgatggaggctaagatgggacgcttcttcgagtccgtgagcaatttcttcaccggaggcgaccacatcccctggtgcgaccgcgacctcatcgccggctgtgaaggagagcttgtcaatgctgcaaatgaggaacagaggaatgaaagccttatgaggttgtcatgggcccttgtgcactccaggcagacagacgatgtaaaccgtggaatcagcatgcttcaagcttctttggataattctgccagtcctctgcagactagggaaaagctgtacttgttggctgttggattctacaggattggcgactactcaaaaagcaggcaacttgcagatcgttgtttggagattcaagcggattggcggcaggccatatcgctgaagaaggcaatagaagataaaattgccaaagatggtctgattggaataggaattgcgacaactgcggtcggacttctggttggtggaattgcagctgctgttgccaggaagaagtgaggtcaatatattggatcggcagctcattgaactaggggagctcccgtctctgtaattccaacttttctgttgttaccttggtgatattacagttgaattgccactctttatatgtacgaagtaatcgtatgataatgataacaccattgtgacattatagctttcatcgatctgtcattttattctcgc

SEQ ID NO: 28301 - DNA, 615 bp, Zea mays
  Clone ID: LIB4756-024-D8_FLI
ccgacctgcagccaaccatctaccagcgactcagcgagcgagagcagcacacacgcagctagctaggagcagcagcagcggcggcggcgatggcggcctccatgatctcctcgtcagctctggcggtggcgcctcagggcctgccgcccctcggccgccgcgcctcctccttcgccgtcgtctgctccaagaagaagatcaagaccgacaagccctacgggattgggggtggcctgaccgtcgacgtcgacgccaacgggagaaagagcaagggcaagggcgtgtaccagttcgtcgacaagtacggcgcgaacgtcgacggatacagcccaatctacaacgaggatgactggtctcccaccggcgacgtctacgtcggtggaaccactgggcttctgatctgggccgtcaccctcgctgggatcctcggcggcggcgccctcctcgtctacaacaccagcgccctctccggctaaggatatccaatgcatgcgcttcttgcgattcgtcatgtaaaatcagggtgtctgtctataatctagcctccatggatgctcaaccttcgtcatgtaacaataatcagtgctactcttcattacataattttgatgctat

SEQ ID NO: 28302 - DNA, 165 bp, Zea mays
  Clone ID: LIB4756-024-D9_FLI
ggccggccggggtgtagtgtaccggatggtgagcgagcgtgacagttacctttccttttcagtactgcctagctagctagacctagatgtattattatatattgtgtactcccttcttacgtacgtgcgttccataataaatgtattctgtagttgtctttttct

SEQ ID NO: 28303 - DNA, 1170 bp, Zea mays
  Clone ID: LIB4756-029-D3_FLI
ccggacgagcccagcgccacacaccaacctcagcacaccaaggagagtacgtggaggagcagccatggcttcatcggtggccgccgcggcgagcacattcctgggcacccgcctggcggacccggcgccacagaacgggcgcatcgtggcccggttcgggttcgggttgggcggcaaggcgaagcctgctccgaagaaggtggcgaagacatcgacctcctctgaccggccgctgtggttccccggcgccgtggcgcccgactacctggacggctcgctggtcggcgactacgggttcgacccgttcggtctcgggaagcccgtggagtacctgcagttcgagttggactcgctggaccagaacctggccaagaatgaggccggcggcatcatcggcacccggttcgagtcctccgaagtcaagtccaccccgttgcagccctacagcgaggtgttcggcctccagcggttccgcgagtgcgagctcatccacggccgctgggccatgctcgccaccctcggcgccctctccgtcgagtggctcaccggcgtcacctggcaggacgccggcaaggtggagctggtggacgggtcctcctacctgggccagccgctgccgttctccatctcgacgctcatctggatcgaggtgctcgtgatcggctacatcgagttccagcgcaacgccgagctcgacccggagaagaggctgtaccccggcggctcctacttcgacccgctcggcctggcggccgaccctgagaagaaggagcggctgcagctggcggagatcaagcacgcgcggctcgccatggtcgccttcctcggcttcgccgtgcaggccgccgccaccggcaaggggccgctcaacaactgggccacccacctgagcgacccgctccacaccaccatcttcgacacgttcggagggtcctcttaagcccgccattgctccgccccgtccatcgaccggccggaacgtgttcttggattaattaactacgatctctatgagcctggggatggatcaacccgtcgtgcgtggtctcgttttgtgatgagtgggagagagaggatggcaagatcgatcctttgttaatggagatctcgttaattaggagagctaccgctgggacttggtggtttgtaatatatgatccaaccagtgat

SEQ ID NO: 28304 - DNA, 1100 bp, Zea mays
  Clone ID: LIB4756-029-H2_FLI
ccgggacaagcaccagaccaattaactagcttcttctagctctagctaggctcgtttgctgcaagaaggtaacagctagcaggcatggaggggaaggaggaggacgtccgcctgggcgccaacaagttctcggagcgccagcccatcggcacggcggcgcaaggcacggacgacaaggactacaaggagcccccgccggcgccgctcttcgagcccggggagctcaagtcctggtccttctaccgcgccggcatcgccgagttcgtcgccaccttcctcttcctctacatctccatcctcaccgtcatgggcgtctccaagtccacctccaagtgcgccaccgtcggcatccagggcatcgcctggtccttcggcggcatgatcttcgccctcgtctactgcaccgccggcatctccggcgggcacatcaacccggcggtgaccttcgggctgttcctggcgaggaagttgtccctcaccagggcggtgttttacatcatcatgcagtgcctgggcgccatctgcggcgcgggcgtcgtcaaggggttccagcaggggctgtacatgggcaacggcggcggcgccaacgtcgtcgcgcccggctacaccaagggcgacggcctcggcgccgagatcgtcggcaccttcatcctcgtctacaccgtcttctccgccaccgacgccaagaggaacgccagggactcccatgtgccgatcctcgcccctcttccaatcgggtttgccgtgttcctcgtccacctggccaccatccctatcaccggcaccggcatcaaccccgcgcggagccttggcgccgccgtaatttacaaccagcaccatgcctgggctgaccactggatcttctgggtcggccccttcatcggcgctgcgctggctgccatctaccaccaggtgatcatcagggcgatcccgttcaagagtaggtcttaaaggagccgatgctgctgcttcgagatgccggtcttaaaaggatggattcgtggctgttttcaaatgatcccctactatgttacgtgcagttccattcctctttcaaagttcggagctgcttttatccgaacccagacttgtaattcagg

SEQ ID NO: 28305 - DNA, 710 bp, Zea mays
  Clone ID: LIB4756-030-E7_FLI
ccgggcttcgctgcgccgccgcctccgacatcgtctcttcgtccccacgagcaaccgataatccgccggcgctgagatgttggtttatcaagacctcctatctggcgacgagctcctgtcggattcattcacctacaaggagctcgagaacggcgtcctgtgggaggtcgaggggaagtgggtcacccaaggtcctgttgatgtagacattggtgccaatccatccgccgagggtggtgaggatgaaagcgttgatgacacagccgtgaaggtggttgatattgttgacacattccgtctacaggagcaacctccttttgacaagaaatcatttgtctcttacataaaaaaatacatcaagaatctcactgctgtgttggagccagagaaagcggatgagttcaaaaagggtgtcgagggtgcaaccaagtttctccttagcaagctgaaggaccttcaattttttgttggtgagagcatgaaggacgaagcgtccgtggtattcgcctattacaaggatggtgccactaatccgacattcctctatttctctcatggtcttaaggagatcaagtgctagattagttacccatgttgggtactatatatgttctattgttatagccacaactatagctgccctgcctgaactgaactcaaaggttttttttaagaaaaaactgtccaagattggattgcttgttaaagag

SEQ ID NO: 28306 - DNA, 1493 bp, Zea mays
  Clone ID: LIB4756-031-H10_FLI
ccgggaactactttcatttcgtcgtcgtcgcccgcccccacccgctcctccactccaccaccaccggacagatacggatgtctccgcccgcacatccacttcacaaacgaaaacccgcagcaaacgctagcagcggcggcgccggcagttggtagccgcgaccgagacacggcgggtgacctgccccgccgcagtcggggtgtatgtattaccaccgccagaattccaggagacgaggatcgaggaggcaccgatccgtagcggcgatatcgtagagccgctggtctcacgccgcaccgagacaatggcagaccagttagggtcttacactattagatcccatggaatgatattggcaaggttgcacatgtatgactggataatacttctcctccttgctgtcatagacgggctgttgaatataattgaaccatttcaccgttttgttgggaaagacatgatgactgacttgagatatcctatgaagggcaatacagtgccattttgggctgttccactgattggaattatactgccttgggccatctttgttgggatttacttcaaaaagaagaatttttatgatttgcaccatggcatactggtgattactgatgcaattaaggatggtgttggacggcctcgtccagattttttctggcgctgtttccctaatggaaatgatgtttatgataacattactactggtgttatatgcaatggagtgaagagcgtaatcaaggaaggccacaagagctttcccagtggacacagttcatggtcttttgctggtctaggcttccttgcatggtacttagctgggaaactcacagcctttgaccgcaaagggcatattgcgaagctatgcattgtgttcctgcctctccttactgccgcacttgtggctgtttctcgagtggacgactactggcatcattggcaagatgtatttgcagggggtcttataggtcttacagttgcttcgttttgctacctacagtttttcccatatcctttcgatggcgatgctttgtggcctcacgcatacgcggtccggttagccgaggaggggaacagcagaaatgcgaactcgtacagcgtgagaccaaccgagatcgaaacagtcgatattcctgggcacggtgcgatcatcaccctaagagagactctaaacgatgtggagtctggcagtgccaggagattgtgagatgggtctgcaggtgtggagattgatgtctcagataccatgggagttgcttgcatatgtgtacaggtagatctattgtagagctgttgactgctgccaccgtgataggggagggttgcttagacgggcctggcagtaaatttacttggtaggggtgctgtttcttctgagaacctttggcttttgtttgtatatatactcttatcaaagtgtttgctgacacttttgtaaccagtttggtcgctgcattcagcaactatgatctgatcagatgttgcccagtctg

SEQ ID NO: 28307 - DNA, 829 bp, Zea mays
  Clone ID: LIB4756-031-H2_FLI
ccgggatcgacctcctcgatccagacagcaggcagcagccatgtccaaggtcttcaccctcgacgcggtcgccaagcacaactccaaggaggattgctggctcatcatcggcggcaaggtgtatgatgtgacgaagtttttggtagaccacccaggaggtgatcatctcattcgcatatctggggcagggaagctatctgtccaccagaccagcactagcagccgctcactccagccattacccgcagctagcaaacaaatggccaccgtcctgagcagcccccgcgcgccggccttctccttctccctccgcgccgcgccagcgcccactaccgtggccatgacccgtggcggtggcgccagcagcaggctgcgcgcgcaggccacctacaacgtgaagctcatcacgccggagggggaggtggagctgcaggtgcccgacgacgtctacatcctggactacgccgaggaggaaggcatcgacctgccctactcctgccgcgcggggtcctgctcctcctgcgccggcaaggtcgtctccggctccgtggaccagtccgaccagagctacctcgacgacggccagatcgccgccggctgggtgctcacctgcgtggcgtaccccacctccgacgtcgtcatcgagacgcacaaggaggatgaccttatctcctaagcaaattaataaagcaccgccaattatcacgtcgacttgcaagcacaggagagtagaagatgtctcaatactggctgtgcatgtaatttttttgtccgtttcaaactgtattgtaaactattacctctgttttcaaatattttttaaatattt

SEQ ID NO: 28308 - DNA, 1204 bp, Zea mays
  Clone ID: LIB4756-033-C2_FLI
ccgggagcactcatccattccatcatcccctttgcaagtatagtctctctgctaagcgaagcgaagcttcaagctagtctcggcggctctagaagacgatgggcaaggacgacgtgatcgagagcggcgctggcggcggcgagttcgctgccaaggactacacggaccctcccccggcgccgctgatcgacgcggcggagctggggtcctggtcgctgtaccgcgccgtgatcgccgagttcatcgccacgctgctgttcctgtacatcacggtggccaccgtgatcgggtacaagcaccagacggacgcgtcggcgtcgggcgccgacgcggcgtgcggcggcgtgggcgtgctgggcatcgcctgggccttcggcggcatgatcttcgtcctcgtctactgcaccgccggcatctcggggggccacatcaaccccgccgtcaccttcggcctcttcctggcgcgcaaggtctccctggtgcgcgcgctgctctacatcgtggcgcagtgcctcggcgccatctgcggcgtcggcctcgtcaaggcgttccagagcgcctacttcgacaggtacggcggcggcgccaactcgctcgcctccggctactcccgcggcaccggcctcggcgccgagatcatcggcaccttcgtgctcgtctacaccgtcttctccgccaccgaccccaagcgcaacgcccgcgactcccacgtcccggttctggctcccctccccatcggcttcgccgtgttcatggtgcacctggccaccatccccgtcaccggcaccggcatcaacccggccaggagcctgggcgccgccgtcatctacaacaaggacaagccctgggacgaccactggatcttctgggtgggccccctcgtgggcgctgccatcgcggccttctaccaccagtacatcctccgggctggcgccatcaaggccctcggctccttcaggagcaacgcgtgatgagcggggcttggctgtggagcaatggcgggcgacctacgggcggggggccgtgagcgaggagaatgccatcattcatcgatcgacttgggtgccggtggttggttcgggccgccttattttgtttcagcagctgctgcgttgcgcgcgtgcgtgagatttggtttggtttcgttcccctgcaatgtaatcatgtcgtgactctctcaagggattattccgctctgctctcg

SEQ ID NO: 28309 - DNA, 708 bp, Zea mays
  Clone ID: LIB4756-034-A11_FLI
ccgggcttcgctgcgccgccgcctccgacatcgtctcttcgtccccacgagcaaccgataatccgccggcgctgagatgttggtttatcaagacctcctatctggcgacgagctcctgtcggattcattcacctacaaggagctcgagaacggcgtcctgtgggaggtcgagggaaagtgggtcacccaaggtcctgttgatgtagacattggtgccaatccatccgccgagggtggtgaggatgaaagcgttgatgacacagccgtgaaggtggttgatattgttgacacattccgtctacaggagcaacctccttttgacaagaaatcatttgtctcttacataaaaaaatacatcaagaatctcactgctgtgttggagccagagaaagcggatgagttcaaaaagggtgtcgagggtgcaaccaagtttctccttagcaagctgaaggaccttcaattttttgttggtgagagcatgaaggacgaagcgtccgtggtattcgcctattacaaggatggtgccactaatccgacattcctctatttctctcatggtcttaaggagatcaagtgctagattagttacccatgttgggtactatatatgttctattgttatagccacaactatagctgccctgcctgaactgaactcaggttttttttaagaaaaaactgtccaagattggattgcttgttaaagct

SEQ ID NO: 28310 - DNA, 1422 bp, Zea mays
  Clone ID: LIB4756-034-E7_FLI
ccggggaaaccaagcaacccaatccaaaccagacaagcaaggaatcccccgatggctcatcgcgttctcctcctcctctctctcgcggctgccgccgcggtagccgccgccgtcgacgcggaggacccgctgatccggcaggtggttcccggtggagatgacaacgatctggagctgaacgcggagtcccacttcctgagcttcgtgcagcggttcggcaagtcctacaaggacgccgacgagcacgcgtaccggctatccgttttcaaggccaacctgcgccgcgcgcgccggcaccagctgctggacccgtcggcggagcacggcatcactaagttctccgacctcacgccggcagagttccgccggacctacctcggcctccgcaagtcccggcgcgctctcctcagagaactcggggagtcggcgcacgaggcgcccgtgctccccaccgatggtctccccgacgatttcgactggagggaccacggcgccgtcggccccgtcaagaaccagggttcgtgcgggtcgtgctggtcgttcagcgcgtctggagcgctggagggtgcgcactacctcgcaactggcaagctggaggtgctttcggagcagcagttcgtcgactgtgaccacgagtgtgattcatcggagcctgattcatgtgattcgggttgcaatggtgggctaatgacgacggcattcagttatctccagaaggccggtggccttgagagtgagaaggattacccttacactgggagtgatggcaaatgcaagtttgacaagtccaagattgttgcttcagttcagaacttcagtgttgtgtctgtggacgaggctcaaatttctgctaacctcatcaaacatgggccattggcaatcggcatcaatgctgcctacatgcagacatacatcggaggcgtgtcatgcccatacatctgtggcaggcaccttgaccatggtgttctccttgttggatatggtgcttctggtttcgcccccattcgcctgaaggacaagccttactggatcatcaagaactcgtggggcgagaactggggggagaacggatactacaagatatgcaggggttccaacgttcgcaacaagtgcggcgtcgattccatggtctctaccgtgtccgcagtccacgcctcgaaggagtagactctggtcagcggtgataatcgtgattccatatattgtagaactacaatccctgctagtaatccatttgtgctgtttatgtatcgaaggcagcaaagatgtgtgaagcggcaatgggacgcttgctgtaaggtaatatgtttggcttgctaggcatgctacacgctatttggatgtagcaacgttatcaccagctgtatacgctttttaatcgacaacatttgaataatatgtacataacattatgttgtgcgc

SEQ ID NO: 28311 - DNA, 1018 bp, Zea mays
  Clone ID: LIB4756-034-H7_FLI
ccgggaacccctcacactcccatccagccgccaccaggtgcagagtctttcgtcatctcttctccggcgaagaacccccagtcgcccaccagatcacttgttaaactttgttgaggggtgatggcggtttctttcgcaaacctcaactccgaggcagggcttaaaaagcttgatgagtaccttctcactcgcagctacatcactggctaccaagcttccaaggatgacttggctgtctacacttcgttttcggctgctccctcgtccaagtatatcaacgtagcaaggtggtttaaccacattgatgcgctcgtgaggctgagcggaattactgcagagggccaaggtgtgaaggttgaatcctcagcagttccttcagccccaactccagatgttgctgaagcacaggccccagttgctgaggaggacgacgacgatgatgttgacctttttggtgaggagaccgaagatgagaagaaggctgctgaagagcgtgctgcagctgccaaggcttctggcaagaagaaagaatctgggaagtcatcagttttacttgatgtgaagccatgggacgatgagactgacatggccaagctcgaggaagctgttaggagtgtccagatggaagggctgctctggggcgcatccaagcttgtcccagttggatatggtatcaagaagctgcaaatcatgatgaccatcgtcgacgaccttgtctctgtcgacactctcattgaggactatctgtgcgctgagccagtgaacgagtacgtgcagagctgcgacatagttgccttcaacaagatctaggcgtgacttccgatcagtccttctcctggggtgctggcgatggtggtggctgggcaatgcaccagcctaatttatccatagctatatgtctgctttgtgtggccagtgatattgccgtgagtatttttggatcctattcgagtcgaatgtaccagtaccagagttaatttgctttaattcgaaacaccgttccagttggaattctgtt

SEQ ID NO: 28312 - DNA, 928 bp, Zea mays
  Clone ID: LIB4756-035-A7_FLI
agtgagtgaacaccagccgtattgtcccgaccccgaccgatcctcgcctgctgcagccatggcgacctccgcggcgctctctaccgccgccaatcccacccagctctgccggtcccgcgcttcgctgggcaagccggtgaaggggcttggcctgagcatgggccgcgagcgcgcccagcggagcattgtgtgccaggcggcgagcagcatctccgccgaccgcgtccccgacatggagaagcggaagctgatgaacctcctcctcctcggcgccatctcgttgcccaccgtcggcatggtcgtcccctacggcgccttcttcgtccctgccggctccgggaacgccggcggcgggacctacgcgaaggacaagctgggcaacgacatcacggtggaggcgtggctcaacacgcacggtcccaacgaccgcacgctcgcgcaggggctcaagggtgaccccacgtacctggtggtggagcaggacaagacgctggccacctacgggatcaacgccgtgtgcactcacctcggctgcgtcgtgccgtggaacggcgccgagaacaagttcatctgcccatgccacggatcccagtacaacaaccagggcaaggtggtccgtggaccggcgcctctgtcgctggccctggttcacgccgacgtcgacgacggcaaggtcctcttcgtcccgtgggtggagaccgacttcaggaccggcgaggacccgtggtggaaggcatgaggatgatccgaaaccagcggtgctcagtgctcacacatgagacctacgtatgcctccgttccttgtgatgaggaaatatgcttgcgttcgttctccgtgggcgttgttcctacaaattcacttgctttctgtctctctctctatatacacactgtataaaacaagaacagctgtttatcatctcttctt

SEQ ID NO: 28313 - DNA, 611 bp, Zea mays
  Clone ID: LIB4756-035-A9_FLI
ccgggctcaaccggttccgcgcggccaacgcgtcttccggtctgccccgtcggcgataatccgccgcctagcaaagcggccgagccgagccgatggcgctggcgctggccgggctcccccacgccgcttcccgcctcgtgcctcgtgtccgccagcctcccttccgcgctctctgcgccgcagctgcggccggcgatgcctcgaagcggatgctggtactgtacaccaagccggggtgctgcctctgcgatggactcaaggagaagctccacgccgcgtccatgcttgctggcacgccctactcactcgcgtctctcgaactccaggagagggacatcacgacgaatccggagtgggagcggctctaccagtacgagattccagtgttggccaaggtgctccccgacgggaccgaggaagtacttcccagattatcgccacgtctaagtgttgagctcgtacaaaagaaaatttattttgcgtttgatcagtagggagaccgttctgggggaaacagtaattttattttattaattaatagctccagctgtaagattgccagttgttatattttcatgattttgacacatgaatttcaatttgcttgactt

SEQ ID NO: 28314 - DNA, 1216 bp, Zea mays
  Clone ID: LIB4756-035-G7_FLI
ccggggcaagtgtgcaactgcaacccaactccgccgctaagcctcaagcgaccgcgcgacgcagagccatggccgccacgaggagcacgacggcggtgccggagctggccctgccctccgggaacgcgaggccagtgccggtgattggcctggggacagcggtaatgttccagccgccggagactaccaaggacgcggtgcttgcggccatcgagctgggctaccgccacttcgacaccgcctccttgtacgggacggagaagccgctcggcgagggcgtcgcggaggcggtgcggcgcggcctcatcgagtctcgggaagaggtgttcgtcacgtccaagctgtggtgcacgcagtgccacccggacctcgtcgtcccctccctccggcagaccttggaaaacctgcagatggattacctggacctgtacctaatccacatgcccgtctgccagaagcccgggccgcctgtgttcctggccaggagagaggacgcccgcccgttcgacttcaagggcgtgtggcaggcgatggaggagtgccagcggctagggctcgctagggccatcggcgtcagcaacttcaggaccaagcacctcgacaagatgatgccttttgccaccatcacccctgcggtgaaccaggtggaggtgaacccggtttgccagcagctgaagctgagggggtactgcgccgagaagggcatccacgtccaggcgttctcgccgttgggaggccagagctgggcggcggaaagaaacgccgtgctcgagtccgaggtcctcgcggagatagccaaggcgagagggaagaccgtggcgcaggtgtcgttgagatgggtatttgagcaaggggtgagttttgtcgttaagacctacaaaaaggagaggcttaaggaaaacctcgagatcttcgactgggagttgactgacgaggacagggtcaagatcagccggatcccgcagaagaagctttctggcttcgcattcatgttcatgccggaaggtgagttcacatcggttgatgtctcggagatcaatcctatagaggagtaggcgctaaaggaatgccttgattttgtcaaggccaatttcgcttgatgtagtacctgtatatatttgaataaggcagcattgactgtccgttgttgtgctcaatccttttattacatccgaaatcctgtcatgtaaatcagtaaaaggacgaattttttggg

SEQ ID NO: 28315 - DNA, 1134 bp, Zea mays
  Clone ID: LIB4756-036-C4_FLI
ccgggcggcggcagcacaacatcagaaccttcccaaatcctctcctcccccccccctctcgcgcctcctacctctctccagtcggttcccacgccttgccgcgctttacctctgcggcactcccgttaccatataacccgcgcgccggctccggcgagattcgaccaaactccatggggctcgagatggtggaggtcatgtccgagactgttcctacggttgtgcctgcggcagcgagggagaacggggtggatatttacccgctcagccgctactacttcggcgccagggacgccgccggcgtgccccgcggcctcgagaccgccgctgaccgcgcgctacggctcaaggcaaacttcgcggcgcacgggctccgcacgagcgtccacggcgtcctcttggtggagctgttcgatcacccgcacgtgctgctgctgcaggtccggaactcctccttcctgctccccggaggccgcctcaggcctggcgaggaagaggtccgagggctcaagcgcaagctctccagcaagctctccgttgtcgacgatgcggaggccgttcaagaagaagactggcagattgggcagtgcatcgggatgtggtggagatctgaatttgaggccatcccgtttccctacatgcctccacgattccgtgcggcaaaggaatgcatgaagctgttcctgatcaggctgccgatgtcccggcagttcatcgtgcccaggaacatgaagctcctggccgtgcctttgtcccagattcatggcaatgctcaggtttacggtccaattatagccgccattccgagcatactatccaagttctccttcaacgtcatcagcgactgaattgtggaaaccaaccagaatgttgaggggttagtagacgcatgcatacttggctagttgaagtcatagaacagtgtgcgataccgatgggagcttgtattgagaagtagctcatctgtttttgtttttttttttgtgtgtgcatatgtgtataatgtatcccctcctgggctcttgctgataatgatatgtatgtactgtatgtgtttctcgcgacctgtgtatgaccgtgtgagaaggattcagttctgtacaataactcattttgatttatttttgctcttac

SEQ ID NO: 28316 - DNA, 997 bp, Zea mays
  Clone ID: LIB4756-037-E9_FLI
ccgggaaactgtggatgctattatgaagaagtttcttccagaaaattttacagctatattgttccattatgatgggaatgtcaatgggtggaatgatctaccatggagcaaaagtgtgatacatatagctgcctctaatcagactaaatggtggtttgcaaagaggttcctccatcctgctgttgtgtccatataccagtacatctttctttgggatgaagatctggaagtagataactttagcccgagaagatacttaaatatagttagatcagaagggttggagatatcacaaccaggtcttgactctaagctttctgaaattcatcaccggataactgttcgtaaaaaagcagggacctttcatagagttagccgggctaacaaaaagtgttcaagagaaggaccaccttgttctggatgggtcgagggcatggcaccagttttctcaaagtccgcttggcaatgtgtgtggcaccttatccagaatgatcttatccatggatggggcatcgattacaagtttgggtattgtgctcagggtgacaggacaaagaacatcggcgtagttgatagtgaatttatagttcaccgaggagtgcagacattaggaggttctacaataacaaaggatggtattcgtggcaaaaatgccaagccactcggccagaaagcagctcaaatccaaagatcgagagggagggctccaggccttgatatgcgaacaaagatccggagaaaatcgcgatccgagctccgtgattttcagaagcgctgggaccgggctgcaagggaagacagaacatgggttgatccgtttgcccgctcccgaagaaagcggaagaatagaaacccacagtagatcagcataatcttcactgttacacttgcacataattccgcttgcaccttggatttagagtgtataataattgcataatcaacattgtataaattctcacagacgaaacgagaaccacacacgtgaaattttccc

SEQ ID NO: 28317 - DNA, 700 bp, Zea mays
  Clone ID: LIB4756-038-F12_FLI
ccggggtcggcttcggcttcggctccctccgctgcggtccctccgtgtcgtcgtcctctgccaccattcatcacaccctggtcgctccccctcgtcgaagcttacggatatgctcctcgaccttccctcctccacccgcgcccgccatcgagggtcgtgacgtcagcctctcggtgaccacgcggcggggcagggtgttgccggtgcttaagggatgctccctccttgtcccgcccgggcagctctggatgctcctcggccccaacggctgcggcaagtccacgctgctcaaggttgtgatgcctacagtgggatctgatgtagcatttggtctcggtaagctcaaacttccgttagatgaggtcaggttaagggtatcaaaatctttggatgctgttgggatgttgagctactctcagaggccaatccaaactctgagtggtgggcagaaacagagagttgcaattgctggtgcgttagctgaagcatccaaagtattactgctggacgaactgaccacattcttagatgaacatgaccagataggcgtgataaatgcagtgagggactctgtggctgccgatggggaggtcgccgcattatgggtgactcatcggttggaagagctgaaatatgcagatggtgccatctatatggaagatggccagataatcgttcaaggcgacgtctctaccatacg

SEQ ID NO: 28318 - DNA, 1304 bp, Zea mays
  Clone ID: LIB4756-039-A6_FLI
ccgggaagcaaaccaagacaggccaggtcgtctcgttgcattggagagagcaggtgccatggcagccgctgagatcaagataggccaggtcgacgacgtccaggagctgcaccggacgggcctgcagacggtgccggaccggtacatcagggacggcgacgaccggccggacggcgacaacgtctgcgctgtcgcgcacatcccggtgatcgacgtcaccgagctccagcacgacgacgtcgggctggacaagctcaggctcgcctgcgaggagtggggcttcttccaggttgtgaaccatggcatcgcgcacgagctgctggacgagatggagaggctggcgagggagttcttcatgctgccgctggaggagaaggagaagtaccccatggcgccgggcgggatccaggggtacggccacgcgttcgtcttctccgaggaccagaagctggactggtgcaacatgctggcgctgggcgtggagccggcgtccatccggcagccgaggctgtggccgacggccccggccgggttcggggagaccctggaggcctactccgcggaggtcggggagctatgccggaggctgctcgcgcgcatcgccgagacgctgggcctggcgccggccacgttcgccgacatgttcggcgaggcggtgcaggcggtgcggatgaacttctacccgccgtgcccgcgcccggacctggtcatggggctcagcgcgcactcggacggcagcgccgtcaccgtgctccagcaggacgtgggctgcgccggcctgcaggtgcgcggcaagggcggcgcctgggtgcccgtgcaccccgtcccgcacgccctcgtcgtcaacatcggcgacaccctagaggttctgacgaacggcaggtacaagagcgtggagcaccgtgcggtggccaacggcgagcaggaccggctgtcggtggtgacgttctacgctccggcctacgacgtcgagttgggaccgctgccggagttcgtcaccgacgaggcgccgtgccggtaccggaggttcaaccacggcgagtacagccgccactacgtcaccagcaggctcgagggcaagaagacgctcgagttcgccaagattgatccgctggccgtagagcacgacggcacagctcccgaggaaacctctacctagtactactgtctagctgcatagaatacggtttggtcgatcaagcacaagctgcctctctacctacctgtgctttgcaaatttgcaaaagcaaactacatactgtactaccgaagcatgcagtgccgtatcaatcacctttcttatc

SEQ ID NO: 28319 - DNA, 755 bp, Zea mays
  Clone ID: LIB4756-039-H2_FLI
ccgggcttgctcgctgcgccgccgcctccgacatcgtcccttcgtccccacgagcaaccgataatccgccggcgttgagatgttggtttatcaggatctcctatctggcgacgagctcctgtcggattcattcacctacaaggagctcgagaacggcgtcctgtgggaggtcgagggaaagtgggtcacccaaggtcctgttgatgtggacattggtgccaatccatccgccgagggtggtgaggacgaaagcgttgatgacacagctgtgaaggtggttgatattgttgacacattccgtctacaggagcaacctccttttgacaagaaatcatttgtgtcttacatcaaaaaatacatcaagaatctcactgctgtgttggagccagagaaagcggatgagttcaaaaagggtgtcgagggtgcaaccaagtttctccttagcaagctgaaggacctccaattttttgttggtgagtccatgaaggatgatgcgtctgtggtattcgcctattacaaggatggtgccactaatccgacattcctctatttctctcatggtcttaaggagatcaagtgctaggcgtgcggcgaaattagttacccatgttgggtactatctatgtactattattatatccaaaactatagttgtcctggctgaattgaactcaaaagggtttgtttgagaaaaaattgtcccaagattggattgcttgttaaagctcaatattgttattgaagtgttattgctt

SEQ ID NO: 28320 - DNA, 553 bp, Zea mays
  Clone ID: LIB4756-039-H3_FLI
ccggattccaccaatctcccttactatcgtccttatgagctttctcgccgcttcaatcaagcgtagttctttattatcaattgttcgacccattgcgaaacgttcatccgtacccgcccgcgacatgcatattcaatcgattcccatgtgggagggcacgggcaacaactatgcctatctagtgtccgatgataagaccaaggaggctgtgatcatcgatccggcaaacccctcagaggtactacctgttttgaaagagcaaaccactactggaggtctcaaattgacaaagattatcaacacccaccatcaccatgatcatgccggaggcaacactgaaatcctcaaagctttcaaccttccaataattggcggacgtgactgcgaaaaagtctcaactacgcctgcccacaatgacaccttcaacatcggctccatcaatgtgaaggcactccacacgccatgccacacccaagacagtatttgcttcttcttcgaagacggcaacgaccgtgtcgtcttcacaggagacacattgttcatcggcggatgc

SEQ ID NO: 28321 - DNA, 774 bp, Zea mays
  Clone ID: LIB4756-040-C11_FLI
ccgggaccactcctcttcgcaacccatctaccaaacgctacttcacaccttcagccttcaacatgggtatcaagacttacttcgacgtgtcctggcagggccctgagatccagatcgatggcaacggcgccgtcacttccactggcgccgtgaaggaccaaactggccgcatcaacttcgagctctacgacgatgtcgtccccaagacggctgagaacttccgtgctctctgcaccggcgagaagggcttcggctactctggctccaagttccaccgtgtcattccccagttcatgcttcagggtggtgacttcacccgcggcaacggtaccggcggcaagtccatctacggcgagaagttcagcgacgagaacttcacgcgcaagcacgaccgccccttcctcctgtccatggccaacgccggccccaacaccaacggctcccagttcttcgttaccacggtcgtgacgtcgtggctcgatggcaagcacgtcgtcttcggcgaggtgtctgaccaggagtccaagcgcattgtcaagtcgatcgaggccactggcagcaacactggcacgatcaagttcaagaacccccctaccatcaccggtgccggtgtggcttaagcgtgcatagcacagatgggggtggatcatagcaaggcaacagtcttccgagtgctatcagtagcccttgtgcggggcaactgagcggacacaaaagttcgatggcaggatttgatagtgcttaatgaatggcagcttatactttgatcaccag

SEQ ID NO: 28322 - DNA, 1270 bp, Zea mays
  Clone ID: LIB4756-042-D4_FLI
ccgggatcaaatccggatgcacgatgatgcacccgctctgaacccaacccaccgccatttctatacccctctcgccctgcgcctcgtcacctctctgatccctctcctcttgctttgatgctttctctctccatctcgtttcccccgcctgcccagccagcgcaaaccctagcccgtactgcgaggctcttggcagcggataactggacctgtccgcatgaatcgggggagagaaactggcggtaacttacgtgaatcgggtttgtttagtggctgcgacggcgacggcggcgcagggatggaccgtaagcgcattaaggacgtgctcgagaagcacctggagaggtcgtcgccgtccacctccaggggcgtcgtgtccaaggagagggagcgcctcgctgccgggaaactgccggcgtcgcttggcaaggcggagaaggtgtctgatggtgaggaatttgaaactgacagtgaagatgaagattctgatatcagtggttctgagagcgagggcacatcctggatttcatggttctgtacattgcgaggcaatgaattcttttgtgagatcgatgatgactatatacaggatgattttaacctttgtggtctgagtatgcaggtgccatattatgattatgcacttgatctcatcttagacattgagtcttctgatgatacatacactgaggagcgaaaagaatttatcgagttgtctgcagagatactatatggattaattcatgcacgatacatcttaaccagcaagggtctagctgcaatgttggagaagttcaagaatcgtgactttggtggatgccccagagtgtactgctgtggccagccctgtcttccagcaggtcaatcggatgttcctagatcgagcacagtgaagatatactgtccaaaatgcgaagaacttaactatccaatatccatgtaccaaggcagcattgatggatcatacttcgggacgacgttccctcatcttttcctgatgacctatccgcacttgaagccgcagaagccgccacagcaatacactccaagagttttcggcttcaaacatcacaagccgtcatgacagagctgcactttcagcagaaacaccctttgcacctaggatttagggagagcaccgtggccttcaaatattgttgcctgatcgatgtacgaattcgcgaccttgggtcctgctgcaaactgctgtcaaattgtacgtatctgttttctcgtattactattgcgtaacttaggttttctcagtccc

SEQ ID NO: 28323 - DNA, 840 bp, Zea mays
  Clone ID: LIB4756-042-E10_FLI
ccggggaaaaaaaaaaaaaaaaaaacgcatccatctaccacacaaaaacttcatatttgttcatttgtctccagcaatataatggattactcgtctactagggtcgtcgtgtgtttagctctggcgttggccatggtcgccgtgatgccgtgcgcggcccagaactcgccgcaggacttcgtgaacccgcacaatgcggcgcgcgcggccgtgggcgtcggcccggtgtcgtgggatgagaacgtggccgccttcgcgcggagctacgccgcgcagcgccagggcgactgcaagctggtgcactccggcggcgggcccaaccactacggggagaacatcttctggggcggcggcagcgcctggaaggcgtcggacgccgtcggcttgtgggtgggggagaagcagaactacgattacaacagcaacagctgcgcggcggggaaggtgtgcggccactacacgcaagtcgtctggcgcaaatccaccgccatcggctgcgcccgcgtcgtctgcaacaacggcggtggcgtcttcatcacctgcaactacaacccgccgggcaacttccgcggacagagaccctactagctacctagctagctagttccaatatcgattatacgcgtacatatactctacatgcatgttcagatcgatgatatatatacctcgcgtgcatgctaccgattgaataaaccacaaactaagcttaggccaccagttgattaggtttaaagtgaacctactcacccaggtttaagtgaagtgtgcatacatgtatgtgtatgttctgtgtggggtgtgacagtttgtttggtgtttcataaaataaataaatgt

SEQ ID NO: 28324 - DNA, 945 bp, Zea mays
  Clone ID: LIB4756-044-H3_FLI
ccggacctaaactgacttccaattgagcatacttgataccctcacatattctttctagctagtttgtataaaaacagccgccaaaatgggtcgccaattcttcgtcggtggaaacttcaagatgaacggtacgatcaagtcgatcaccgaaatcgtcgacaacctgaacaaggccaagctcgacgagaacactgaggttgtcattgcaccaccatctctctacctcctcttgacccgcgaacacctccgcaagggaatcgaggttgcagcacaaaacatctttgacaagcccaacggcgccttcaccggcgagatctcagtcgaacagctcaaagacagcggtatcacctggactatcctgggtcactctgagcgccgccagatcctacaggagaacgatgacttcgtcgccagcaagacaaaggcagcagttgacggtggtctgggtgtaattctgtgctgtggtgagagtctggagcagcgtgaggcgggtgaaaccgtcaacgttgttaccaagcagctcaaggccgttgccgacaaggttaaggactggagcaagatcgtcgttgcttacgagcctatctgggctattggtactggcaaggttgctaccactgagcaagcccaggaagtccacgccgctcttcgtgagtggctcaagaaggaggtctcagcagaggcttccgagaagacccgtatcctatacggcggaagtgtctcggagaagaactgcaaggagcttgccaagcggcccgacattgacggtttccttgttggcggtgccagcttgaagcctgcgtttgttgacattatcaacagccaccaggcatgaatcccccggagcgatgctcgtctatagctgacggaagctcgcaccggaaggaaaatgatgaagttatgagaaatagatctttgccagaaaccacataggttggagcataaaag

SEQ ID NO: 28325 - DNA, 1123 bp, Zea mays
  Clone ID: LIB4756-047-D11_FLI
ccgggattccgtcgtcgtcgtcagcagcttctgcttgctttgtgggggaaggagagagagagagagcgagagagagatctagtagagaggctagtaggtggtcctcgaacgaagatgttggcggtgttcagcgggcaggtggtggaggtgccggcggagctggtggcggcgggcagccggacgccgtcgcccaagacgaaggcgtcgcagctcgtggggcgcttcctggccgcctccgagccggccgtgtccgtgcagctcggcgaccacggccacctcgcttactcccacaccaaccaggcgctcctccgccccaggtcgttcgcggccaaggacgaggtgttctgcctgttcgaaggggtgctggacaacctgggtcggctgagccagcagcacgggctgtcaagcaagggcgccaacgaggtgctcctcgtcatcgaggcctacaagacgctgcgcgaccgcgcgccctacccggccagcttcatgctcgcccagctcaccggctcctacgccttcgtcctcttcgacaagtccaccaactccctgctcgtcgcatccgaccccgagggcagggtgccgctcttctgggggatcaccgccgacggctgcgtcgccttctccgacgacatcgacatgctcaaaggctcatgcggcaagtcgctcgcgccgttcccgcaaggctgcttctactccaacgccctcggagggctcaagtgctacgagaaccccaagcacaaggtcaccgctgtccccgccgacgaagaagagatctgcggtgccactttcaaggtggtggaagggtctactgtcctgacggcgctgcactgatcgatcatcagctggcggaggcgatgccatgatgatgatgcagaactttgtacatgcgttggtggatggtggtgtaacatagtggctgccaacaagtcatgctcatgcaaaccgatgaatctatctctgtatcatcgatctcggttgcttgctagtccagactccagacatggctatatatatatagctggtgctaataaataggagtataatcgtcatatcgatcggttgcgtgtggaatgccaatcatgtgtgtaatctgttggcaaataacaaacctctgttcctccac

SEQ ID NO: 28326 - DNA, 613 bp, Zea mays
  Clone ID: LIB4756-047-D2_FLI
ccgggctcctccattttccccacctactacttcctctgctcgcggctcgccttcgtcggatcggatccacagcaagcagcaacagcctgcagccggcagtcctcgcctccgcctcctccaccctgaccgtcaacagaggaagacgaggatgtcgggatccaaggtgtacaccctcgaggaggtggctaagcacaacaccaaggacgactgctggcttgtcatcggcggcaaggtgtacaatgtgaccaagtttctggaggatcaccctggaggcgatgatgttctgctgtcttccactgccaaggatgctaccgatgatttcgaagatgtggggcacagcagcactgcccgtgcaatgatggacgagtacttagtgggtgagattgatgcagccacgatacccaccaaggtgaagtacacgccccccaagcagccgcactacaaccaggacaagacccagttttttggtccccctcgcaatactgggtctggccgtcgctgtaaggatgtacaccaagtcggaatctgcctagtctcttgtcatcaacgcttcaaacatcattcacaaactgaataagttagtgttgaaatgctgcaaagatcattaaaaaag

SEQ ID NO: 28327 - DNA, 731 bp, Zea mays
  Clone ID: LIB4756-048-D9_FLI
ccgggaacccttcgctgcgccgccgcctccgacatcgtctcttcgtccccacgagcaaccgataatccgccggcgctgagatgttggtttatcaagacctcctatctggcgacgagctcctgtcggattcattcacctacaaggagctcgagaacggcgtcctgtgggaggtcgagggaaagtgggtcacccaaggtcctgttgatgtagacattggtgccaatccatccgccgagggtggtgaggatgaaagcgttgatgacacagccgtgaaggtggttgatattgttgacacattccgtctacaggagcaacctccttttgacaagaaatcatttgtctcttacataaaaaaatacatcaagaatctcactgctgtgttggagccagagaaagcggatgagttcaaaaagggtgtcgagggtgcaaccaagtttctccttagcaagctgaaggaccttcaattttttgttggtgagagcatgaaggacgaagcgtccgtggtattcgcctattacaaggatggtgccactaatccgacattcctctatttctctcatggtcttaaggagatcaagtgctagattagttacccatgttgggtactatatatgttctattgttatagccacaactatagctgccctgcctgaactgaactcaggttttttttaagaaaaaactgtccaagattggattgcttgttaaagctaaatattgttattgacgtg

SEQ ID NO: 28328 - DNA, 713 bp, Zea mays
  Clone ID: LIB4756-048-F3_FLI
ccgggctaccccggccattcactcacctagctagtcatcactactcacgttcgtccaccagagcagacaacaatggccatggagacgtgcttcagagcgtggacgctgcacgcccccgctggcagcaaggaccggctcctcgtcggcaacctggtgctgccgtcgaagcgggcgctcgcgccgctgtccgtcggccgcgtcgccacgcgccggccgcggcacgtctgccagtccaagaacgcagtggacgaagttctggtggcggacgagaagaactgggacgggttggtgatggcgtgcgagacgccggtgctggtggagttctgggcgccgtggtgcgggccgtgccggatgatcgcgccggtgatcgacgagctggccaaggactacgccggcaagatcacgtgctgcaaggtgaacacggacgacagccccaacgtggcgtccacctacggcatccgcagcatccccaccgtgctcatcttcaagggcggcgagaagaaggagagcgtcatcggcgccgtcccaaagtccacgctcaccaccctcatcgacaagtacatcggtagctcatgagcatgccatgccatgccatgcatcgacgactaaacacatatgtgtatctctagtagcctttgcatacgggatatgatcaattcaagcagccagccgtctgctactgctgtgttatatataccatacctccatgtcgg

SEQ ID NO: 28329 - DNA, 852 bp, Zea mays
  Clone ID: LIB4756-049-D12_FLI
ccgggagggctcggccgccgcctaggccgcccactcccagaggctcttctcctcctcgcctcctctccctagcctccacgacgcaagggagagtgacggaaagcgacgcggcgcgagcgaggagggccaaggggaagaggggaagcaccgcaccaggacccttgttcgccgccgtcgcctctgatctccgcgaggttgtcaggattcaatatgtcgaccagcacattcgctacttcctgcacgctgttgggcaatgttagaacaacgcaggcctcccagacagcggtgaagagcccttcgtctctaagcttcttcagccaagttacgaaggttccaagcctgaagacctccaagaaactggatgtctctgccatggctgtctacaaggtgaagcttgtcgggcctgaaggtgaagagcacgagtttgatgctccagacgacgcctacatccttgacgcagccgagactgccggtgtggagttgccatactcgtgccgtgctggggcttgctccacctgtgctggcaaaatcgagtctggttcggttgaccagtcggatgggtccttccttgatgacgggcagcaggaggaaggttatgtgctgacatgcgtctcctacccaaagtccgactgcgtcatccacacccacaaggaaggcgacctgtactagggctagggctttccaatttggcgagggacaaaaaatgctctcgagtggtgtgttgtcaagcaaagctccatctgcgccctaccccgttgtgcgaactgtttggcatcaaacttgtgtggttgctgtcttctatgttctgctagtttatgttcggagtccgtgggaatatactagctaattaat

SEQ ID NO: 28330 - DNA, 832 bp, Zea mays
  Clone ID: LIB4756-049-E9_FLI
ccagtttgcagcagcaggagtcctcaccggccttctcgctctcgcaacacttgcaagctgcaacactgatggcgacatactgtacaagcagaggctagcatgggaggatccaaacaacgtgctgcagagctgggatccaaccctcgccaatccctgcacgtggtttcatgttacctgcaacctgaacaactccgtcgtccgtgtggatttgggaaaggcaggcatctccggccccctgcttccagatcttggagcacttgagagcctccagtacatggagctgttcggcaacagcctgaacggttcgattccggcaacgctgggcaacctgactgatctcatcagcttggatctctgggacaacctgcttaccggcccaatcccaactacgcttggttccatcagcacgctgcaatatctgaggttgtacgagaacaacctgacagggcctataccaccatcgtttggcaatctgactagccttctggaactgaagctccacaggaattcgttgagcggttcgattccggcctcccttggcaacatcaaatcgctgcagttcttgaaattgaacgagaatatgctgaccggcacggttccatcggaagtcctctcccttgtcgttgttggcaacctgaccgagctaaatattgcaagaaacaaccttgatggcactgagagatcatccgggcttagagtgactgcggttatccaggacatgaggactgcatgatatggcttgaagagtcctggatcaaggctttattttaatttgcttcatgtagacaccggaaataaatgaataattgcaatggatgcattggccttgatt

SEQ ID NO: 28331 - DNA, 1411 bp, Zea mays
  Clone ID: LIB4756-049-G12_FLI
ccgggagctgcggacttgtccacatctattccttccttgttcggccgcccttcctcagttggggaaggacgacccaagggaggaggaggaggaggacagtgccgccatgaccggaggaggggaggagcaggggaggtcgctgttcggcgtgtctctgacaaacaggcccaggtggcagcagttcttgatctgctcctcgggcttcttcttcggctacctcgtcaatggcatctgcgaggagtacgtgtacaacaggcttcagttcagctacggctggtacttcacgttcgtgcaggggttcgtgtacctggcgctgatacggctgcaggggttcacggtggagcagatggtgaacccgtggcggacctacgtgcgcctctcggcggtgctcatgggctccaatggcctcaccaagggctccctcgccttcctcaattaccctgcacagatcatgttcaagtcaaccaaggttctaccggtgatggtgatgggagccttcatccctggtctgaggcgcaagtacgcgttccaagagtacgtgtcggccgtgatgctcgtcgtcggcctcatactcttcacgctcgcggacgcgcagacgtcgcccaacttcagcatggccggcgtggccatggtgtccggggcgctcgtcatggatgctttccttggcaacctgcaagaagcaatcttcaagatgaacccggacacgactcagatggagatgctgttctgctccactgtcgttggcctcccgttcctagcggtgcccatggtgttaacaggagagctcgtgacggcttggacttcctgctcccagcatctgtacgtgtacgcggtgctggtgttggaggcgatggccacgttcgtcggccaggtctccgtgctctccctcatcgcgcttttcggtgcagcaaccacagccatggtgacgacggcgaggaaggcggtgacgctgctgctgtcgtacctgatattcaccaagcccctgacggagcagcacgcgacggggctcctcctcataaccatgggcatcgtcatcaagctcctgccggagaacaaggagggacgcccgcgccggtcgcccaagaatgacgacgacgacaagccccgggagggtagagaagcgggggaggaaacagcatgactgctatagacccgacacccgagcaaagcagaactgacgccagctcgatcagcaaccgcaaccctagaagaaattctcagtcctccaaaacagcaatcccaggaggacgatgggatatacatgcaggatagagcactacatacagacacagtaataataacctttttcctcgctcctcccctcgcttttctcatgtgttgtggttaatgttaattgtgcacttcgctctaacatcttaatctttttttaaaggcaagggccagaagtccg

SEQ ID NO: 28332 - DNA, 601 bp, Zea mays
  Clone ID: LIB4756-049-H12_FLI
ccgggactgacgagctcgccatggcctccctctcctctgccgccgtcaccgccccttccttcgccgcaccagcgccagcccgcgccgtggtcagaaggaggtccttcaccgtgcgcgcctctctccgcaaggccaccggcaccgccgccgtggcaatggctgccagcgccctgcttgccggcggtgccatggcccaggaggtgctgctgggcgcaggcgacggcgggctcgtcttcgagcccagccagttcaccgtcaaggccggcgacaccatcacattcaagaacaacgccggcttcccgcacaacgtcgtcttcgacgaagacgaggtgccgagcggcgtcgacgccaccaagatctcgcaggaggagtacctcaacgcgccaggcgagacctactccgtcaccctcaccgtgccgggaacctacggcttctactgcgagccgcatcaaggagccggaatggtcggcaagatcaccgtcaactaattaagctagctatcgatcgatatccattcatgtattagctgttgcttcctgctttgtactccgccgatctgtccatctctacatgttttcgtcttcacacaacaacctctgcg

SEQ ID NO: 28333 - DNA, 965 bp, Zea mays
  Clone ID: LIB4756-051-B6_FLI
ccgggaaccctcaatctttcaatctctcaaacatcagctctgatcttccgaactttgcgaaaaactcatcgcagagcccccctaaaccagtcctagtccccataccccacgtcaaaagtatcaccaccacaaccaacaatggccgaaggacgctctgagcccctccgcctgggcagcaccgcccccaatttcaaggccgaaaccaccgccggccccatcgacttccacgagttcatcggcgactcgtgggccatcctcttctcccaccccgcagaccgcacccccgtctgcaccaccgaacttggtgccttcgcaaagctcgaacccgaattcgcgcgccgcaacacaaagctcatcggcctgtccgccgactccatcgagtcgcacgacgagtgggtcaaggacattgacgaggtcactggcagcaacctcaagttccccataataggcgacaaggagcgcaaggtcgcgctgctgtacgatatgctggaccaccaggatgccaccaatgtcgatcagaagggtattgcgtttacgattcgctcggttttcatcatcgatcctaagaagactattcgcttgattctgagctacccggcgtccactggtaggaataccgccgaggttctgcgtgtgctggattctctgcagacgggtgataagcacagggttaccacccctattaactgggttcctggtgatgatgttatcgtccacccatccgtttccaacgagcaggccaaggatctcttccctgacttccgcatcgtcaagccttacctgcggttcaccccgcttgcaaaggagaagaccagcgcggcttaagtgcctgacaagctggggaggacttggaggagaagtgtctagatgttttgggcaagcctaggaatttattttcatcctttgtaggacctgggccatgatattaaattgatcatgataatgaaatacatatattcccaaag

SEQ ID NO: 28334 - DNA, 990 bp, Zea mays
  Clone ID: LIB4756-052-B3_FLI
ccgggatcacaaacccaagaaagaaaagaaaaaaaaggccgcgacgagccgacgagagcaacgacgaccatggcgacgatggtcgcttcttcctgccacgggcaacttctcctgtttctcctcgtggccgtcgcgtcggcctgcctcggctccgcggcagcgcatcaagccggatctggagagggctacacgatagctggccgcgtcaagatcgatggcatgagcgtgaagggctttggtcttgcaacaaagacatcaaacacaaaagtgatacttaatggcggccagagggttacatttgccaggccagacggctactttgcattccacaacgtgccagctggaactcatctgattgaggtctcctcaattggttacttcttttccccagttcgagtagatatcagtgcaaggaatcctggttatattcaagcagcattgactgaaactagaagagttctaaatgagcttgtcctggaacctctgaaagaagagcagtactatgaggttagggagcctttctccgtcatgtcacttttgaagagtcccatggggttgatggttggttttatggtcttaatggtctttgtgatgcccaagatgatggagaacatagatcctgaggagatgaagcaagctcaagagcaaatgaggaacaaccccgtatcattgtctggcttgctagccagagcgcagggctagaagtagcacatgaggatgctgcaagggtctagattctataatgtgtttaatggcagtactgaagtgcttgacatgccatgtcactcggagtaatttcctggggacaaggtggaaactctttcccctgtttttactgtattttaacttgcagtttttctgttatgtagaaccttctgaaacctctagctgagctagtcatttggcacgtcatataccacacattgagatattcttgttcaatttgtattgtatgaatcagctgaatctaacacattgattagtcatccc

SEQ ID NO: 28335 - DNA, 1016 bp, Zea mays
  Clone ID: LIB4756-052-E1_FLI
ccgggaacccctcacactcccatccagccgccaccaggtgcagagtctttcgtcatctcttctccggcgaagaacccccagtcgcccaccagatcacttgttaaactttgttgaggggtgatggcggtttctttcgcaaacctcaactccgaggcagggcttaaaaagcttgatgagtaccttctcactcgcagctacatcactggctaccaagcttccaaggatgacttggctgtctacacttcgttttcggctgctccctcgtccaagtatatcaacgtagcaaggtggtttaaccacattggtgcgctcgtgaggctgagcggaattactgcagagggccaaggtgtgaaggttgaatcctcagcagttccttcagccccaactccagatgttgctgaagcacaggccccagttgctgaggaggacgacgacgatgatgttgacctttttggtgaggagaccgaagatgagaagaaggctgctgaagagcgtgctgcagctgccaaggcttctggcaagaagaaagaatctgggaagtcatcagttttacttgatgtgaagccatgggacgatgagactgacatggccaagctcgaggaagctgttaggagtgtccagatggaagggctgctctggggcgcatccaagcttgtcccagttggatatggtatcaagaagctgcaaatcatgatgaccatcgtcgacgaccttgtctctgtcgacactctcattgaggactatctgtgcgctgagccagtgaacgagtacgtgcagagctgcgacatagttgccttcaacaagatctaggcgtgacttccgatcagtccttctcctggggtgctggcgatggtggtggctgggcaatgcaccagcctaatttatccatagctatatgtctgctttgtgtggccagtgatattgccgtgagtatttttggatcctattcgagtcgaatgtaccagtaccagagttaatttgctttaattcgaaacaccgttccagttggaattcag

SEQ ID NO: 28336 - DNA, 712 bp, Zea mays
  Clone ID: LIB4756-053-D12_FLI
ccgggtttcagccgatcaccacaagacaccatgggaagacgtccagctagatgctaccgttactgtaagaacaagccttacatcaagtcacgctactgccgtggtgtgcccgaggccaagcttagaattttcgatcttggaaagaagaaggctcacgtcgacgagttccccgtctgcgtccacatggtctctttagagttcgagcagctttcctctgaggccctcgaggctgcccgtatttgcgccaacaagtacatttctaagttcgccggaaaggatggtttccacatgagagtccgtgtgcacccatggcacgtactccgcatcaacaagatgctttcctgcgctggagctgatagactccagactggtatgagaggagcttttggaaagccctgtggagttgttgctcgtgtagacattgagcaagtcctcatctccatccgtaccaaggagtccttcaaggctgccgcctgcgaggccctcagacgtgccaagtacaagttccccggaagacagaagatcctcgtctctaagaactggggattcaccaagttccacaaggaggagtacaatgagctcagagcctcaggaaagatcgttcccgatggagcccactgcaagctcatctcccagcacggacccatcaccaagccccacgctcactaaacgaagacatcgatcccaggtgcctttatataaacgctggacg

SEQ ID NO: 28337 - DNA, 951 bp, Zea mays
  Clone ID: LIB4756-054-G4_FLI
ccggggcgggccgccagaggcaatttcgccctcgattcgaccccgattcgtccgcccgcgaccgggattccctccgccaagcgcggatctgaacgctgcgctccgtgtcgccgctcgaatccgccatgaagggggccaaatccaagggcgccgccaaggccgatgccaagctggcggtgaagagcaagggggcggagaagcccgccaagggcaggaaagggaaggccggcaaggaccccaacaagcctaagagggctcccagcgctttcttcgtgttcatggaggaatttcgcaaggagttcaaggagaagaaccctaagaacaagtctgtcgctgcggtggggaaagctgctggcgacaggtggaaatccctgagcgagtcggacaaggctccctatgtagccaaggctaacaagctcaagctcgagtacaacaaggccatcgctgcctacaacaagggcgagagcactgcagctaagaaggctcctgccaaggaggaagaggaggaagatgaagaggagtctgacaagtccaagtcggaggtcaatgacgaggatgatgaagagggtagtgaggaggatgaagatgatgacgagtgatggagctcctcgagacaatggaccgtgcttcatccaacaatggagcggctacacaaggccccgtggcgatcacaaaaaaggagcctatatccatgtactagaattattcagtttcactccacatcgtgatgttttatttttacttttgtcgtgctataacggatagcgctcctcgttggcgccactggcgggtggttctgcctctggtctggtgtgtttgtgtgtggtcacacttgccagccagcagaggcgcctgcttgtacctagattactgtttccattgtcgtcatcatcggctaacattgtcataatgtcagtttgggtaatgttagattaagtaattattgtgttg

SEQ ID NO: 28338 - DNA, 1116 bp, Zea mays
  Clone ID: LIB4756-054-H3_FLI
ccgggattccgtcgtcgtcgtcagcagcttctgcttgctctggggggaaggagagagagagagcgagagagatctagtagagaggctagctaggtggtcctcgaacgaagatgttggcggtgttcagcgggcaggtggtggaggtgccggcggagctggtggcggcgggcagccggacgccgtcgcccaagacgaaggcgtcgcagctggtggggcgcttcctggccgcctccgagccggccgtgtccgtgtagctcggcgaccacggccacctcgcctactcccacaccaaccaggcgctcctccgccccaggtcgttcgcggcgaaggacgaggtgttctgcctgttcgagggggtgctggacaacctgggtcgtctgagccagcagcacgggctgtcaagcaagggcgccaacgaggtgctcctcgtcatcgaggcctacaagacgctgcgcgaccgcgcgccctacccggccagcttcatgctcgcccagctcaccggctcctacgccttcgtcctcttcgacaagtccaccaactccctgctcgtcgcatccgaccccgagggcagggtgccgctcttctgggggatcaccgccgacggctgcgtcgccttctccgacgacatcgacatgctcaaaggctcatgcggcaagtcgctcgcgccgttcccgcaaggctgcttctactccaacgccctcggagggctcaagtgctacgagaaccccaagcacaaggtcaccgctgtccccgccgacgaagaagagatctgcggtgccactttcaaggtggtggaagggtctactgtcctgacggcgctgcactgatctatcatcatcaggcggaggcgatgcgatgatgatgcagaactttgtacatgcgttggtggatggtggtgtaacatagtggctgccaacaagtcatgctcatgcaaaccgatgaatctatctctgtatcatcgatctcggttgcttgctagtccagactccagacatggctatatatatatagctggtgctaataaataggagtataatcgtcacatcgatcggttgcgtgtggaatgccaatcatgtgtgtaatctgttggcaaataacaaacctctgttcctccac

SEQ ID NO: 28339 - DNA, 945 bp, Zea mays
  Clone ID: LIB4756-057-E5_FLI
ccgggaacaccagccgtattgtcccgaccccgaccgatcctcgcctgctgcagccatggcgacctccgcggcgctctctaccgccgccaatcccacccagctctgccggtcccgcgcttcgctgggcaagccggtgaaggggcttggcctgagcatgggccgcgagcgcgcccagcggagcattgtgtgccaggcggcgagcagcatctccgccgaccgcgtccccgacatggagaagcggaagctgatgaacctcctcctcctcggcgccatctcgttgcccaccgtcggcatggtcgtcccctacggcgccttcttcgtccctgccggctccgggaacgccggcggcgggacctacgcgaaggacaagctgggcaacgacatcacggtggaggcgtggctcaacacgcacggtcccaacgaccgcacgctcgcgcagaggctcaagggtgaccccacgtacctggtggtggagcaggacaagacgctggccacctacgggatcaacgccgtgtgcactcacctcggctgcgtcgtgccgtggaacggcgccgagaacaagttcatctgcccatgccacggatcccagtacaacaaccagggcaaggtggtccgtggaccggcgcctctgtcgctggccctggttcacgccgacgtcgacgacggcaaggtcctcttcgtcccgtgggtggagaccgacttcaggaccggcgaggacccgtggtggaaggcatgaggatgatccgaaaccagcggtgctcagtgctcacacatgagacctacgtatgcctccgttccttgtgatgaggaaatatgcttgcgttcgttctccgtgggcgttgttcctacaaattcacttgctttctgtctctctctctatatacacactgtataaaacaagaacagctgtttatcatctcttcttatataaccttttgaaaaaag

SEQ ID NO: 28340 - DNA, 583 bp, Zea mays
  Clone ID: LIB4756-058-C9_FLI
ccgggactgacgagctcgccatggcctccctctcctctgccgccgtcaccgccccttccttcgccgcaccagcgccagcccgcgccgtggtcagaaggaggtccttcaccgtgcgcgcctctctccgcaaggccaccggcaccgccgccgtggcaatggctgccagcgccctgcttgccggcggtgccatggcccaggaggtgctgctgggcgcaggcgacggcgggctcgtcttcgagcccagccagttcaccgtcaaggccggcgacaccatcacattcaagaacaacgccggcttcccgcacaacgtcgtcttcgacgaagacgaggtgccgagcggcgtcgacgccaccaagatctcgcaggaggagtacctcaacgcgccaggcgagacctactccgtcaccctcaccgtgccgggaacctacggcttctactgcgagccgcatcaaggagccggaatggtcggcaagatcaccgtcaactaattaagctagctatcgatcgatatccattcatgtattagctgttgcttcctgctttgtactccgccgatctgtccatctctacatgttttcgtctc

SEQ ID NO: 28341 - DNA, 700 bp, Zea mays
  Clone ID: LIB4756-058-E9_FLI
ccgtctcgatcccagcatccgagagagctccacaggccaggtccccatcgccgcggcgcttgccccacctctcccccgcccggtagtagcctcgccgccgttgccgagatggggttcgtgtccttcgtcgggagggtgctcttcgtcgccgctttcctcctctccgcctaccaggagtttaatgaattcggtgctgatggtggaccagcagctaaggcccttcggcccaaattcaacgtgtttgtcaaaaatgtatctgctcatctgggagtagctgtgccacacattgagctgctgtaccttgctttgatcactcctatcatccatgacttctacaactacgatatggagaaggcagaatttgcaggcctctttgcgaagttcacccaggatttggcgctgattggagctctgctcttctttctgggcatgaagaactccatcccgaagcggcagggcggcaagaagaaggcccccaaggcgaagacgaactagggctgcttagatagctgcacgcctcaggtggggtgtatcaggagacaggtctatttcgaagcaggctcagcgcgatgcagcgaatgccatcgagctgcgcttttacatgtttatcatcagattccattttgcggcccgaacaaaggtgtgaccggggtgggttaggcgactagattgcacgattatgtacttgagatttgtttgt

SEQ ID NO: 28342 - DNA, 851 bp, Zea mays
  Clone ID: LIB4756-058-G12_FLI
ccgggggccgcccggagaccgagcgaggcaggcaactaaccaccgagaggcagggacaggaacaggaagccggaggcgaagatgtcgtcggtgttcagcggcgatgagacggcccccttcttcggcttcctcggcgccgccgccgccctcgtcttctcatgcatgggcgccgcgtacgggaccgcgaagagcggcgtcggcgtggcgtcgatgggtgtgatgcggccggagctcgtcatgaagtccatcgtgcccgtggtcatggctggtgtgctcggtatctacgggctcatcatcgccgtcatcattagcacggggatcaaccccaaggccaagccctactacctctttgatggctacgcccacctttcgtccgggcttgcctgtggtctcgctgggcttgcagctggcatggccatcggcattgtcggtgatgctggagtcagggcaaatgcgcaacagccaaagcttttcgtcggcatgatcctcatcctcatttttgcagaagcgcttgctctctatggtctcattgttggaattatccttccgtctcgcgctggtcaatcccgggcggattaagtgcaccaccattctgtgattaccgcaccgtttattatgctattctgagagaattggaactctattcccttgtctagtttattctcgttaccatgtattaatgtaacaatctgtagctgaaggaaggtgacttccagtccagtcatgttttggttttggtggtgtcgagcagaggttattttttttttttttgggttaaggttggatggatgcttttgggctaagtggatttgattttatccttgctgaataaagaacacggaattgtagcc

SEQ ID NO: 28343 - DNA, 591 bp, Zea mays
  Clone ID: LIB4756-059-D9_FLI
ccgggactgacgagctcgccatggcctccctctcctctgccgccgtcaccgccccttccttcgccgcaccagcgccagcccgcgccgtggtcagaaggaggtccttcaccgtgcgcgcctctctccgcaaggccaccggcaccgccgccgtggcaatggctgccagcgccctgcttgccggcggtgccatggcccaggaggtgctgctgggcgcaggcgacggcgggctcgtcttcgagcccagccagttcaccgtcaaggccggcgacaccatcacattcaagaacaacgccggcttcccgcacaacgtcgtcttcgacgaagacgaggtgccgagcggcgtcgacgccaccaagatctcgcaggaggagtacctcaacgcgccaggcgagacctactccgtcaccctcaccgtgccgggaacctacggcttctactgcgagccgcatcaaggagccggaatggtcggcaagatcaccgtcaactaattaagctagctatcgatcgatatccattcatgtattagctgttgcttcctgctttgtactccgccgatctgtccatctctacatgttttcgtcttcacacaag

SEQ ID NO: 28344 - DNA, 739 bp, Zea mays
  Clone ID: LIB4756-060-H6_FLI
ccgggccttcgctgcgccgccgcctccgacatcgtctcttcgtccccacgagcaaccgataatccgccggcgctgagatgttggtttatcaagacctcctatctggcgacgagctcctgtcggattcattcacctacaaggagctcgagaacggcgtcctgtgggaggtcgagggaaagtgggtcacccaaggtcctgttgatgtagacattggtgccaatccatccgccgagggtggtgaggatgaaagcgttgatgacacagccgtgaaggtggttgatattgttgacacattccgtctacaggagcaacctccttttgacaagaaatcatttgtctcttacataaaaaaatacatcaagaatctcactgctgtgttggagccagagaaagcggatgagttcaaaaagggtgtcgagggtgcaaccaagtttctccttagcaagctgaaggaccttcaattttttgttggtgagagcatgaaggacgaagcgtccgtggtattcgcctattacaaggatggtgccactaatccgacattcctctatttctctcatggtcttaaggagatcaagtgctagattagttacccatgttgggtactatatatgttctattgttatagccacaactatagctgccctgcctgaactgaactcaaaggttttttttaagaaaaaactgtccaagattggattgcttgttaaagctaaatattgttattgacgtgttattgctt

SEQ ID NO: 28345 - DNA, 1217 bp, Zea mays
  Clone ID: LIB4756-061-A2_FLI
ccggggagatacttgaagcctcaccagaccacaaggagggatattcgcaggaccagcagcacccgaggacgaggtgtgtggagaggctgctctgccataccaaaaagcagacagaggaccaaggaaggaagcagggatccggctttgctctgcaaccatgagctccctgtacgacgtctcctgcttcgccgctggccttgctggcaacgtcttcgccctcgccctcttcctgtcgccggtgtaagctgctagccagcaccctcaccgtttctttaatttccttttttcgtctgattgttctggttgatcctaagggatgcaccgctgacgaatgcgttgctgctgctgctcgcctgctcctcgctttctgcacgccgtcctccaggccgacgttcaagagggtcctcaaggccaagtcgacggagcagttcgatgggctgccctacctgctgtccctgctcaactgctgcatctgcctctggtacggcctcccgtgggtctccgacggcggcagggccctcgtcgccaccgtcaactgcaccggcgccctgttccagctcgcctacatctcgctcttcatcttctacgccgacagcaggaccactcggctcaaggtcgcggggcttctggtgctagtggtcttcgcgttcgcgctcatcgcacacgccagcatcgccttcttcgaccagccgctccggcagctgttcgttggcagcgtcagcatggcgtccctggtctccatgttcgcttccccgctggctgtcatgggtgtggtggtccgcaccgagtgcgtggagttcatgcccttctacctctctctgtccacgttcctgatgagcgcatccttcgcagtgtacgggcttctcctgcgtgatttcttcatatacttcccgaatgggctcggagtcatcctgggagcaatgcagctggtgctgtacgcgtactacagccggagatggaaaagcagcgactcgtcagcaccgttgcttgcctgatcatgtagccgagttcgtcagtccaattgcccgtgccgtgctttctgttgttctctgttctgccatcctgtaattctaggagaggagctaggcggtgttttggaacagattaatcgtactgctacgaaatatattttttgagatagattattttaaatagagatggtcataaagtttattcgtcttctaagagaattttgaatacgatcattttatttactt

SEQ ID NO: 28346 - DNA, 1030 bp, Zea mays
  Clone ID: LIB4756-061-B6_FLI
ccgggcctacactacaaactttacatttcccaatcttatgctccgtactctagcaagaatggcacccaagaactggacaaaggagagctttacgctcaacactggcgcaaagattcctgctgttggcctcggaacctggcagtcaaagcctggtgaggtccgtgaagctgtcaaggctgctctccagggcggctaccgtcacattgacactgcacttgcatatggcaacgagaaggaagtcggccagggtatcaaggactctggtgttccccgtgaggagatctgggtcaccaccaagctcgacaacccatggcacaagcgcgtcgaagaaggcatcaacagctcgctgagcagccttggcctcgactacgtcgatctctacctcatgcactggccctcgtcgaccgacccagatgacctgaagaagcactaccccgactgggacttcaaggacacctgggctgagatgcagaagctgcctgaatctggccgcgtgaagaacatcggtgtctccaacttcgctatcaagaatctcgagaagctcttcgccgactcccggttcaagatcacgcctgctgttaaccagatcgagctccaccccaacaacccctcgcccaagctcctcgactactgcaaggagaagggcatccactgcaccgcctactcatgcctcggctccaccgactctcctctgtacaagaacgagaagctcaagaagcttgccgagagcaaaggaaagtctgtccagcaggtcctgctgatgtggggtctccagcgcggcaccagcgtcatccccaagtctgtcacagcatctcgcatcatgggcaactttgagcttgatggctgggagttgaccgatgaggagatgaaggagattagctcgctgcctgagcgcttcaaggtttgcggagacgcctggctgcccgtcaaggtgttctttggcgacgacgagtaggtctgttgaattttgccagagggtttagagtacaatgataccatgaatacatagagaattgagaatgagaataag

SEQ ID NO: 28347 - DNA, 1174 bp, Zea mays
  Clone ID: LIB4756-061-C12_FLI
ccgggaatcagcacaccaaggagagtacgtggaggagcagccatggcttcatcggtggccgccgcggcgagcacattcctgggcacccgcctggcggacccggcgccacagaacgggcgcatcgtggcccggttcgggttcgggttgggcggcaaggcgaagcctgctccgaagaaggtggcgaagacatcgacctcctctgaccggccgctgtggttccccggcgccgtggcgcccgactacctggacggctcgctggtcggcgactacgggttcgacccgttcggtctcgggaagcccgtggagtacctgcagttcgagttggactcgctggaccagaacctggccaagaatgaggccggcggcatcatcggcacccggttcgagtcctccgaagtcaagtccaccccgttgcagccctacagcgaggtgttcggcctccagcggttccgcgagtgcgagctcatccacggccgctgggccatgctcgccaccctcggcgccctctccgtcgagtggctcaccggcgtcacctggcaggacgccggcaaggtggagctggtggacgggtcctcctacctgggccagccgctgccgttctccatctcgacgctcatctggatcgaggtgctcgtgatcggctacaccgagttccagcgcaacgccgagctcgacccggagaagaggctgtaccccggcggctcctacttcgacccgctcggcctggcggccgaccctgagaagaaggagcggctgcagctggcggagatcaagcacgcgcggctcgccatggtcgccttcctcggcttcgccgtgcaggccgccgccaccggcaaggggccgctcaacaactgggccacccacctgagcgacccgctccacaccaccatcttcgacacgttcggagggtcctcttaagcccgccattgctccgccccgtccatcgaccggccggaacgtgttcttggattaattaactacgatctctatgagcctggggatggatcaacccgtcgtgcgtggtctcgttttgtgatgagtggaagagagaggatggcaagatcgatcctttgttaatggagatctcgttaattaggagagctaccgctgggacttggtggtttgtaatatatgatccaaccagtgatgaatcaatgcattcacttgtgtacac

SEQ ID NO: 28348 - DNA, 1071 bp, Zea mays
  Clone ID: LIB4756-061-D11_FLI
ccgggaccattcatctcagattcagaagccttcaacttcaaatccttgcattttgaagttttctgactcttgaggatggaggctattcttgaaagaccgaaatcttgatgacactctgtaccccttcagtgctggcatcaatctagcttgtcgcaaaaacatacaagattacatgcggcaccacctgcatattgaagaaagccaagttgcagacatgtgcctggacctgtacaaggaatatggcaccacaatggctggccttaaggcattaggctacgaatttgacaacgatgagtttcatgcaactgttcatggtaccttgccatatcacaacctaaggcctgaccctgttttgaggaccctcctactttcaattccacagagaaaaatagtgttcacaaattctgacaaagctcatgcggaggaggctctgtgcagacttggtttacagggttgcttcgatggcgtgatctgcttcgagacactgaatccttgcaatggtccgagcgcgttccgagacggcaacggcatgctgttcccagatgaaacgtcccccaatcccgacttggctgatctgaatgaatccgatgggttcagacccatatcacccatcctctgcaagccctccgttgaagccatgcaagctgtaactcggattgcaaacgttgatcccaagaaaacaatattttttgacgacagcactcggaacatagcttcgggaaaggcagcaggcttccatactgtgattgttggcaggccgacacttgttccaggggctgaccatgctttggagagcattcacaacatgaaggaagctctacccgagatatgggacggccaggatcggtctgagtctgatgctcttctttctcccactgctgtcgagactccggtggttgcttgaatctgggggctatgtatccttcctgcgctaccatgagacctgctaccaatagttttgagtttggatagtggatgcagaaggtgcaccctagcttcttcattaatgagaaatagcattgcactcttatgttagttccaaatattaatggaactgtatcagttacattg

SEQ ID NO: 28349 - DNA, 988 bp, Zea mays
  Clone ID: LIB4756-063-A3_FLI
ccgggctccacgcgagcggacgacacgaagcggccatagccgcacgttgggatcccctccgctacgcctcttgatggtctccgccagcgcgccgccgccgcaggcccagtccgacgcggccgggtcgggggaggaagtgagcaagaaggtgcggaagccgtacacaatcaccaagtcccgggagagctggacggagcaggagcacgacaagttcctcgaggccctgcagctctttgatcgtgactggaagaagatagaggcttttgttggctccaagactgtcatccagattaggagccatgcacagaagtaccttttgaaggttcagaaaaatggaaccagcgaacatgtcccacctccacgaccaaagcgaaaagctgcccatccatatcctcagaaggcttccaagaatggaactctggcatgaacgtgcctgtttcttcatgggctcatagttccatcccacaagctgttgcttcatcaatggtgaaagaagatttaggtgctggaacaccaggttcaaacaatttttgctcaagtagtactgaaggccttccaagaacttggcaacctggtgaaacaaatgatccaataaatcaaattccgtcactccgccgtctgtacctcatgatatttctgataatcatcttgtagtgcaaaatacttactccgattctgtccatctctactatttctaagaattatgtcttaaccatcctcctgtgcatcttttcttgtgaatttgtaagcttcaatctcaaatccgctggccccttcttttagaatgaaccgaacctccaatattctcttgatgatgcttaacatacagagaaacggtgtaacacaaaacagcacaatccatttctttgtactgtttctttttcaaatattttactgttttcaatattgaatctatgtcttgaatgaattgctagcttatctaattcatatttacattcttgacatttcaattatggaattttcaaac

SEQ ID NO: 28350 - DNA, 896 bp, Zea mays
  Clone ID: LIB4756-063-F9_FLI
ccgggttggcattccgaccgatcccaccgaatggacagccgcctcgccatcgccgcgctcctcctgctcgcctccgcctcctccgctgccgcggacggcgggaaggtggccgtggcgctgtactacgagtcgctgtgcccctactcggcgcgcttcgtggtgaaccacctcgccaaggtcttcgcggacggcctccgcgaggtcgtggacctcacgctcgtcccctacggcaacgcccggatccacccccggcggagagatctcgtgccagcatggtccgtacgagtgtctgctcaacaccgtggaagcttgcgccatcgacgcctggccggatctggatgtgcatttcagcttcatctactgcgtggaggacctggtggtgaagcggcagtacaaggactgggagtcctgcttcgagaagctgggccttgacgccaagcccgtaacagaatgctacaaaagcgagcatggccacaagctcgagctcaagtacgcgaaccagaccgacgctctcgagccgccgcaccggtacgtgccctgggtggtcgtcgacgggcagcccctgctagaggattacgagaatttcgaggcttacatctgcaaggcttacaagggcactccaccgaaggcctgtgagggcctggaacgtctgcagatggccctcgagacagcggcggaggcgcgcaacggcgtcagctacaactccggtgtcagcaagcttgcgactgctgaagatgagggtggggagcataaggtgggagaatactagtacgtaattgactagcgacgtgcccttttttgggtcatgtgaagatatgaaggaccgttccatctcgttgtccgggtttttattgtacagtaatagctaatatggtaatgataataattacatttct

SEQ ID NO: 28351 - DNA, 727 bp, Zea mays
  Clone ID: LIB4756-064-E3_FLI
ccgggaaaaaatcaatagccagttctaatctcaggtttgggggaaaaaggcctcgcgggtcgcaaaccgctctctgttgatttgggatttgggaggcgctcgagttttcaggtaaaccatagtttagtgaccaatggctcgtactaagcaaactgctcgcaagtccactggagggaaggctcctaggaagcaacttgccaccaaggctgctcgtaagtctgcacccacaactgggggagtaaagaagcctcatcgttaccgccctggaactgttgctcttcgtgaaatccgcaagtatcagaagagcactgacctgctcataaggaagcttccgttccagaggcttgtcagggagattgcccaggatttcaagactgatcttcgtttccagagccatgcggtgcttgcgctgcaggaggctgcggaggcgtacctggtgggtctattcgaggacactaatctgtgcgccatccatgccaagcgcgtgaccatcatgcccaaggacattcagctggctaggaggatccgtggtgaaagggcctagattctctgtttacggctactgggagtggctccgtagtatggtttgcatctgttcgatgcttgcttttgtggaagtttacatttgtgggtgttcgaattcgtaatattcatccgtagtggacaagtggtaggaagtgctccaatctgactatgttttaaaatttataattgatgtcaaaaaaat

SEQ ID NO: 28352 - DNA, 1022 bp, Zea mays
  Clone ID: LIB4756-065-A5_FLI
ccgggaccctcgcttccttttccttctctatccgcgagcctcgtaccggcgcagccatggcggaggagcccgccgttgtcgtggcctcctccagctacgaggttgacctcgggaacctcatggcgtacgatccgtcgcatcacgtcgccaccgcctccagggaggagctgagacaggagtgcctgcggaagggtacagagctggcgcaggcggtggccgacgtcctcttcgcgctgccgcccaacgaggaccgcgacggccccattatccacctcccgccgcccaccttcagactcccgcgggagaagcatctacccaagcccaagccaccgaccaagtgggagctgtttgcaaaggcgaaaggaattaccaagcgcaaaaagaacaagcgtgagtgggatgagcaaactcaatcctggaagcggactcatggctatgaccgtgttaatgatgacaaagacattccaatcattgaagccaaattgactgacgagcctggtgttgatccatttgcgcaaagaagggatgagaagaagaagagggttgaaaagcaagaaaaaaacagactggataacttaaagaaagctgcaaaggttggcgctttgccaagtcatatacagcttgctgcgaaggcgttgcccatcacaggaacaaaagctgaccttccaaaaaaatctagaaaagaggatcttgagagtgttgtcggcatggcttcatcagcaacagcaagtggtgggaagtttgatgagaagttgcctggcgagaaacctccaaagcaccctggcaaacacagaaagttcctcccagttgccgaagggaagggaatgggcagcctggagaaacagcagaatgacaaaatcctgaactctctacttgccagaaactctgatgaaccacttgatgtcggcaaggcaattacaatgtacaaggtgaaaaaggagaagcagagaaggaaagagaaaggcatgtcatcgaaatctgataagcttaagccccagaagaaaccccacaagaagtcatcg

SEQ ID NO: 28353 - DNA, 943 bp, Zea mays
  Clone ID: LIB4756-065-G11_FLI
ccgggccccatttcgaagcccaccgaattccctgcgattcctctcccctcgcctcctcgtctccccctaggggatcgtcggagaggaatcgcaaagagggccgtctcatccgagttaaggaagccatggagcacaaggaggctgggtgccaggcccccgagggacccatcctctgcatcaataactgtggcttcttcggcagcgcggcgaccatgaacatgtgctccaagtgccacaaggagatgataacgaagcaggatcaggccaagctggctgcctcctctatcgacagcatcgtgaacggcagcgacgccgtcatggagccggttgttgctggcagcaacacggtagtagctgttgcccaagttgagttgcaaacaatgaacgtgcagcagcccgctgatgttgccggacccagcgagggggtggcggcgatctccaaaggggggaaggtagggccgaaccggtgcagcgcctgcaggaagagggttggacttacgggattcaactgccggtgtgggaacttgtactgcgcactccaccgctactccgacaagcacgactgcaagttcgactaccggactgctgccagggacgccattgccaaggctaatccggtggtgaaggcagacaagctcgacaagatctagggggggttccctacggttgggtatcaggaagattgtaaaccgcggtaactcgtcatgcggaactgctgccttgccccccgcgcctttctcttccatgtttgctgctacaatcttgttgttgggcattgcagtgcacggtgcacacttgtgtagcccgcctcgagaattcctgcctctgcatctggtcagttctaaaatgatttgcatgttggctatgttgtgtaagctctatttatggtggtctcgctgagacgggtatttggcttcgcagttatctagctatgtgatgtacc

SEQ ID NO: 28354 - DNA, 589 bp, Zea mays
  Clone ID: LIB4756-065-G4_FLI
ccgggactgacgagctcgccatggcctccctctcctctgccgccgtcaccgccccttccttcgccgcaccagcgccagcccgcgccgtggtcagaaggaggtccttcaccgtgcgcgcctctctccgcaaggccaccggcaccgccgccgtggcaatggctgccagcgccctgcttgccggcggtgccatggcccaggaggtgctgctgggcgcaggcgacggcgggctcgtcttcgagcccagccagttcaccgtcaaggccggcgacaccatcacattcaagaacaacgccggcttcccgcacaacgtcgtcttcgacgaagacgaggtgccgagcggcgtcgacgccaccaagatctcgcaggaggagtacctcaacgcgccaggcgagacctactccgtcaccctcaccgtgccgggaacctacggcttctactgcgagccgcatcaaggagccggaatggtcggcaagatcaccgtcaactaattaagctagctatcgatcgatatccattcatgtattagctgttgcttcctgctttgtactccgccgatctgtccatctctacatgttttcgtcttcacacg

SEQ ID NO: 28355 - DNA, 1334 bp, Zea mays
  Clone ID: LIB4756-066-B10_FLI
ccgggaacagccttctttctttttcacaatggctcagagaatgcttcttcgtgcaagtggcccacgccgagtctactatggcttcacccgctcttttagtactgttctcgacacgcctgtagatccgggcacgcagcaaatacgcctggcgacaccgcggacgacggtgtttgagaatgcactcaatgcaaaggcaccgcggacaaattggacaaaggaggagatttcagagatatacaacacttcgctgattgaccttacctatgcttcggccttggtccaccgccgattccatgaccccgctgccattcagatgtgtaccctcttcaacatcaagacgggcggctgcagtgaagactgttcctactgcgcccagtcatctcgctacgacaccggtctcaaagccacaaagctcagctctgtcgaatccgtcctcgaagctgcacgcatagctaaagaaaacggcagctcgagattctgcatgggcgccgcgtggagagacatgaggggtcgtaagacgaacctcaagaacatcaaagaaatgatcaagggcgtgcgcggcatgggcatggaggcatgcgtgacccttggcatggtcgatgctgctcaagcaaaggaactgaaagatgcgggcttgacggcttacaatcacaatgtcgatacgagccgcgagcactaccctagcgtcatcaccacacgtacgtacgacgagcgactcaacaccatcaagaatgtccaggaagcaggtattcacgtgtgcaccggcggtattcttggtctgggggaaaaagcccgtgaccacgtcggtctcatccacactgtagctacactacccgcccatccagagtccttccccgtcaacgcccttgtccccatcaaaggcaccccactaggagaaacccaagccatctcctttgatgccatcctcagaaccattgctactgcacgactcgtgcttcccaccaccatcatccgtctcgcagccggccgccacaccatgcgtgaggaaaaacagattctgtgcttccaggctggtgcaaacgccgtgttcactggcgagaagatgctcacaacggcgtgtaatgggtgggaagaagacaaggctatgtttcagaggtgggggcttaggccaatgaagatggaggagacgattggggagaagagaaaggtgccggggcaggaggaggccgaggcggttgttgcggcggcggaggcggaggcgacggtgcaggcacttgcttgagggggggagaggtagatgtagtgcttaggctctgtgatgatgagctcttcaatgtgctactgaagccgaatctatgtcttgtaacttgtag

SEQ ID NO: 28356 - DNA, 1435 bp, Zea mays
  Clone ID: LIB4756-066-B2_FLI
ccgggcggcttatctcctatcccctcctcccccgctccttccacacaaacccccatgccccttcttcctctcctccccgtcatggcttccaccttctcccccacttccgccgcgagggccctcctccctggctccacctcccgcccactcttcctcgccgcttcagcttcctcagggcgcattcaaccatccaggaagggactggacttccgccgcggccgattcaccgtctgcaatgtcgccgctcccaccgccgccgaacaggaggcgacggcgtcggccgcgaaggagacccagcgccccgtgtacccgttcgcggccatcgtggggcaggacgagatgaagctctgcctgctgctcaacgtcatcgaccccaagatcggcggcgtcatgatcatgggcgacaggggcacggggaagtccaccaccgtccgctccctcgtcgacctgctcccggacatccgcgtcgtcgtcggcgaccccttcaactccgacccggacgaccccgaggtcatgggccccgaggtccgccagcgggtcctgcagggggacaccggcctccccgtcaccaccgccaagatcaccatggtcgacctgcccctcggcgccaccgaggaccgcgtctgcggcaccattgacatcgagaaggcgctcaccgagggcgtcaaggcgttcgagcccggcctgctcgccaaggccaacaggggcatactgtacgtcgacgaggtcaacctgctggacgaccacctcgtcgacgtgctgctggattccgctgcgtcggggtggaacacggtggagagggagggtatctccatatcccaccctgctcgcttcatcctcatcggctctggtaacccggaggaaggggagctcaggccccagctgctggaccggttcgggatgcacgcgcaggttggtaccgtcagggacgccgagctcagggtgaagatcgtggaggagagggctcgtttcgacagggatccgaagacgttccgtgagtcgtatcatgacgagcaggagaagctccagcagcagatatcatctgcacggagtaaccttggcgctgtgcagattgaccatgacctccgtgtcaagatatccaaggtgtgctctgagttgaacgttgatggactcagaggtgacattgtgactaacagggctgccaaggcgctggctgcgttgaaaggaagggacagcgtcaccgtggaggacattgctactgtcattccaaactgcttgaggcatcggctccgcaaggatccgcttgaatccattgactcgggtttacttgtcattgagaagttttatgaagtctttagctagattgttcttgaggtaaatgttccttagtcacaatttttggcgggaaccctcttgttctgttactttcataatgttctgctgtttaataatatctggagcttgaattggtatc

SEQ ID NO: 28357 - DNA, 1119 bp, Zea mays
  Clone ID: LIB4756-067-C11_FLI
ccgggaccagaccaactagcttcttctagctagctctaggctcgtctgctgcaagaaggtaacagcgcaggcatggaggggaaggaggaggacgtccgcctgggcgccaacaagttctcggagcgccagcccatcggcacggcggcgcagggcacggacgacaaggactacaaggagcccccgccggcgccgctcttcgagcccggggagctcaagtcctggtccttctaccgcgccggcatcgccgagttcgtcgccaccttcctcttcctctacatctccatcctcaccgtcatgggcgtctccaagtccacctccaagtgcgccaccgtcggcatccagggcatcgcctggtccttcggcggcatgatcttcgccctcgtctactgcaccgccggcatctccggcgggcacatcaacccggcggtgaccttcgggctgttcctggcgaggaagttgtccctcaccagggcggtgttttacatcatcatgcagtgcctgggcgccatctgcggcgcgggcgtcgtcaaggggttccagcaggggctgtacatgggcaacggcggcggcgccaacgtcgtggcgcccggctacaccaagggcgacggccccggcgccgagatcgtcggcaccttcatcctcgtctacaccgtcttctccgccaccgacgccaagaggaacgccagggactcccatgtgccgatcctcgcccctcttccaatcgggtttgccgtgttcctcgtccacctggccaccatccctatcaccggcaccggcatcaaccccgcgcggagccttggcgccgccgtaatttacaaccagcaccatgcgtgggctgaccactggatcttctgggtcggccccttcatcggcgctgcgctggctgccatctaccaccaggtgatcatcagggcgatcccgttcaagagtaggtcttaaaggagccgatgctgctgcttcgagatgccggtcttaaaaggatggattcgtggctgttttcaaatgatcccctactatgttacgtgcagttccattcctctttcaaagttcggagctgcttttatccgaacccagacttgtaattcatctgtaccaaatgtgtaatatgccgcgcctctg

SEQ ID NO: 28358 - DNA, 1180 bp, Zea mays
  Clone ID: LIB4756-067-E1_FLI
ccgggacaagcaccagaccaattaactagcttcttctagctctagctaggctcgtttgctgcaagaaggtaacagctagcaggcatggaggggaaggaggaggacgtccgcctgggcgccaacaagttctcggagcgccagcccatcggcacggcggcgcagggcacggacgacaaggactacaaggagcccccgccggcgccgctcttcgagcccggggagctcaagtcctggtccttctaccgcgccggcatcgccgagttcgtcgccaccttcctcttcctctacatctccatcctcaccgtcatgggcgtctccaagtccacctccaagtgcgccaccgtcggcatccagggcatcgcctggtccttcggcggcatgatcttcgccctcgtctactgcaccgccggcatctccggcgggcacatcaacccggcggtgaccttcgggctgttcctggcgaggaagttgtccctcaccagggcggtgttttacatcatcatgcagtgcctgggcgccatctgcggcgcgggcgtcgtcaaggggttccagcaggggctgtacatgggcaacggcggcggcgccaacgtcgtcgcgcccggctacaccaagggcgacggcctcggcgccgagatcgtcggcaccttcatcctcgtctacaccgtcttctccgccaccgacgccaagaggaacgccagggactcccatgtgccgatcctcgcccctcttccaatcgggtttgccgtgttcctcgtccacctggccaccatccctatcaccggcaccggcatcaaccccgcgcggagccttggcgccgccgtaatttacaaccagcaccatgcctgggctgaccactggatcttctgggtcggccccttcatcggcgctgcgctggctgccatctaccaccaggtgatcatcagggcgatcccgttcaagagtaggtcttaaaggagccgatgctgctgcttcgagatgccggtcttaaaaggatggattcgtggctgttttcaaatgatcccctactatgttacgtgcagttccattcctctttcaaagttcggagctgcttttatccgaacccagacttgtaattcatctgtaccaaatgtgtaatatgccgcgcctctgttatgtgcaattgaaaattatgagacagccgagtcaagctttaagagtc

SEQ ID NO: 28359 - DNA, 1083 bp, Zea mays
  Clone ID: LIB4756-067-H4_FLI
agctccggccggtacacggaatccgggcacccacggtttccaccaaagcgacgcgccccgcgacatggcggtggtgcgcctgcgcgtatctccacgcctccgctccattcccctcctgctctcccagccagacgccgctacagtccggcgtagtttcgcctgcgccagcgcctcccaagcccccgcacccgcgcgggctatggcggccccgtcctcctcatccgcgacgccctccccgtacacgacgctcgtcgggcgcgtgagctgcgagcgcgagatcaagcgcagcaagttcatcgccatcgcggccccggtccccaacgagcgtgccgccatggccttcctggatcaggtcaaggatccacgtgctacccataattgctgggcatacaagctgggagatcaattccgttacaacgatgacggtgaaccttctagtacagctgggaagccaatatactctgccatcatttcctctggcattgataaggtcatggtggttgtgattagatattttggaggcataaaactgggaaccggtggactggtgagggcttatggtggggttgcttctgaatgtcttaaagatgctcctacttgtcttgtgaaaccaaaggctcgtgtgggtatggaagtaccatttaatctgttgggaacagtctatcatcagctacaacatttcgaagctgaagatatcaaacaggactatgacactggaaaagatggtaccgttatggtcatgttcgaagtggaatatgaaaaaattgagaatcttggaaatgcagtgaactcagcttgcagtaggaagatagaactatatctataaaccacaatcacgggttaaggatgagtgtaagtgtggagacacgcaatcgtatgtacttgcaagcctctagttcttattcatttgcatcgatatttattctggaatctccatggtttttttcttcaccaagcatgtaggcaccagaaatattcagcgccttatccaagctaactgctagagtgctaggccatattgaactgctccagtgtaaactgtacagtcatctatcttttgaatttcaccatggtaattgtttt

SEQ ID NO: 28360 - DNA, 1179 bp, Zea mays
  Clone ID: LIB4756-068-C8_FLI
ccgggacaagcaccagaccaattaactagcttcttctagctctagctaggctcgtctgctgcaagaaggtaacagcgcaggcatggaggggaaggaggaggacgtccgcctgggcgccaacaagttctcggagcgccagcccatcggcacggcggcgcagggcacggacgacaaggactacaaggagcccccgccggcgccgctcttcgagcccggggagctcaagtcctggtccttctaccgcgccggcatcgccgagttcgtcgccaccttcctcttcctctacatctccatcctcaccgtcatgggcgtctccaagtccacctccaagtgcgccaccgtcggcatccagggcatcgcctggtccttcggcggcatgatcttcgccctcgtctactgcaccgccggcatctccggcgggcacatcaacccggcggtgaccttcgggctgttcctggcgaggaagttgtccctcaccagggcggtgttttacatcatcatgcagtgcctgggcgccatctgcggcgcgggcgtcgtcaaggggttccagcaggggctgtacatgggcaacggcggcggcgccaacgtcgtcgcgcccggctacaccaagggcgacggcctcggcgccgagatcgtcggcaccttcatcctcgtctacaccgtcttctccgccaccgacgccaagaggaacgccagggactcccatgtgccgatcctcgcccctcttccaatcgggtttgccgtgttcctcgtccacctggccaccatccctatcaccggcaccggcatcaaccccgcgcggagccttggcgccgccgtaatttacaaccagcaccatgcctgggctgaccactggatcttctgggtcggccccttcatcggcgctgcgctggctgccatctaccaccaggtgatcatcagggcgatcccgttcaagagtaggtcttaaaggagccgatgctgctgcttcgagatgctgccggtcttgaaaggatggattcgtggctgtttcaaatgatcccctactatgttacgtggagttccattcctctttcaaagttcggagctgcttttatccgaacccagacttgtaattcatctgtaccaattgtgtaatatgccgcgcctctgttatgtgcaattcaaaattatgagacagcgagtcaagctttaagagtt

SEQ ID NO: 28361 - DNA, 1040 bp, Zea mays
  Clone ID: LIB4756-068-G11_FLI
ccgggaagcgtccaaaccccccatacaaccaactcgcaactcatcgcgcggttcctcgatcgaagtctccagacgcccagcgtcgatcgcgacgacgtacgccaagccgcagcaaagctccggcggcgcgcgcggcggtgtgcggtgagaatatggcggtggtgtcagcgctggccaagtacaagctcgtgttcctgggcaaccaggcagtgggcaagacggccatcatcacccgcttcatgtacgacaagttcgacgacacctaccaggcgacgatcgggatcgacttcctgtccaagacgatgtacctcgaggaccgcaccgttcgccttcagctctgggacacagctgggcaggagaggttccgcagcctgatcccgagctacatcagagactcctccgtagccgtcatcgtttacgatgtgaccgacaggcagtcattcttgaacacgtcaaagtggatcgaggaagtaaacacgcaaagaggtggagacgtgctcatcttcctcgttggaaataaaactgaccttgtcgacaagaggaaagtgtccaccgacgaaggagaagccaaagcacaggagcatggtgctatgttcatggagaccagtgcaaaagctgggttcaacgtcaagcccctgttccgcaagatcgctggatcccttccaggactggacgcactttcgtcaggaaagcaggaagacatggtcgacataaacctcagacctgccagcggttcgtcggcttcaggtgcagccgcgcagctggagcagaaatcaggcggttgctcctgttgagacttcgacagttttgtgttcagagaagctacagcagtactgcaacatcgagttaagtactttcagagagattatgacgaagagtgtgttttcgcccagacgtccagtagtgatatactgacatccatagcgagaagccaatttctgtgtacagatttgtttagcaagttatcatatactaggatataactttttgagacacaagggacaaaatctgtggaggtaagggcatctcactttttttcg

SEQ ID NO: 28362 - DNA, 1616 bp, Zea mays
  Clone ID: LIB4756-069-E6_FLI
ccgggctctcactcgcctcgacgcgcctctgaaagttcggagccgccggcccgtccgcctccctctccgcctcccgtccccaaggccaatagttttcaagtggcaatggcggaccaggctaaccaacccactgtccttcataagctcggtggccagttccacctgcgctcgatcatctctgaaggtgtacgggcccgtaacatatgcccatctgtctcatcttatgaaaggagatttgccacaaggaactacatgacccagagccttttgggcccttcgatgtctgttagcggtggcatcaatgtcccagtgatgcggaccccgctctgtgctaatgctcctgctgagaaaggaggcaagaacttcatgatcgatttcatgatgggcggtgtttcagctgctgtttcgaagactgctgctgctcccatcgagcgtgtgaagctgcttattcagaaccaagatgagatgattaagtctggtaggctatcagagccgtacaagggtattgttgactgcttcaaacgtaccattaaggatgagggtttctcttccttgtggaggggtaacactgctaatgttattcgttacttccctactcaggctttgaactttgcatttaaggactacttcaagaggttgtttaacttcaagaaggatagggatggttattggaagtggtttgctggcaacctggcctctggtggtgctgctggtgcttcctctttgttttttgtgtactccttggactacgcgagaacaaggttggccaatgatgcgaaggctgccaagggaggaggtgaaaggcagttcaatgggcttgtggatgtctaccgcaagacactcaagtctgatggtattgctgggctttaccgtggatttaacatctcctgtgttggaatcattgtttatcgtggtctgtactttgggctctatgattccatcaagccagttgtccttactggcaacctccaggacaatttctttgccagtttcgctctgggttggctgatcactaatggtgctggtcttgcatcttaccccattgataccgtccgcagaaggatgatgatgacatctggtgaggctgtcaagtacaagagctccttggatgcgttccagcagattcttaagaaggaagggcccaagtccctgttcaagggtgctggtgctaacattcttcgtgccattgctggtgctggtgtgctttctggctatgaccagctccagatcctcttcttcggaaagaagtacggttccggcggtgcttaaatggagaaatatgatgacgaacaagagcagtgtgtgttcccggtcctttccaatcaggatctggtgaagtttttgcctttcatatcgaagaaattaataattcatgtagagggaggattcttccaacaatttgttttggatggagacttagatctccaaacactcgtaactatcctactaggtggtgacatcagtccccaaaaacgtttatggtcatagagtctgcccttcgtttgtcagtcgggcaatttttcttgcatacaatgccttcgtttaagtaccggatgagttgctgcgactaattatttgtttgtctttaccttttgcaatgcttgatcgttgatagt

SEQ ID NO: 28363 - DNA, 938 bp, Zea mays
  Clone ID: LIB4756-070-A7_FLI
ccgggcgactccctgccgacctcccgcctacccccgctccgcgagttcctcctgctcccgctgctccgctccctgccccccggtcgcgcgctccacctgctcgactagatgccccgtcgcttcgtcgttgccccctcatacgccggttgtagtggccgcggcgctgctggtggtgtcgctggcggcatactgcagcacggacccgcttcggacgggcagcatggtggacttcccggggttcgagtcccacctcgtcgacctccctgatcccgacgagatgccgacgcacgcggacgaacgggagcggctccgcggagccgaggtgcggttccacggcgaggtgcaggggcccgagagcgtcgccttcgacccgcagggctgtacatgggtgtcgtcgatggccgggtcgtctcctgggacggcgagtggtgggtcccattcgcgacggcctccccgcgcgggacacaggagctctgcggcgggcccatggcctcgccgctggagtatctccccagcgagcacatctgcagccgcccgctcgggctctgtttcaataagattggggacctgtacatcgtcgacgcctactttggtttgctcaaagtcggccccgagggcgggctggccacgccgctcacaacggaggccgagggcgtgcgcttcaacttcaccaacgaccccgacctcgacgacgagggaaacatctacttcactaactccagaatccactaccagagacgggttggtgaccgtctgatcgttaacatcacgattcacgatcctgaaattggattggaacttgggaggttgtttgcttggattactttactttgaagtataaggtgtgcaaaccgtgcaaataggaaagtaacgtgttggtggaaatgtgaggatgcatttaaaaatatataagaagaggtacattatcgtttttgaac

SEQ ID NO: 28364 - DNA, 1389 bp, Zea mays
  Clone ID: LIB4756-071-D2_FLI
ccgggaaaaaaaaaaaagacctcccccagtcccccaccgaccaccggcctcctttcccgcaggcacgggtgcacggcacgcggtttccactcgcttcgtccgcgttcggatcgccctcagtctagcagagcaagcatgtcgtcgtcggcggagaacgaccccacggtgacggtgaccgagcgcggaggcaaggacaagcacgaggacggcggcgacaaggagcagggcggcggcggcttcatcgacaaggtgaaggacttcatccacgacatcggcgagaagatcgaggaggtcgtcgggttcggcaagcccacggccgacgtgtgcggcatccacatcccgcacatcagcctccaccgcgccgacctcgtcgtggacgtgctcatcaagaacccgaacccggtcccgatcccgctcgtggacatcgactacctcatcgacagcgacggccgcaagctggtgtcgggcctcatcccggacgccggcaccatccacgcgcacggccaggagaccgtcaagatcccggtgtcgctcgtcttcgacgacatcaagagcacctacaaggacatccagccgggcagcatcatcccctacctcgtccgcgtcgtgctcctcgtcgacgtccccatcatcggccgcgtcaagatcccgatccagaaggacggcgagatccccatcccttacaagcccgacgtcgacgtggagaagatcaagttccaccacttctccttcgaggagaccaccgccacgctccacctcaagctcgagaacaagaacgacttcgacctcggcctcaacctgctcgagtacgagatgtggctcggcgacgacagcatcgcctccgccgagctcacacagaccgccaagatcgagaagcaggggatcaccaggatgcaggtgcccttcagcttcaggcccaaggacttcggatccgctgtctgggacatgatcagggggaggggcacgggatacaccatcaagggaaagatcgatgtcgacactcccttcggcaacatgaagctgcccataagcaaagagggtggaaccacccgcctcaagaaggaggaggaggaggacgacgacgatgacaactgaagtgaggactgctggggggcgctgctgttacctttcacgaaacgcagcgaagcagaagatgcggggatcgtcgtcgacctgatacccacacccttagcgctggttaagctcttgcctttagcttatggtgctctgttgttttgcattgtctgaacatcctctcacttcctgagtgtacgttcagtttgaggtttcctgtgttgtccatctgaattctttcaaactttgcggttggaactggatgaagaataaaattccaacccgccctggttcttttgtgggtctgtttggaat

SEQ ID NO: 28365 - DNA, 1125 bp, Zea mays
  Clone ID: LIB4756-071-D9_FLI
ccgggagcttggcgtttgccagcacgcatagcgattgcgactattggcgattgtgtaggtgtagtgtgcctctcgaggaacgagagcctcaagacccgagcgtcttcagatatggaggaggcggcggttgcacggacgaccagcgagacccaggtgggcgacctgccggaggtgtgcctggcgcaggccatcgcgcggacctccccgcgcgacgcctgccgctgcgccgccgtgtccccggccttccgcgtcgccgccgactccgaccaggtctggcgcgccttcctccccgagcagctcgaggcggccgaggaccacttggacagccgccgcgtgtctccgccgtcgcaggcggctcacccagcggcgaccgtgcgcggcctcagcaagaaggacgcctacctcagcctctgcgacgctgccggcgcggtggccgtcgacggcagcgggtgcagggtgtggctggagagggccagcggcgccacgtgctacgcgctgtcggctcgcaggctcagcctgccctgggacgacggcgagttctcctggaggttcacgcaccacccacgctccaggttcgcggaggtggcggagctggtggactgcacgtgcctggacatctacgggagcctgccgctggccgcgctgacgccggcgacggtctacgcggcgttcctggtgtacggcaccgcgccggagggggcctaccgcggcctgagctacccggaccaggagacggccgtggccgtgggcgggcgggtcgtcgcgcgccacgccgtgtgcctccgccccgacgacgccgaggcgcgcaagttcaggggccgcggcgccggggaggaggcgaggaggccgagcctgcgggctgacgggtgggaggagatggagatgggacgcctgcgcacgccgcccgtggaaagcggcggcggcggcggcgacgtctgcgtggtgcaggcgagcttcgaggtgctcggctggtaccccaagcgcggcctcgtcgtcgagggcatcgagttcagggccctccacgatgcttcatgactggttgagagttgagaccgcatgaatatacgttgtaaatgagatgcaaactcgattggtaaattgtaacaatcatttagagtgttcttg

SEQ ID NO: 28366 - DNA, 2054 bp, Zea mays
  Clone ID: LIB4756-071-E6_FLI
ccgggaccggccgcgtacacaagctcgcctcgcaccagaaacccgcgaatcaatcccgaatcccgatcgaccggcggcgcgggaggcgatgccggacaaggcggtggacgacgtcatggaggccgcggtgggggcccacttcagcggcctccgcctcgaggcgctgcgcctccccacctctgcgccctcttccccttcctcctcccccgccgccgcggcgcacacgcactccaacggagccgtctacgccaacggcaccaccgagcttccctctcctgccgctgcccggcagccattcgtcatcggggtttctggagggacggcgtcggggaagacgacggtgtgcgacatgatcatccagcagctgcacgaccaccgtgtcgtgctcgttaaccaggattcgttttaccgtggccttactgctgacgagtccgcacatgcacaagactataattttgatcaccctgatgcatttgatacagagcaacttctagaatgcatggggcagctgaaatgtgctcaacctgtaaatgttcctatatatgatttcaagaagcatcgacggtgttctgaaagctttagaaagagcatttgcaactttatttttgatccctccttatctgccccggaggagaagggtaggcctggtgcagtggtgaaagctgtctcactaagtcaccgggtcacggattcgaagcagcctctccacatttgatgggggaaggcttgcctcagtttatcccttcctcagacccctggtacggggtctgtccttatcttccctagaggggaatctatagtaagacaacaaaattggaggtcaatgcatcagatgtcattattttggagggcattttagtgttccatgaccagagagttcgcaatctgatggacatgaaaatttttgtagacacagatgctgacattaggcttgctcgacgaatcagacgtgatacagttgaaagaggaagagatatcagctccgtgcttgaccaatatgggaggtttgtgaagccagcgttcgatgattttgttttgccttcaaagaagtatgctgacgtgatcattcctcgaggtggtgataaccatgtagcagttgatctgattgttcaacatatccgtacaaaacttggtcagcatgacttgtgcaaaatctatccaaatgttcatgttgttcaatcaacttttcagatccgaggaatgcatactcttatccgtgatagggacatcaccacacctgactttgtattttattcagatcgattgatccgtttggtagtggagcatggtcttggacatttgccatttacagaaaagcaggttattaccccaacaggatctgtttatatgggagttgacttttgtaagaagctctgtggagtctctattgtgcgaagtggtgagagtatggagaacgcattgcgtgcttgttgtaaaggaataaaaattgggaaaattctaattcatcgtgttggagacaatggacaacagcttgtttatcacaaactgcccatggatattgctgaacgacatgttctacttttggatccggtgcttggtacaggcaactcagtagcccaagcaattgaccttcttataagaaaaggtgttcctgaggatcggatcatttttctcaatctcatctcggctcctgaagggattcagtgtatctgcaagcgatttccttcgctgaagattgttacatctgaaatcgattatggtctgaacgaggaattcagggtgatcccaggactgggagaatatggcgaccgctacttcggcacagacaattgatggatcataccactctatggctgtgtgaagatctcacttggtccctggatagggatggtatcttgcaagtaatatttaatatggaggcgtaattgtgtttaatagtcggcatgccttagtaacatgtagaaccttctgcataaagcttgaccaaggacagcgggatgctagagaaggacctgtgaacggagaacgtggtgtgtgttttgtcttgtacgggtgcagaaacattgatgttttcaaataagtgtgtttgatac

SEQ ID NO: 28367 - DNA, 953 bp, Zea mays
  Clone ID: LIB4756-071-G2_FLI
ccgggatctctcctctctcgtctgcaccgcgagtccgcgactccgcaccaagcaaatcccctgcccccaaaatattgctagggattcgaggggaggaaaatccaggcgcccaggcctggcaatccgttcgtcggagaggccatgagctcggcgcaggatccgttctacatcgtccgggaggagatccaggagtcgattgataaattgcaaagtaacttccaccgctgggagcaaactgcttcaaacacaggagaatatgttcatctgacaaaggagcttctgaccagctgtgaaagcatcgagtggcaggtagatgagctggaaaagacaatctcagttgcatcaagggatccatcatactatggacttgatgaagttgaactttccagacgaagaaactggactggttctgctcataagcaggttggtacagttaagagagctattgaaaagggcaagagcaatgtagcaacttcaaaataccaggatacaagcaggaccaaccactattctgcccaagataatgatgactttatctcttcagaatcagataggcagcttctactcatgaggcagcaggatgaagaacttgacgagctcagtgaaagtgttcaaaggattggtggcgtaggactaaccatacacgaagagctgtctggacaggaaaggatcctaaacgacttaagcttggagatggagactacttccaacagacttgatttcgtgcagaaaagagtggccatggtgatgaagaaggccggcatcaagggtcagatcatgctgatcgtgttcctggttgttctgttcatcattctttttgttttggtgttcttgacatagccaagtgcaccagggtcctcgattttctccctcccatttgttgtgcctccctccctagtacgaacataagtatacgtgctggagctatcctttataaatcccgattttaatac

SEQ ID NO: 28368 - DNA, 1182 bp, Zea mays
  Clone ID: LIB4756-071-G9_FLI
ccggggtccgtctccttccacccagacacaggccaggcgggcccattgttgcccaagaccctggaatccggagcaggagtcctctctctctctgactctctcctgagggggaggaggaggaggaggaggcagaggcggaagagcaaccaccaagcagcagagcgcgaggcgacacggggacggagccctggaggtctctcgcgagtccagaggcgatcgacggagtcgcgattcgtctcccaggatatgaacaacgggactttggtttttaacggcagctagagggtagcctggagtgagcatttcattctggagatacaatgggtggctgctgctgctgctgctgttctgcaagggcatctgattcagatagagcaccggtgcgcatctatcaccgacaaaatcccgaggaacatgcacccttgtcgtcagcctttgatggaccatcgccaacttctgctatagttgcagttgacacaaatcttgatacaccatctcttgacacttaccgagcaccacctgcacctttgccatatgatgtttgcttcacagtttcagaaaatcctgatgtggagaagtcaggcattaaaatcaaaactgacgggcagcagtccccaaaagtggacgaatttgagtcgtgcgaaaaaggtgcccctgaggataaggctgatgaggaggaggatgtttgtccaatatgtcttgaagaatacgacaaagaaaatccacgttcggtcaccaagtgcgagcatcatttccatctctgttgcatactcgaatggatggagaggagcgagacatgcccagtctgtgaccagataactctgatagatgggatgtacgaatagcattcttggcggcggttcctgttgagttggcgttctttgtttttgtttttgttgtggtctggtctggacggctgtctggtggaggagatggttgatgagtcttggcaaaaaaataatttatagaagaaaaatgacatgaaattgtgctagagtcgcctgtgtcctgtttttacctgaaaaccctgtgagatttgctccctggtttcctcttgcttggtttgcgtgttcattcttccatttagatttcagtttctcagtgcctgtgtgacagggaaatcatctgtattgtacagttagtctgaaacggtgacagaaaagaagaaaagctgattctact

SEQ ID NO: 28369 - DNA, 1025 bp, Zea mays
  Clone ID: LIB4756-071-H3_FLI
ccggggcgggcccattgttgcccaagaccctggaatcacggagcaggggtcctccctctctctctgactctcctgagggggaggaggaggaggcagaggcggaagagcaaccaccaagtagcagagcgcgaggcgacacggggacggagccctggaggtctctcgcgagtccagaggcgatcgacggagtcacgattcgtctcccagactcccaggatacgaacaacgggactttggtttttaacggcagctagaggatagcctggagtgagcatttcattctggagatacaatgggtggctgctgctgctgctgctgttctgcaagggcatctgattcagatagagcaccggtgcgcatctatcaccgacaaaatcccgaggaacatgcacccttgtcgtcagcctttgatggaccatcgccaacttctgctatagttgcagttgacacaaatcttgatacatcatctcttgacacttaccgagcaccacctgcacctttgccatatgatgtttgcttcacagtttcagaaaatcctgatgtggagaagtcaggcattaaaatcaaaactgatgggcagcaggccccaaaagtggacgaatttgagtcgtgcgaaaaaggtgcccctgaggataaagctgatgaggaggatgtttgtccaatatgtcttgaagaatacgacaaagaaaatccacgttcggtcaccaagtgcgagcatcatttccatctctgttgcatactcgaatggatggagaggagcgagacatgcccagtctgtgaccagataactctgatagatgggatgtacgaatagcattcttggcggcggttcctgttgagttggcgttctttgattttgtttttgttgtggtctggtctggacggctgtctggtggaggagatggttgatgagtcttggcaaaaaaataatttatagaagaaaaatgacatgaaattgtgctagagtcgcctgtgtcctgtttttacctgaaaaccctgtgagatttgctccctggtttcctcat

SEQ ID NO: 28370 - DNA, 711 bp, Zea mays
  Clone ID: LIB4756-073-B6_FLI
ccgggtatcctcacacacttttgtttgcacatacaaatcctatccccatcaaaatgtccaacccccgtgttttcttcgacgtcagcattggcggccagcccgctggcaggatcgtcatggagctctacgcagacaaggtccccaagactgctgagaacttccgcgccctctgcaccggtgagaagggtaccggcaagtctggaaaacccctccactacgagggctccgtcttccaccgcgtcatcccccagttcatgcttcagggtggtgacttcacccgcggcaacggcaccggtggtgagagcatctacggcgagaagtttgaggacgagaacttcaacctaaggcacactggaccgggtgttctctccatggccaacgctggacctggtaccaacggtagccagttcttcatctgcactgtcaagacttcatggctggacggcaagcacgtcgtcttcggccaggttgtcgagggcatggacgttgtccaggctgttgagaaggttggctctcaaactggcaagaccagcaaggaagtcaagattgagaagtccggtcagctgtaaatgcttggcctagctgccaagtctgactttgggtgatgcgagcggatcgacgatgacgatgattgacgatatcaacaagtcaatgagcggcactggtcagtcgtagtaccaaactgggaaatgatatagactcttgggcgtg

SEQ ID NO: 28371 - DNA, 593 bp, Zea mays
  Clone ID: LIB4756-074-C3_FLI
ccgggctactgacgagctcgccatggcctccctctcctctgccgccgtcaccgccccttccttcgccgcaccagcgccagcccgcgccgtggtcagaaggaggtccttcaccgtgcgcgcctctctccgcaaggccaccggcaccgccgccgtggcaatggctgccagcgccctgcttgccggcggtgccatggcccaggaggtgctgctgggcgcaggcgacggcgggctcgtcttcgagcccagccagttcaccgtcaaggccggcgacaccatcacattcaagaacaacgccggcttcccgcacaacgtcgtcttcgacgaagacgaggtgccgagcggcgtcgacgccaccaagatctcgcaggaggagtacctcaacgcgccaggcgagacctactccgtcaccctcaccgtgccgggaacctacggcttctactgcgagccgcatcaaggagccggaatggtcggcaagatcaccgtcaactaattaagctagctatcgatcgatatccattcatgtattagctgttgcttcctgctttgtactccgccgatctgtccatctctacatgttttcgtcttcacacaac

SEQ ID NO: 28372 - DNA, 1217 bp, Zea mays
  Clone ID: LIB4756-076-C8_FLI
ccgggaaaagcgagagagctaagctaagccgagctaagaagcacagcaagtctcaccagactagcggctagcgcgagaatggccaaggacatcgaggccgcggcggcgcacgagggcaaggactactcggacccgcccccggcgccgctggtggacgcggaggagctgaccaagtggtcgctgtaccgcgcggtgatcgccgagttcgtggccacgctgctcttcctctacatcacggtggccacggtgatcgggtacaagcaccagacggacgcggcggcgtcgggccccgacgcggcgtgcggcggcgtcggcgtgctcggcatcgcctgggccttcggcggcatgatcttcatcctcgtctactgcaccgcgggggtgtcgggagggcacatcaacccggccgtcaccttcggcctcttcctggcgcgcaaggtctcgctggtgcgcgcgctgctctacatcgtcgcgcagtgcctcggcgccatctgcggcgtcgggctcgtcaagggcttccagagcgccttctacgtgcgctacggcggcggcgccaacgagctcagcgccggctactccaagggcaccggcctcgccgcggagatcatcggcaccttcgtgctcgtctacaccgtcttctccgccaccgaccccaagcgcaacgcccgtgactctcatgtccccgtgcttgcccctctccccatcgggttcgcggtgttcatggtccacctggccacgatccccatcaccggcaccggcatcaacccggccaggagcttgggcgctgctgtcatctacaacaacgacaaggcctgggatgaccactggatcttctgggtgggtccattcatcggcgccgccatcgccgcggcgtaccaccagtacgtgctgagagccagcgccgccaagctgggatcgtctgcctccttcagccgctagatcgatggcctcccgccggacaaggacagccggaggcgtgaactgtagatataccagaggccggaccaggacagcgtgtcgtcgttggttgcctctagccatgatgcgtcgttatatatgcatgccttatgatcagtttgtatttccactgcattttgcttgctttaattttccttccaagctagtgtgattgttgtgctgtacttatccgtgtacgacgagtcgacgactgggtaaaatgaaaaagaaaagaaaaaaatgcatatatttaagttttttag

SEQ ID NO: 28373 - DNA, 940 bp, Zea mays
  Clone ID: LIB4756-076-G12_FLI
ccgggatcgaagccggagaccccagaaagagtccgtaaacaactcccggccatggcgaccgcagaccgggtcgccgccaccttcctctcctctttccccactcaccatccccgccccttttcctccgtttccctcgtgacaaaccctgtcctacccgtctcccttcgggccgctgtcacaggtggcccacggctcgcctcccgtctccgggtccaccgcgtcggcgccgccgtcgcccagcttcccaccacgaatccggaggtagcttctggggagaagaagatcagatggtcatcaagggctgtgcggtcttttgcgatggcagagctggaggcccggaagatgaggtaccctaccacaggcaccgaggggctcctcatgggcattcttgttgaaggaactagtggcgcagcaaaacttttgcgtgctaatggaaccacacttctcaaagtgcgtgaggaggcagcgaatgttcttgggaaatcagaaatgttttactttagtcccatgcatccaccattgacagaagctgcacaacgagcccttgattgggctgtcaatgaaaaattgaaatcaggtgaggatggagaagtaaccgccaatcatttgctactggggatatggtcagataaagagtcggctggtcataaaatcctgtattcgcttggatttgacgatgagaaagccagtttactggccaaaacggctggtgaagaggctgcaatgagtcttagagagcaaggagagcacctaatttattcgtcaacttaagttggtattgtgcactagcttttatgcacttcttggtgcctcgagacgttgacctggagaggctgcctctacaaactttagaacttattatggagatatgctaggtcagatacgatatttgtactctcacgattgccgatgcctgtgaaaacgttgcgctttgtttgcc

SEQ ID NO: 28374 - DNA, 1297 bp, Zea mays
  Clone ID: LIB4756-076-H4_FLI
ccgggaaaccaaatcgcttaccgcccccgaagcgtctcggttcgcgtagcagagctgctcttgcaacaagccaaacaacccagtggctgctagccgagacaggggatagattgagagagaggcgcgcagatggcgacgccgtcgtcgtcgctttgctccagcttcgcctccctgcggaccgcctccatcggccacccccgtggcatcgcctcctccacgcccaggaaggcattccatgtgagggcatcagctcgggttgacaaattctcaaagagtgacatcatcgtgtccccttcgattctgtctgcaaactttgcgaagcttggtgatcaggtaaaagctgtggaggtggcaggatgcgactggattcatgtcgatgtcatggacgggcgctttgtgccaaacatcacaattggacccttggttgttgatgctctgcgtccagtgactgatcttccgttggatgtacatctgatgattgtggaacctgagcagcgagtccccgattttatcaaggcaggtgctgatattgttagtgtccactgtgaacagacatcgaccatccatttgcaccgaacagtcaatcagattaaaagtctaggagcaaaggcaggagttgttttgaatccagcgactccactcactgcaattgattatgttcttgatgttgttgacctggtgctgattatgtctgtgaatcctgggtttggtggccagagctttatcgagagtcaagtaaagaaaattgcagaactgagaaggttatgtgcagagaagggagtgaacccctggattgaggttgatggtggtgttggtccgaaaaatgcctacaaggttattgaagctggcgcaaatgccattgtcgcaggttctgcagtttttggggctccagactacgctgaagctatcaaaggaataaagaccagccaaagacctctagctgtagccgcataaggagctggacgtgtaatcatttactctgtgcaagtttaccagtgatgcaatctgtatagatgtgtgtcttgtccagccatacgtataccggagatgaaaggagacggaggcagtgaagaaatatccttttttttcttctcatttttcacgaggatgcggtgcactgctcccagaatgctgtgtccaatttacaaacgcacaggtggcacatgaactagcagagtagctttatcttgaaaggaaactgtatttggggtcgatgaaccctctggtgttattcttcagactggtaaacgatgtaacatgtttgataatcaataaagtgcgtcgtatggctttccct

SEQ ID NO: 28375 - DNA, 1367 bp, Zea mays
  Clone ID: LIB4756-077-C7_FLI
tgctccccgccaccgcgttcctcgcccgaagcaccgccgcggcctcgcgccaccgcccagaaaccatctccgggcctcgttcgaccgaagcgccttgtgtcatatctccgcgacctagccgccgccgccgacgctgccgtcgtcgtcatcctcgctggcggtgctgtacccgcgtgcagcgcagatccatccgagctcggattgatttcttcctttgctgtactgtcataaccgaactaaaacagtttctgagaggaagcatcgcgattgccatggaagctgggagaatggatcagccatttatggctgctatcaatagccagcctttcgtggaggatattgagccagtgaagaaagccagtggggacatgcctgcgacaacaggaagcggatgcttcgaatgcaacatctgccttgattttgcatcagaaccagtggttactttctgtggtcatctctactgctggccttgtatctacgagtggctgcgccctggggtggagtcagctgccagcgacaacagcagttcggcaaggcgccaatgtcctgtatgcaaggcaacactctcaacggacacccttgtgccactatacggccgtggaggcaactcaaagaagtcacttgatggcatggccatcccgcgccgccccatggtacaccgggagactgttgagcaacagaatgcacagagcaatgtcaatgaccagcactaccaccagagcatggaagacaactctcagcgccagccattgctgcaagcgcaccaccatcccattcccactgggtttgacttcatctaccctccagcaccagtagggcgtggcttgatccactcaactgccggaggggtgctcggagggatggcagagattgtgcttcccttggcgctccgtggccagatgccagcgagcttgtactacacgaatccataccatgctgcgacacagaacgtggaccccaggctgaggcggcatcagatggaaatcgagaggtccctgcaccagatctggttcttcctctgtgtgtttgtggtgctgtgcctgctcttgttctgagacaagactattctatacacctctttgtagatattgaaagtgggagggggatactaatggatgatgcgtatagtgaacagggtaatggtctgtgtcgacaggcatgtgcttaagcatgctggtgtagagttgtaatatgatgagacacggaggtgaaatgcatatttcattcttctctatcactgtcggcctgttaggttgcctacctgacatcttcatgttaggtttagcatcatctgttgtgtattggttggtgtcactgccaagggccttttgatttgtatataaatagaaaatgatggtttgtctacc

SEQ ID NO: 28376 - DNA, 1123 bp, Zea mays
  Clone ID: LIB4756-077-D7_FLI
ccaaaattccgtcgtcgtcgtcagcagcttctgcttgctttgtgggggaaggagagagagagagagcgagagagagatctagtagagaggctagtaggtggtcctcgaacgaagatgttggcggtgttcagcgggcaggtggtggaggtgccggcggagctggtggcggcgggcagccggacgccgtcgcccaagacgaaggcgtcgcagctcgtggggcgcttcctggccgcctccgagccggccgtgtccgtgcagctcggcgaccacggccacctcgcttactcccacaccaaccaggcgctcctccgccccaggtcgttcgcggccaaggacgaggtgttctgcctgttcgaaggggtgctggacaacctgggtcggctgagccagcagcacgggctgtcaagcaagggcgccaacgaggtgctcctcgtcatcgaggcctacaagacgctgcgcgaccgcgcgccctacccggccagcttcatgctcgcccagctcaccggctcctacgccttcgtcctcttcgacaagtccaccaactccctgctcgtcgcatccgaccccgagggcagggtgccgctcttctgggggatcaccgccgacggctgcgtcgccttctccgacgacatcgacatgctcaaaggctcatgcggcaagtcgctcgcgccgttcccgcaaggctgcttctactccaacgccctcggagggctcaagtgctacgagaaccccaagcacaaggtcaccgctgtccccgccgacgaagaagagatctgcggtgccactttcaaggtggtggaagggtctactgtcctgacggcgctgcactgatcgatcatcagctggcggaggcgatgccatgatgatgatgcagaactttgtacatgcgttggtggatggtggtgtaacatagtggctgccaacaagtcatgctcatgcaaaccgatgaatctatctctgtatcatcgatctcggttgcttgctagtccagactccagacatggctatatatatatagctggtgctaataaataggagtataatcgtcatatcgatcggttgcgtgtggaatgccaatcatgtgtgtaatctgttggcaaataacaaacctctgttcctcccc

SEQ ID NO: 28377 - DNA, 912 bp, Zea mays
  Clone ID: LIB4756-078-D12_FLI
ccgggactgtcagtgccagaacgtcaaaaaaggccaaaccccaggcgtgccccgtattttctcccttcccactcaaaggcgcgatggcccctagatcggatcacgccggcggcagcgccgccgctccggtggccgcgcaggcccacttcgactctatggatcccctcttccacgtcctccgcgtgctaccattctccttccttcggccgccccgcacccgcctgaggctgccgtcgaacctggcgcttccctcacccatgaccgtcttctccctcatcctactcacctacttcgcggtcgtctccggcctcgtctacgacgtcatcgttgagccccccggcatcggcagcgcccaggaccccggcaccggcgccgtccgcccagtcgtcttcctcccagggcgcgtcaacggccagtacatcatcgaggggctctcctccgggttcatgttcgtccttggcggcgttggcatcatcctcctcgaccttgcggtcgaccgcaccaggccccggagcctccgcgcctcgtttggaagcgccggcgcagtcgccgttctcatcgcctacgccatggccatgctcttcctccgcatcaagatccccggctacctttggtgaggctttaaatcttgcctgttaactagaccagatccgttgcaagatctcgctacatctaaatagacctgcgtgctgtggagcgtggactagcttactcctcttttagttatgtcaattaatgttacatcgcaccatgttgtataatatctactcagagttgctaggtgaggatatcattatgcaatggtagtagacaaagttcttagtattgagtttcatggcttgtgtggaaccacactatttatatcaacatggtgtagttgattatatcaatataatctgttattttgtaccc

SEQ ID NO: 28378 - DNA, 617 bp, Zea mays
  Clone ID: LIB4756-079-G2_FLI
ccgggaaccaccaccaaatcaatcccgcgataccctctcactaccccagatttgctctcgtggccactcatcagtcacgatgcagtctatccgacaacccctgcgctctgcgctatcaaaggccgcaaccaggcagtatgcgaccgcttcctcgcagtatgccgagacgattaagaaccttcgcatcaacagcgacacaaaggttctgttccagggtttcactggaaagcagggaaccttccacgcacagcaggcaattgaatacggcacaaaggttgttggaggcacaaaccccaagaaggccggcacccagcatctcggactgcccgtcttcaagaatgtggcagatgctatgaaggagacccaagctaccgctactgccatcttcgttcccccaccggtcgctgccgcgagtatcgaagaggctattgccgccgaggttcctctgattgtgactatcactgagggaattccccaacacgacatggtgcgcatcacagatatgctcaagtcccagagcaagtctcgcatggtcggccctaactgccccggtatcattgctcccggtcaatgcaagattggtatcatgcctggattcattcacaagcgcggccctc

SEQ ID NO: 28379 - DNA, 1060 bp, Zea mays
  Clone ID: LIB4756-080-C11_FLI
ccgggctggcccggcagtggcagccaggctctcacacgcctcgcctagtcgccttgccgccgcgcgttatataagccgccccggcaggcacggtcggtcgatccagcaatacccgacgcgcaagccagtgccgcgcccagatctccgcgacagatcagtcgttcgtccagctaactgcactgcacgcaatggccaccacggcgaccgaggcgaccaagacgactgcaccggcgcaggagcagcaggccaacggcaacggcaacggcgagcagaagacgcgccactccgaggtcggccacaagagcctgctcaagagcgacgacctctaccaggtaaacaagctgggcgcaatgaatggctgaatctgaccgggatccgagtctctgaccgcggggggagaatgatccgcagtacatcctggacacgagcgtgtacccgcgggagccggagagcatgaaggagctgcgcgagatcaccgccaagcacccatggaacctgatgaccacctccgccgacgagggccagttcctcaacatgctcatcaagctcatcggcgccaagaagaccatggagatcggcgtctacaccggctactcgctcctcgccaccgcgctcgcactcccggaggacggcacgatcttggccatggacatcaaccgcgagaactacgagctaggccttccctgcatcaacaaggccggcgtgggccacaagatcgacttccgcgagggccccgcgctccccgtcctggacgacctcgtggcggacaaggagcagcacgggtcgttcgacttcgccttcgtggacgccgacaaggacaactacctcaactaccacgagcggctcctgaagctggtgaggcccggcggcctcatcggctacgacaacacgctgtggaacggctccgtcgtgctccccgacgacgcgcccatgcgcaagtacatccgcttctaccgcgacttcgtgctcgccctcaacagcgcgctcgccgccgacgaccgcgtcgagatctgccagctccccgtcggcgacggcgtcacgctctgccgccgcgtcaagg

SEQ ID NO: 28380 - DNA, 931 bp, Zea mays
  Clone ID: LIB4756-082-E7_FLI
ccgggagagagatctcattctccgatccgcccaggccaccatggcggaggatgctacgagcagccacccgtcacgctacgtcaagctcaccaaggaccaggacgcccccgccgaggacatccgccccggcgagctcaaccagccagttcacgtcccgcagctcgaaggccggaggtgcagcgagtgcggtcaggtcctgcccgagagctacgagccgcccgccgacgagccctggaccaccgggatcttcggatgcaccgatgacccagagacctgccgaactggattgttttgcccctgcgtgctgtttgggcgcaacgttgaggctgttagggaggacatcccttggacaactccttgcgtgtgccatgctgtattcgttgaaggagggatcacgctggcgattctgacggcgatatttcacggtgttgatccgaggacgtcattcctgattggagaaggtctggtgttcagctggtggttatgtgctacctacactggcatcttccgccaggggcttcagaggaaatatcatctcaagaactctccgtgtgacccatgcatggtccactgctgcttgcactggtgtgccaactgccaggagcatcgcgagaggacgggacggcttgcagagaacaacgcagtgcccatgacggttgtgaacccgcctccggtgcaagagatgagcatgctggaggaggtggaggagaagggagcagagaagagtgaacacgatgatgtggaggtcattcctctatagatagggtcggagtccgagtgaggatagcactagcagcagcagatgacgatcacaacttctggtcattcctctatagttagttagttattgatctttcaacaacaaaatgtggtggtgtggcaactgtccatttttattatcccaaataataatactgcactacgttacggc

SEQ ID NO: 28381 - DNA, 2034 bp, Zea mays
  Clone ID: LIB4756-083-A4_FLI
ccgggcattcattcattcattcccctcgcgtcgcgtgattcgattggattccgttcccccgccccgttccgttccttcagcgccgctgccgctgccgctgcggctgcgccgaggccccagcgagtccccgaggcccgaccccaaaggctgcggcctgcggccgtcgcagtcccatcgattcctcccgcttggctttcccacccctcgaagccgaatccgatggttccacccgttgaccgcctccgccatcggaggccgcgccgcctcctccccgccttcttcctcggtccccgcgcccgcctcctcctatagatataccgcccgcgcatcgctccatggcggtcggcggcgacgacgacagcatggagcgggacttcgccgccaggctgcgcctcgcgcattcgccctccccggccacgcctgccgccgccgcctcatcctcccccaccgccgctggggggatcgccttccgcgcgccgcaggagcagttcaccgccgacgacttcgtactcggcaagatctacggcgtcggctcgtactccaaggtggtgcgggccaagaagaaggacactggtcgcgtctacgcgcttaagatcatggacaagaagttcatcaccaaggagaacaagatctcctacgtcaagatggagcgtattgtactcgaccagctcgaccaccctggcgtcatcaggctcttcttcactttccaggacacatactccctctacatggcgctcgagtcgtgcgaaggcggggagttattcgaccaaattgttcggaaaggtcggctctctgaggacgatgcacggttctatgctgctgaaattgttgatatattggagtacttgcatggccttggcctaattcatcgggatgtcaagccagaaaatctactgcttacttctgatgggcacatcaagattgctgactttggtagtgtgaagcctacaagggatactcctatcaaagttctcccaaattcaactactgaaagggcctgtacatttgttggaaccgctgcatatgtaccacctgaggtcctgaactctgccccagcaacctttggaaatgatttatgggcattgggatgcacactgtaccaaatgctttctggctcttcgccatttaaagatgctagtgagtggttaattttccagagaatcattgcaagggacctcaaatttccagagtatttttcagctgaagctagagatcttgttgacaaattgctggatgttgatccaggcaaaaggccaggtgcaggacctgatggttattcttccttgaaggagcatcctttcttcagaggcatagactggaagaacctgaggaagacacggccacctaagctcgcaatcgatgcaaatgtaaatgaagatgaggatagccaagattcaaattggttggcacacatgggaagtgtggcagtcaaccaacagtcaaatactgttggtaataatggtgccccgtcatcatctgaagtgcgctcccatatatctaaattagcttccatcgactcctttgactcaaaatggcaagaattcctggaccccggcgagtctgtagtcttaatatcaaagctgaagaagattaataagctagcaaacaagaagatccagttgatcctcactgacaaacctcaattgatctgtgttgacccttcaaaaatggtggccaagggaaacattatttggtctgatgacccaagtgaactcagtgtgcaagtatcagattcttcacattttagaatatgcacgccaaagaaggtgtcaacatttgaggatgcgaaacagcgtgcttggcaatggaagaaggcaattgaagacctccaacgctgccaaaggaattaattttcaattcaaatcaaaactctaaaatgtcgaattaggcactgttaatacatcatatccttttcacttgggaggaacatgagggggtttatttctcctgcatcctgctccaatgcctggttgcaaggaacttgctactcgctaattcacacactgaatgatggcccccaattttttccctttc

SEQ ID NO: 28382 - DNA, 548 bp, Zea mays
  Clone ID: LIB4756-083-B12_FLI
ccgggacaatcacaacctccacgaccaacgaggcaacgaccaaacccttccccctccctagctccgtgctccagcgggagtccgcggcggcggtgaagatgattatcccagtgcgctgcttcacctgcggcaaggttattgggaacaagtgggatgtctacctcgacctcctccaggccgactactcagaaggggatgctctggatgctttggaattgttccgctactgctgcaggcgaatgctcatgacacatgttgacctcattgagaagttgctcaactacaacaccctagagaagaccgagacaagttaagcgagcacatcatgctccaaaaacactactgtttcgcagtatcatagagcttaggtagtatgttgtctcttctctatcagtagaaatgggttgtgagtgtgaacatgcttttgctcatgagcattcaaggacttttcatgcgacagtgcttgttgccacctatgcaacgatgttggatattttaagtgatataattgctaaaagaaagctaatgtatttgtgtgaattgggtcg

SEQ ID NO: 28383 - DNA, 1213 bp, Zea mays
  Clone ID: LIB4756-083-D1_FLI
ccgggggtaaaccttccgtccacccaatgctgccgcccgctggcgctttttccgtaattcacctgattggccaattccagttctgttctggtgtaattgttatttccgcgttgcatgatcacagtagtatcgggtgatgcagcggttagctcgctctcacccgagagcatcgagcacaacgatctgctcatagttgggcctggcgtgctcggccgaatcgtcgctgagatgtggaaacaggttgcaaggtttatggccagactacaaccacagatcatcacagtgaattgactgatattggtatcattccctccttgaaggggtccgtaccgggtccaaaatttccatatgttatcttctgtgctcctccatatcgttctgaggattatgctggagatctgagagtagcagcttcaaattggaatggaaaaggctctttcctattcacctcgagtactgctgtgtatgactgcagtgacaatggattctgcagtgaggattctccttgtgtacccattggtcaaagcactcgtactgatgtgcttctaaaagctgaaaatgttgtccttgaggcaggcggctgtgttcttaggctagtaggactttataaatcagatcggggtcctcatgtttactggctgtcaaaaggaaccttggatgtgcgtcctgatcatatactcaatctgatacattatgaagatgcagcctctcttgtaatttccatcatgaaaaagagattacggagctgcatctttgtgggttgtgacaacgagcctctgtccaggctagagatcatggaccgtgtcaacagaagcaggaaatttgacacacagtttcatggcttcactgggactgatggttcgctggggaagaggatggacaactccaaaactcgggcaaagcttggatggcagcccaagtatccgagctttacagagttccttggtctcagcaatctctaactttcatgcgatgtcactaaatacctgttattaaagatgaatatactgatacataaaagagatgatgacagatttggaagtggaatgttgtttgcttataccgcagttttcgactatcttttgatttcttctgttagatcttgtaaagcattgcagcatggtgtggcatgtacctgtgttgccttctattcgcttctgttaactcatgaaagcattgacttcaatacctgttaattgtttccatggcttcc

SEQ ID NO: 28384 - DNA, 926 bp, Zea mays
  Clone ID: LIB4756-083-E2_FLI
ccgggctctcgtacccaaaaaaaaaatcgtgctcggcacacgcaggcggcgctccgtctcgggctctcagcgacggaggggcagacgccagacgggcagtcccagctcgctacgacgctacatcaacatgaggctcaataaggtggaagtgaaccttataaggctgctggaggctgctccacggcagcaaaatcaggctaaacttgtctattatgtaaccacagcgcgggagctgttggagcagctaggagctgagacaacaccagaagggatatcaagcatttcaaaagctaagctttctgagtattcagaaaagattgaagcactagcttccaggcttgctgcttcagtgcctgaaaatgaaaatccgattattgaaagcaaagatgaaatctcttatgaagaagcaaagccagaaagtccaatatctttatcatcaggactgcgaaggagatcaacagcccatgctgtggttggaacaagccatcaggaaaataaagaagatatcggagcaccgataaaattggatgcagaagctcaggcttacattgagaagcataggaagctccaagaagatttgactgatgaaatggtcgagttagcacgtcaactgaaggaaagtagcttaatgatgaaccaatcggtgcaggagacagagaagatccttgattctaccgagagggccgtggagcacagcctggcaagcacaggccacgcaacctcgcgagctgcggaggtctactcgctggcttccaagactacgtgcttccagtggctgctaatgtttgtgatgacctgcatgtttgtaatggtggttctgctgataagggtcacttgaatgatgaggctgtagcaggcactcaaatcgtactcacccttgtcattgtttcatgggaattctttgtggtcaggtcatggtattttcg

SEQ ID NO: 28385 - DNA, 1246 bp, Zea mays
  Clone ID: LIB4756-083-F11_FLI
ccggggtccaaaactgtctcttccacgtccttccgggtcctatcgctcctctccgtcgccggtggagctcatggcatcctccatggccgccgccgccaccgccaccgccctcccgctgccgtccgggacgacgcagaggccgtctgcccagggccgcctcctcttcaccgccgcgcccgcccgctcccgctccctccgcctctgccccgccggccgccggtcggcccgctcctcgcctcgggccaccaaggctgtggtggcagcgttggctgatcctctcaaggtcatgatatcaggagctccggcgtccggcaagggcacacagtgcgagctcatcaagaccaaatatcaactggcgcacatctccgccggagatttgttgcgggcggagatcgctgctggctctgagaatgggaagcgggccaaggaattcatggagaagggccagctcgtgcctgatgagattgtcgttaatatggtgaaggaacgccttcggcaaccagacgctcaagaaaatggttggcttttggacgggtacccaagaagctattcacaggccatggccttggaaactcttgaaatccggcctgatactttcattctgttagatgttccagatgaactccttgttgaaagggtggttggaaggcggcttgatcctgtaacagggaaaatatatcatttgaagtattctccgccagagaatgaagaaatcgcttcaaggcttacacaaagatttgacgatacagaagaaaaggttaagttgaggctggagacttattaccaaaatatcgagtccttgctatcaacatatgagaacattattgttaaagtgcaaggagatgccacagtggatgctgtctttgctaagatcgacgagctgctgggttctatcctggagaagaaaaatgaaatggtgtccagcacatgagcaaggtaaaaatgattgggtgcagtgcagatccgacaagttcatgtaatgcaagtcacctctcatgataggaacttctccaggggaatatatctgaagcacaggacgacacgtacaagtaatgtaagccagtctcacgtaatggaaatttctccatgtggatgtggtcaaagcataggattttttttctccaattgttaactgtacgcgaatggaagcgacagatcatttgtaggttgtgagggcttcaaagatcatctgctgctgtacatgttttgttgctgtcttgtgaacatacatgttttgttgtttctt

SEQ ID NO: 28386 - DNA, 1371 bp, Zea mays
  Clone ID: LIB4756-084-B9_FLI
ccgggatccgcgcgctctgctctccctgcccgcaccccgcagatcccgaatggccatgcctaccgccgcctgcaggtcggggccggatgcactgcaagctgcggccccgagcaccgggctgaactgaagaggtgtcgaggtcgccattaatcctcaacaaccagctgccaccaacgctatatgctcaccatcgccagcaacttggtggcttgagagcttggaatagcggggggtggaggaagcggaagaggagcttcgttttgtgttctagagggagtcatgttccatggcggcaggcctctgtccctccgggggtctctcaaggcgcttgaagctgatatccaccatgccaacaccctggcgcatgctatacacagggcgtatgggggtgcctgcgtgcagatgaggctgtcctacagctccatggctccaatctttctcaaccttatccaatggatggactgcagctgctccctgtcatacacgctccctagctaccttggcctgctcgaggttctcgtctacaaggtttatgtcgatgaagatgcctctatatccaccatagaaaggagggcgagcctgaaggaattctacactatcatataccctttcttgcaacaacttgaggacaacttgatggacaaggactgcaaggacaaagggtggtctgctgctgccggcggcggcggcggcggtcggaagcttgttgccgaagatgacagggaggatgagtgtggcatttgcctggagacctgcaccaagatggtccttccgaattgcaaccatgccatgtgcatcaactgttaccgagactggtacacaaggtcccagtcatgcccgttctgccgcgggagcctgaagagggtccggtccagagacctctgggtgctcaccggcgacgacgacgtgatcgacacggtgacgctggagaaggagaacgtgaagcacttcctcagcttcatcgacagcctgcccctgatcgtccccgacaacatgctgctggtctactacgactacctagtctagcaaggctcctccccccaccccccactctgaagctctggaagaggaagggggtctgggaagaagacgcggcgtacaagcgacaagggttacccgcagccgaccatcctctgcggatcgagttggcaaagcgaagccgttgccgaccaacagacgatactctcgtgggcatgccacgccgttgcgctggctttattgcatggtggcgttgctcgctgtaatggttgtaaataaagaaggaaaatgtctcgggttttatatatcatatactagcttgacatttctcgtctggcgaattgccggactgttcagaatgaagaaatcagggggcctctacttctctgctct

SEQ ID NO: 28387 - DNA, 910 bp, Zea mays
  Clone ID: LIB4756-084-D3_FLI
ccgggacctcgttccccatccgctcaggccaatcaacagaagtgacgcgagcacgagcacgagcacacatcccctcccttcctcgttgcgtgccctcgccgcagacctctgccatggcggaccagctcaccgacgagcagatcgcggagttcaaggaggccttcagcctcttcgataaggatggcgacggctgcatcactaccaaggagcttggaacggtgatgcgctcccttggccagaaccctaccgaggcagagctgcaggacatgatcaacgaggtcgatgcggatggcaatgggaccatcgacttcccggagttcctgaacctgatggcgaggaagatgaaggacacggactcagaggaggagctcaaggaggccttccgcgtcttcgacaaggaccagaacggtttcatctcggctgccgagctccgccatgtcatgaccaaccttggcgagaagctgactgacgaggaggtcgacgagatgatccgtgaggccgacgtcgacagggacggccagatcaactacgaggagtttgtcaaggttatgatggccaagtgaggagcggtccccgtgaaataagtatctatggattgaagcggattatcaggcacacaagctgtactttgtcatgtccctttgagtacgcatcagtgtcatgcaggtggttatgtcttgtagtggtccgtttaggcggtgtagtcatgggaacgcgacatcagatacctggtttcttttgattgtgatgttatcttgcattattgcacctgtaggatttgttgaagctcatattatccagggttttggatcttttgtgctagtcttatgtctttgtgtatgcagaggctgagctaggattatggtatataagggagccaactaattcatcaatactatatgatgttatc

SEQ ID NO: 28388 - DNA, 1124 bp, Zea mays
  Clone ID: LIB4756-084-F8_FLI
ccgggcattccgtcgtcgtcgtcagcagcttctgcttgctttgtgggggaaggagagagagagagagcgagagagagatctagtagagaggctagtaggtggtcctcgaacgaagatgttggcggtgttcagcgggcaggtggtggaggtgccggcggagctggtggcggcgggcagccggacgccgtcgcccaagacgaaggcgtcgcagctcgtggggcgcttcctggccgcctccgagccggccgtgtccgtgcagctcggcgaccacggccacctcgcttactcccacaccaaccaggcgctcctccgccccaggtcgttcgcggccaaggacgaggtgttctgcctgttcgaaggggtgctggacaacctgggtcggctgagccagcagcacgggctgtcaagcaagggcgccaacgaggtgctcctcgtcatcgaggcctacaagacgctgcgcgaccgcgcgccctacccggccagcttcatgctcgcccagctcaccggctcctacgccttcgtcctcttcgacaagtccaccaactccctgctcgtcgcatccgaccccgagggcagggtgccgctcttctgggggatcaccgccgacggctgcgtcgccttctccgacgacatcgacatgctcaaaggctcatgcggcaagtcgctcgcgccgttcccgcaaggctgcttctactccaacgccctcggagggctcaagtgctacgagaaccccaagcacaaggtcaccgctgtccccgccgacgaagaagagatctgcggtgccactttcaaggtggtggaagggtctactgtcctgacggcgctgcactgatcgatcatcagctggcggaggcgatgccatgatgatgatgcagaactttgtacatgcgttggtggatggtggtgtaacatagtggctgccaacaagtcatgctcatgcaaaccgatgaatctatctctgtatcatcgatctcggttgcttgctagtccagactccagacatggctatatatatatagctggtgctaataaataggagtataatcgtcatatcgatcggttgcgtgtggaatgccaatcatgtgtgtaatctgttggcaaataacaaacctctgttcctcccc

SEQ ID NO: 28389 - DNA, 1779 bp, Zea mays
  Clone ID: LIB4757-001-A1_FLI
ccgggaaaccacactccactccagcactgaacacttgattgattcagtgggtagctagctagctgaatcacaatggatcctaccaagttccgtccgtccagcagccacgacacgacggtgacgacgacgaacgcgggcgctcctgtgtggaacgacaacgaggcgctgactgtggggcctcgcggtcccatcctgctggaggactaccacctgatcgagaaggtggcgcacttcgcgcgcgagcgcatcccggagcgcgtggtgcacgcgcgcggggcctccgccaagggcttcttcgagtgcacccacgacgtgacgtcgctgacgtgcgccgacttcctgcgcgcgcccggcgtgcggacgcccgtgatcgtgcgcttctcgacggtgatccacgagcgggggtccccggagacgatccgcgacccgcgcgggttcgccgtgaagttctacacccgcgagggcaactgggacctgctgggcaacaacttccccgtcttcttcatccgcgacggcatcaagttccccgacgtgatccacgcgttcaagcccaacccgcggtcgcacgtgcaggagtactggcgggtgttcgacttcctgtcgcacctccccgagagcctgcacaccttcttcttcctcttcgacgacgtgggcgtgccgtccgactaccgccacatggaagggttcggcgtgaacacgtacacgttcgtgagcgcggcggagaaggcgcagtacgtcaagttccactggaagccgacgtgcggcgtgcggtgcatcctgacgcacgaggaggcggcgctggtcgggggacggaaccacagccacgccacgcaggacctgtacgactccatcgcggcggggagcttcccggagtggacgctgtacgtgcaggtgatggacccggacacggaggagcagtacgacttcgacccgctggacgacaccaagacgtggccggaggacctgctgccgctcaggcccgtggggaggctggtgctggacaggaacgtggacaacttcttcaacgagaacgagcagctggcgttcggcccggggctggtggtgccagggatctactactcggacgacaagatgctgcagtgccgggtgttcgcctacgccgacacgcagcgctacaggctggggcccaactacctgatgctgcccgtcaacgcgccgcgctgcgcgcaccacaacaaccactacgacggcgccatgaacttcatgcaccgcgacgaggaggtggactactacccgtccaggcacgcgccgctgcggcaggcggcgccgcccacgccactgccgcccaggccggtcgcggggaggagggagaaggcaaccatacgcaagcccaacgacttcaagcagccaggggagaggtaccgctcctgggacgccgaccgacaggaccgattcgtgaggcgattcgccgactcgctcggacacccaaaggtcagccaggagctcaggtccatctggatagacctcctcgccaagtgcgacgcgtcgctggggatgaagattgccacccggctcaacatgaagccaaacatgtgatgcatcatgcttgtgctcaataataatgaagacgcatgcatgtcgtcgccaggaacaaagatcgagaaataatacaagaccagcacgcatgcatgggcatactctatatatatgtatagcccgtgcccgtgtccgcctttgtaccaatacaagccaaaccaagtggatgtgtattattattattattattgcgttatcacatacatgtacccctgctacccg

SEQ ID NO: 28390 - DNA, 1956 bp, Zea mays
  Clone ID: LIB4757-001-B6_FLI
gttgcggatgatttcctctcgtctcgtctcgtctcgtcccatactcccgtcctgtccgtcttcacctgcgttccccgggtcccgacacgccgctgtaccagtcccgcccgcctgcgcacttctcccacccccgcgccgcctccggcgccggcgagccctcccgacgctcctcgaacgatccgtccctctcgcggcccgtctctctgccgcttccagcccaaggggaggagagggagaggatgtggtcgtcgagccaggcgagcacgaggggcgtcgtggagatggggagggtggaggccgggccgtcgcatttccctaagagacccgcgcctcagaactccgccagggtcaatctgtcaaggacacacacagttaaacctacctctgctggcgaccgttcaggaatttctgttaaatgcaacttggggtggtcttctcaaccatcgcctgacttgaggcatcactttagaggatactcatcagcatcagaggcagttcttacttcccaatctgatgtgagaaaactgtttgttggcaatgaaaaaatcggtgttctcttgctgaatcttgggggcccagagactcttgacgatgtgcagcctttcttgtttaatctttttgcagatccggacattatccgtcttcctaggctctttcgctttctgcagaagccacttgcaaaattcatatcagaagtgagagcaccaaaaagtaaggaaggttatgcatccataggtggcggttctcctctacgacaaattactgatgcacaggctgaagcattgagggaggcattacatgggaaagatgttcctgccaacgtgtatgttggaatgcggtattggcatcccttcactgaagaagccatagaacaaataaaacgggatggaatcacgaaacttgttgtgttgcctctataccctcagttctccatatcaactagtggttcaagtctccgtttattggagagcatatccagagaggatgagtatctcgtgaatatgcaacatacagttataccttcctggtaccaacgtgaaggatatatcaaggctatggcaactttgattgaaaacgaattgacaaaatttcaagaaccccaaaaggttatgatatttttcagtgctcatggagttcctctggcatatgttgaagaagctggtgatccatataaagcagaaatggaagagtgtatcgatcttatcatggaagaactggaaaaaagaggaataacaaatccgtgcatacttgcttatcagagccgagttggaccagtggaatggctgaaaccgtacactgatgagacaattattgagcttgggcagaaaggggtaaagagcctgcttgctgttcccattagttttgttagcgaacacattaaaactttggaagaaatcgatgtggagtacaaagagttggctttggaatctggcatcaagcactggggacgggttccagcactaggttgcgaacccacattcatttcggatcttgctgatgctgttattgaaagcctaccttatgttggcgcaatggcagtttccaatcttgaggctcggcagtctctcgtacccctcgggagcgtggaggagctgctagcagcatacgactcgaagcgcgatgagctccctccaccggtaatcgtgtgggagtggggctggacaaagagcgcggagacctggaatggccgtgcggcgatgctggccgtgctggctctcctggtgctggaagtgaccaccggcgaagggttcctgcatcaatggggaatcctgcctctgttccgctgagccgacagttctgttcatgatggggtcataattttgctgcagccgaaggaagttttgaacttctgatgttgtatatgaatcaatttgccttaaatcgtcgaggggaaaagaggagaaaaatggtaaaatatggacagaattcgacggtatatcatgttatattgtacat

SEQ ID NO: 28391 - DNA, 854 bp, Zea mays
  Clone ID: LIB4757-002-A7_FLI
ctcgaggccggccgggataccctcaaccaccccaggccaccacctctctcctcttccctcacacccgctcctctactctgcctctacccgcttctccgcgacttttcaacgctcgccctctccatacaccagcagatcgcgccagtcgatttcatgaccacggacatccagaatctcaagtccttcgatccgttcgcggaggtcgacgatgctggaggcgaagtaaagtctactcagcagaactacatccatatccgtattcagcaacgcaatggtcgtaagactctaactacggtccaaggcctacccaagaagtttgatcagaagaagattcttaaggtcatcaagaagaagtttgcttgcaatggcaccgtcgtcgcagacagtgagatgggagaggtgattcagttgcagggtgatcaacgcaaagatgttatggacttcttgaccgacaagaaggagggcctcggccttgatggcaagaccatcaaggttcacggcttctaaccgcgtcgaatacgctatgcctaccgccgctcctcacgccgagcgaccgcttcgagcctgacgacaacgagactcgtacggcggaggaggagcatgccgacacgttggacgcgtagcacacacgatccacgctgctgagatgcggtaacggcatagcaagtatcccgcggaggacccacggttccccgtatctcgatttctcttggaggaacagacgcggctatcggatggtttttttgtacgctgatgtatcaggtgctggcaggatgatgggaggatagttcgtacaagacaaacaagatattagtcttctagtcacggtcaatctaaagagtgtttttttcaag

SEQ ID NO: 28392 - DNA, 1229 bp, Zea mays
  Clone ID: LIB4757-002-C4_FLI
ctcgaggccggccgggttcatcaattgcagacttggcagtttttttctcctgcctctgcgtgcggtctccctgtgtctgtgggcaccgtgtctgtgacccttccctctcgcgtgcgctctccctatcgcgagtctatcgctctctctcggcgtgcgtcagccaggcaaaccgccggcgccctagctagccaggcctctgtcccttcgccaggccttcatcggggactagcgcacgcacccactagatgtctgcgccgaacggtccagctgcttctccgatggtgtaccctgtctaccttaccgggacattcccccagcaagcaggggatgaccaggctcaaggtccggggatatatgccatacaacagaaccagttagcggctgcgatgggaatggggtgctatgctccaaccacactcattccactcgcttacaatatcccaacggaaagcgtcggagcttctgctggtgaagagaatgtacaggatgctagacagcaaaatggacctcaaagacaagttgttgtgaggaggtttcactttgcttttcagcttgacttggccctgatcatcaaactagccgctgtggtgtttctctttagccaggaaggctcaaaacaaaggctgtttcttctgatactgtttgcctcattgatttacttatatcaaaccggagctattacaccttttctaagacggcttcagcgggcaggaggtgcagctgctcatccaccacaggctcctgctcgggtcgagaaccgtgctcctctgcctgcccagaatgatggcaatgagcagcccaatggccctgcaaaccctgaccaagctgcggagaacccgaacaagatgctgcagctggtaacgagaatccgcaagaggcagaggtagaaggcaatcggcgcaactggcttggaggtgtcttgaaagaggtccagctggttgttgtagggtttgtcgcatcgcttcttcctggttttcagcacaatgactagccctcgtgtcgtcaccgtggaataagctaccagcagtgaaatagttatggtgacatactgacataggggaaataattatatgaagcagctgaaaggtttctattatgcatctttgctgttaatattgttttgtttcatgttcaaatactttttgaaccaatcctgtccttcttccagcaatacttgcagctcacatgtaaatgtaaagactagcctgacacccccatcaattgaacgg

SEQ ID NO: 28393 - DNA, 1864 bp, Zea mays
  Clone ID: LIB4757-002-G5_FLI
ggaaagtgatctctgaccgcgtgcctgttgaaatcccacgctgccctcggcgctgcgcctggccccggcacctacctcccccctccccacctcgccgccggcgggtggagtcgggctggagcagccgctctcctctgttaccccctaaccccctataaagaaaaagaaaaaaacagagagagagcgagcgaccggcggctcggcagccatggggcacggcgtcagctgcgcccgcaccggtgacgagcacgactacttccgcgcggcgcaggtcggggacctcgaggccctggaagcgctcctcgacgctgacccctcccttgcccgccgcgccacgctctacgaccgcctctccgcgctccacatcgccgccgcgaatggccgcctcgaggtgctgtcaatggtcttggatcacggggtgccgccggacgtggtgaatcggcacaagcagacgccgctgatgctcgcggcgatgcacggcaagaccgactgcgtgctgaagctcctgcaggccggcgccaatatcctcatgttcgactcccagcacgggcggacctgcctgcaccacgcgtcctacttcggccacgtcggctgcctgcaggccatcctcacggcggcgcggaccacgccggtggccaactcatggggtttcgctcggttcgtcaacgtgagagacgaccacggcgccacgccgctccacctcgccgccaggcagggccgccccggctgcgtgcaggcgctgctggagaacggtgccatcgtctccgctttgaccggctcatacgggtttcctggtagcacgtcgctgcacctcgccgctcgcagcgggagcctggattgcacccggaagctgctcgcctggggagcggatcgtctccggagggattcagcagggaggatcccttacgccgtggcgctgaagcgcaaccacgaggcgtgcgcggcgctgctgaacccgtcggcggcggagcccatggtgtggccgtccccgctcaagttcatcagcgagctggagccggaggccaaggcgctcctggaagcggcgctgacggaagccaacagggagagggaggagaagatcctaaggggcaccaagcactctccgcctcctcccacctgggaccacgcgagcgacgccgccgacgccgacgccatcgacgacgcggcctcagatgccagcgccagcgacgcggagctgtgctgcatctgcttcgaccaggcgtgcacgatggaggtgcaggactgcgggcaccagatgtgcgcgccgtgcacgctggcgctgtgctgccacagcaagcccgacccggtgacgctagcgctgccgtcgccagcctgcccgttctgccgcggcagcatctcgcggctgctcctggtggcccgggcaagcagcgacgacgcagacaccgagaagtcggcggcagcggctgcggcagcggctgcctcctccccgcagctcgtccggcggcggtcccggcggtcgcacaacctcagcgacggcggcagcagcagcttcaaggggctgtcgtccgccgtggccggttccttctccaagatcgggcgcgggtcgagccggacgatggccgacagcgacggctgcggcgtggacaagcccgagcacgacccgtgatcggcattggatcctgcgcatgtggagccgagcgcggggccatttgcggacatccaatcgaatccaagccaagcgtgactgcttgctgcgaaaataaccgcatccttttcttcttcttctccccatgtccctgtctgtcaatcctattcttgggcgtgccaggatttgttcacctggccattgccgtattccattgtcaccgaccggctatagtatatagtactagattccatttcc

SEQ ID NO: 28394 - DNA, 1711 bp, Zea mays
  Clone ID: LIB4757-002-H6_FLI
aggaggcaagtcgtgccgtgccgtctgctccttgcctgctctgctggtctcgccgttgccggcttgccccgtccgtgcgtccatctgtttcctccttggatcctcgacaagcaatggccatggaggaggagcagacaccacccgagctgcgctacctctcgggcctgggcaacaccttcacgtcggaggcggtgccggggtcgctccccgtggggcagaacaacccgctagtgtgcccgctgggactctacgccgagcagctctccggcacctccttcaccaccccgcgcgcccggaacctgcgcacgtggctgtaccggatcaagccgtcggtgacccacgaacccttctatccgcggaaccccaccaacgagcgcctcgtcggcgagttcgaccgcaccaccaccgtcgccacgcccacgcagctgcgctggaggcccgccgacgtgcccctccacccgggcctcgacttcatcgacggactctacaccgtctgcggcgccggcagctcatgcctccgacacggatacgccatccacatgtatgctgctaacaagcccatggatggatgctccttgtgcaatgcggacggtgacttcctcattgttccccagcaaggaaggttatttatcacaaccgagtgcggagggctgctggtttcacccggcgagatcgtcgtgatccctcaaggtctccgatttgctgtcgacttgccggatggcccctcgcgtggctatgtctctgagatcttcggcgcccattttcagctccctgatcttggcccaattggtgccaatggcttggcttcgccgagggatttcctttccccgacagcatggtttgagcaggagcaccaccctggatacacaatagtgcacaagtatggtggcgagctgttcagcgccacgcaggatttctctccattcaacgtggtcgcgtggcatgggaattatgtcccttacaagtatgatctgagtaagttctgtccattcaacaccgtcctcttggatcatggcgacccgtcagtgaacacagttctaactgcgccaactgataagcctggcgtcgcgttgcttgattttgtaatattcccacccagatggctggttgctgagaatacattccgcccaccctactaccaccgcaactgcatgagcgaatccatgggcctcatctatgggatgtacgaggctaaggccgatggttttcttcctggtggcgccagccttcacagctgcatgacaccgcatgggccagacaccaagacgtacgaggcaacgatcagccgtgctgctgccaacgagccatccaggctcagtggtacgttggcgttcatgtttgagtcttggcttatccctcgcgtgtgcccatgggctctggattccccgtgtcgggacctcgactactaccagtgctggatcggattgaagtcacacttttcacctcctgctgctgctgttgatgatgagaacgagtagctgcttacagcagcagtcttggaacggacaggcagcgaactgaaactggggtggatatgctgtacgtcgtgtcctgcttgctgtcggtttctgaagcttttagctggcagggacaggcggctgttggctttgctgattgcccaaccctctcctgtaatattaatcctaccagagaaacttaaacttgactcaaccgatatgctattaaataaataaagcaagcaagttaggat

SEQ ID NO: 28395 - DNA, 1776 bp, Zea mays
  Clone ID: LIB4757-004-A1_FLI
acaagcgtccactatctgtgcctcttcctggctctgatcctaccgctcctgctcctcaggctactcagggggcgccgcagcgacagcggcgtccggctgccgcccggcccatggcggctgccggtgatcggcagcctacaccacctcgtgggcaagccgctggtgcaccgcgcgttcgccgacctcgcgcgccgtctggacgcgccgctcatgtacctcaggctcggcgaggtccccgtcgtggtggccacgtcccgggacgccgcgcgcgaggtcctgcggacgaacgacgtcacgttcgccacgcggccgtggagccccacgatgaagatcatgatgcaggacgggctgggcatggtgttcgcgccctacggcgaccactggcgccagctccggaagatcagcatcctggagctgctcagcgcccgccgcgtccagtcgtttcgccacgtccgggaggacgaggtggcgcgcctcgtcgccgcagtcgccgccaccgcaccaggccagcccgtcaacgtcagccaccggatcgccgtgctcgtcgccgattcggcggtgcgcgccatgatcggggacaggttcagcaggcgggacgagttcttggtgtcgctcgaggaggggctcaagctcgtctccgggttcagcctaggcgacctattcccgtcatcgccgtttatgaacttcctcagcgggacggcacggcgagcgcatgcgaaccataggaagaactttgagctcatggaatgcgccatcaagcagcacgaggaaaggagagcccaagcggcggtgaacggcgctgctgtccaggaggaggaagcagaggacctagtggacgtgctcttgaggatacaaaaggatggcggcctcgacatgcctctcacaatgggaataatcaaagccgttatacttgacttgttcagcgctggaagtgagacatcagcaactacactgaactgggcaatggcggagcttatgaggtgcccggatgtgatgaagaaagcacaagccgagctacgcgacagcctcaatggtaagccgaaagtgaccgaagatgacttggtagagatgaaatacttgaagctcatcatcaaggaaacgttgaggctgcatccagcggcgccattgcttgtgccaagggaagcaagggactcatgcaagatccttgggtacgacgtgccaaagggcaccacggtgttcgtgaacgcgtgggccattggcagggatcctgagtattgggatgatgctgaagagtttaagcctgagcgatttgagtgtggcacggtcgacttcaagggcatggactttgagtacataccgtttggtgccggtagaaggatatgccctgggatggtgtttgcacaggccaatatagagctcgcgctggctgcgctgctctaccacttcgactggaagctcgaagaggggctggagccaagtgagctggacatgaccgaggacataggcctcactgttcgaaagaagaacgacatgcttttgcatcccagcgttagagtgccccataaatattgatgactaaatggaccagcactaagcatgacaaatctagcatggccaagcaccgcattatgttaactaatagtttctgtgtcggcatggaccagtgcatagcgtcgtgtttaggttactacctaaatctctagtgtcggttgaaacacgacacgattaagaagcaggcactattgagtcggattatatgataaagttgtaataatttttagacttgaataatagatttgtaacttaaataaactg

SEQ ID NO: 28396 - DNA, 2002 bp, Zea mays
  Clone ID: LIB4757-004-B1_FLI
ccgggattcatccacgacgacgcggttgccggttgcagccacagctggccatggcctggtggagtaggcgatgctctcgcctcctgcaacaagcaacgcgtggccagcagcccattagcttatatgactgatttggcaaagcttattagcttatataagaactcagtagaaatggagttcttcacagagtacggagaggcaagccagtaccagatccaagaagtcattggtaaagggagctacggagtagttgctgcagctgtggacacccgcaccggtgagcgggttgctatcaagaagatcaatgatgtgtttgagcacgtctcggatgccacacgcatactgcgggagatcaagctcctccggttgcttcgtcacccagacatagtcgagattaagcacatcatgctccctccttctcggagggagttccaagacatctatgttgtttttgagctcatggagtcggatctccatcaagtgatcagggcgaatgatgacctcacccctgaacatcaccagtttttcctgtaccaacttcttcgagctctcaagtacatacatgccgctaatgtattccatcgtgatctaaagcccaagaatatactggctaactcggactgcaaactgaaaatatgtgactttggacttgcccgtgcatcattcaatgatgccccttcagctatattttggacagattatgtggcaacaaggtggtaccgggcacctgaactatgtggttcctttttctccaaatacactcctgcaattgatatttggagcattgggtgcatatttgctgaacttctcactggaaggccactatttcctgggaagaatgttgtacaccaattagatattataacagatcttcttgggactccatcatctgagaccttatcccggattcgaaatgagaaggccaggagatatttgagctgcatgcggaaaaaatatcccgtgccctttactcataaatttcgacatgctgatcctttggctcttcgtcttctagagcgtttgcttgcatttgatcctaaagaccggcctagtgcagaagaggctctagctgatccatactttgcatcccttgctaatgtggaacgtgagccatcaagacacccgatttctaaacttgagtttgaatttgaaagaaagaagctggccaaagatgatgttagagaactgatctatcgagagattttggagtatcatccacagatgctggaggagtacatgaaaggcggagagcagattagcttcctctatccaagcggagtcgaccgcttcaaacggcagttcgctcatcttgaggagcattacagcaaaggagaaagaggttccccactgcaaagaaagcatgcttccttaccaagggaaagagtggttgtatccaaggatggcaatactgaacgacaaattaatgaccaggagagaagcgcagattctgttgcccgcactaccgtgagccctccaaggtcagaggatgctgacatggatgatgtgaaacccacaagcttaagctctcggagctacctgaagagtgcaagcataagcgcttccaagtgcgtcgttgtcagaaataaacacccagagccagaggatgatggaatacctgaggagatggaaggcaccgtcgatggattgtctgaaaaggtctccaggatgcactcctaaagcaggactgtccatggcgacaacaatctcgacacaaggtttctgtctggtgcactgcaatgccgacgacacactgtttggatcttgtgtacacccacagctagttcaactaagatgtagcactagttcatccatggaggaagcagaatggacgatgaagtgtggtcagcctgtcgaccatgaggtgttttcttccaatggagtctagggtatgtttgagttctacaacggcttgtgccgtacgaagtgtcagcagtgtacgaggaggaggatatcgttgtcagtacacattttgcctgtctagaaaattatgagtactttctcc

SEQ ID NO: 28397 - DNA, 1760 bp, Zea mays
  Clone ID: LIB4757-004-B12_FLI
ccgggatgtaaaccacactccactccagcactgaacacttgattgattcagtaggtagctagctagctgaatcacaatggatcctaccaagttccgtccgtccagtagccacgacacgacggtgacgacgacgaacgctggcgctcctgtgtggaacgacaacgaggcgctgactgtggggcctcgcggtcccatcctgctggaggactaccacctgatcgagaaggtggcgcacttcgcgcgggagcgcatcccggagcgcgtggtgcacgcgcgcggggcctccgccaagggcttcttcgagtgcacccacgacgtgacgtcgctgacgtgcgccgacttcctgcgcgcgcccggcgtgcggacgcccgtgatcgtgcgcttctcgacggtgatccacgagcgggggtccccggagacgatccgcgacccgcgcgggttcgccgtgaagttctacacccgcgagggcaactgggacctgctgggcaacaacttccccgtcttcttcatccgcgacggcatcaagttccccgacgtgatccacgcgttcaagcccaacccgcggtcgcacgtgcaggagtactggcgcgtgttcgacttcctgtcgcacctccccgagagcctgcacaccttcttcttcctcttcgacgacgtgggcgtgccgtccgactaccgccacatggaagggttcggcgtgaacacgtacacgttcgtgagcgcggcggggaaggcgcagtacgtcaagttccactggaagccgacgtgcggcgtgcggtgcatcctgacggacgaggaggcggcgctggtcgggggacggaaccacagccacgcgacgcaggacctgtacgactccatcgcggcggggagcttcccggagtggacgctgtacgtgcaggtgatggacccggacacggaggagcagtacgacttcgacccgctggacgacaccaagacgtggccggaggacctgctgccgctccgccccgtggggaggctggtgctggacaggaacgtggacaacttcttcaacgagaacgagcagctggcgttcgggccggggctggtggtgccagggatctactactcggacgacaagatgctgcagtgccgggtgttcgcctacgccgacacgcagcgctacaggctgggaccaaactacctgatgctgcccgtcaacgcgccgcgctgcgcgcaccacaacaaccactacgacggcgccatgaacttcatgcaccgcgacgaggaggtggactactacccgtccaggcacgcgccgctgcggcaggcggcgccgcccacgccactgccgcccaggccagtcgccgggaggagggagaaggccaccatacgcaagcccaacgacttcaagcagccaggggagaggtaccgctcctgggacgccgaccgacaggaccgattcgtgaggcgattcgccgactcgctcggacacccaaaggtcagccaggagctcaggtccatctggatagacctcctcgccaagtgcgacgcgtcgctggggatgaagattgccacccggctcaacatgaagccaaacatgtgatgcatcatgcttgtgctgaataataatgaagacgcatgcatgtcgtcgccaggaacaaagatcgagaaataatacaagaccagcacgcatgcatgggcatactctatatatatatatgtatagcccgtgcccgtgcccgcctttgtaccaatacaagccaaaccaagtggatgtgtattattattattattgcgctacc

SEQ ID NO: 28398 - DNA, 2699 bp, Zea mays
  Clone ID: LIB4757-004-C2_FLI
actattgtgctatctcctttgtttgtcttctccacaaccatatatacaccaacttgccaaggaaggcttcatggccatggcttacctccccgttttcgtcttcctgttcatggttgtcttatgccaatccgatgacaggctaacacctgcaaagccactcttgcccaacgaggtgctcatctcaggcggtggtgtctttgctcttggcttcttctccctgaagaactcttcaaggttctatgtcggcatatggtacaacaacattcccgagcgcacatacgtgtggattgccaaccgcgacaacccaattaccaccaatgtgcctgggaagctagtttttaccaacagttctgaccttgtcttgttagactccacaggccgcaccatctggacgacgacaaacaactataccgcaggaggaggcggtgaaactgcttccatcctgctcgattcggggaacttggttatccggttgccaaatggcactgacatatgggagagcttcagttacccgactgacacaattgtccccaatgtaaatttttcactgaacgtagcttccagcgctacgctccttgttgcctggaaggggcctgatgacccatccagtagtgatttctccatgggtggcgaccctagctcaggtctccagattatcgtttggaatgggacacagccatactggagaagagccgcatggggtggtgaactggtgcacggcatattccaaaacaacacaagcttcatgatgtaccagacagttgtcgatacaggagacgggtattacatgcaattgactgtgcctgatggctcacctagcatacgcttaactttggattacacaggcatgtccactttccgaagatggaacaacaacacgtcttcgtggaaaatctttagccaattcccctatccatcatgtgacaggtatgcctcttgtggcccatttggctactgcgatgacacagtacctgttccagcatgcaagtgccttgatggttttgagcccaatggtcttgattcttccaaaggatgtcggagaaaggatgagctgaaatgtggtgacggagatagtttcttcaccttgcccagcatgaagactcctgacaagttcttatacatcaagaacagaagtcttgaccaatgcgctgcagagtgcagggacaactgctcatgcacagcgtatgcttatgctaacctgcaaaatgttgacaccacgattgacacgacaaggtgcttggtctggatgggggagcttatcgatgctgagaagttcggtaacacatttggtgagatcctatatcttcgacgtcccagctcacctgttagtaagaataagaagagtaccacattgaagattgtactcccagttatggctggtttgattcttctaataacatgcacatggcttgttttcaagccaaaagacaaacacaaaagcaagaaaagtcagtacacactgcaacactcggatgcttccaacaggtttgagaacgaaaatttggaatttccatcaattgccttagaagacatcattgttgcgacaaacgacttctctgattttaacatgcttggaaaaggtggattcggaaaagtttacaaggcaatgttggaaggtggcaaggaagtagctgtcaaaaggctcagtaaaggctctacacagggggtcgaggaatttagaaatgaagtagttctgattgctaaactgcagcacagaaacttagttagacttcttgattgctgcattcataaagatgagaagttactgatatatgaatacttaccaaacaaaagcttggacgccttcctttttggtacgttctgacttcatttcacatattacgaaacaattttagactaactgaaattgtgactcacaatacattcatgaagatgctacaaggaaatctttgcttgattggccatcccgtttcaaaataattaaaggtgtagcacgaggacttctttatctccaccaggattcaagattaacgataattcatagagatctcaaagcaagcaacatcttgttagacacagaaatgagtcccaagatatcggatttcggtatggcgaggatttttggtggaaatgagcaacatgcaaacactactcgagttgttggaacatatggttacatgtctcctgaatatgctatggaaggctcattctctgtcaagtctgacacctatagctttggtgttctactactggagattgtaagcggcttaaagattggctcaccccatctgataatggactatccaaatctcattgcttatgcatggagcttatgggaaggtggaaatgcaagggaattggtggactcgtcggttctggtgagttgtccacttcaggaagctgtacgatgcatccacttgggtcttttatgtgtccaagacagtccaaatgcgaggccgctcatgtcatccattgtgttcatgctagaaaatgaaacagccccggttcctaccccaaaaagacctgtatattttactactaggaattatgaaactaatcagtcagatcaatacatgcgaagatcgctgaataacatgagtatcacaactctagaggggcgttaaatgtttagtttcattgttcgctattttggtaaacttttgtttaatgtgtgccattaaacaattacattaggtttgtattaatacaattacgctagccgttcaggtttgtacacg

SEQ ID NO: 28399 - DNA, 1552 bp, Zea mays
  Clone ID: LIB4757-004-G5_FLI
aatccatcccgaactgaacggcattattctttctcgccactgttattgttctctctctctctccaccttccaacagaattcacaggaaggtggttggggttgggcggaccagcaaaggcacatgggccgctccttcagtacagcggcgcctgttcggcctgctgcgctcgcggcgccgcccctcctcctcttcctcctctcgctcggcctcctggaagctgcggctgccaatgtcggggactcctgctccacgagcgcggactgcggcgccggccagtggtgcttcgactgcgagcccgagctctccggctcccactgcgtccgctccgccgccaccaaccccttccagctcattaacaactcgctgccgttcaacaagtacgcctacctcacgacgcacaacgcgtacgccatcgtcggggagccctcgcacaccgggatcccgcgcgtcaccttcgacaaccaggaggacacggtcaccgaccagctgaataacggagtccgggcgctgatgctcgacacgtacgacttcaagggagacgtgtggctgtgccattcgagcggagggaaatgcaacgacttcaccgcgttcgaacctgcactggacactttcaaggagatcgaggcgttccttgcagcaaacccgtccgaaatcgtcacgctgatcctagaggactacgtccacgcgccgaacgggctgacgaacgtgttcaacgcgtctggcctgctcaagtactggttcccggtgtcgaggatgccgccgagcggccaggactggcctctcgtcagcgacatggtcgcgaccaaccagcgcctcctcgtgttcacctccgtcagctccaaacagagcgcggaaggcatcgcttaccagtggaacttcatggtcgagaataactacggtgatgacgggatggatgccgggaaatgctcgaaccgtgccgagtcggctcctctcaacgacaacaccaagtcgctggtcctcatgaactacttcccctcggtccctgccaagtttacagcgtgcctgcagcactcccagagcctcgttgacatggtgagtacgtgctacggcgcggcggggaaccgatgggctaattttgtcgcggttgattactacaagagaagcgacggaggcggggccttccaggccacggacttgctcaatggtagactgttatgcgggtgccaggacatcagggcatgctcgcaaggttccggtgtagtatgttctgcataagtccataagaaatagagatcaatttgattggagtggcgaaagaagtcagagaggacagagggattgaaagctgtgagctccttaagccggcgtctacgtctttgtataggacagggatcaccgactcaccgttgccttggttcgcaagcttaaagataaagaagtcttgatttagttgttatattttttttatctttgtctaaaccaaatcagtatatctcttatctttagaaagtacagctagtacagctaatgttatgtatacagagagaataccatgtgtcattggaatctaaactatactattttactgcg

SEQ ID NO: 28400 - DNA, 1952 bp, Zea mays
  Clone ID: LIB4757-007-C4_FLI
gccggccgggccgacggtgggatccgattgtggcaaagccacgcccgtgcagtacgcccacagcaaaaagctcagcagggggaggcgctgcgcttcgcttcacgccagatccaacctcaccggccaccagcttgcccccatggccgctcgcttcctcctcgtcgttgccgtcgccctcctcctccgccctggggatgcgtccgtgcacgagtaccgcgggctcagcttcgccaacaagggcaacgccttcatcctccacgccggcagcgagggcctctacgcggcctcccacgccaacaccaccgccgaggacgccgccgcagtggccgaagccttcatccggtttgacaagattacttttaggcgatcagaggatactaataattctgtaaaggagactagttcagctaaggttcaggtactcatttttgagatagaagatcgtgaaatgattggtggatcagcatatggaggtcagaaagctatttgttgtacttcagatcttgcgaagttaggagcttgcacagaaggttctgtcatctaccgcccatcccaggtaaatcctggttggccaaagttgtttgtagcatcttttgatggaagtgacctgatcgcgacactaccgtcaaggaccattccaattaccaaaactgggatatacaatatgtactttatacactgtgatccgtcacttgctagtttggaaatcgaggggaaaaccatatggaaaaatcctactggataccttccgggtcggatggcacctcttaagaacttttttggactgatgtcttttgcatttgtcgtacttgggatctattggttttatcagtatatgaagtcctggagagaggttcttccacttcagaactgtattactcttgtgattacactgggcatgtttgagatggcattgtggtattttgagtatgctgagtttaatgagactggagtacggccaaaaggcatcacattttgggctgtcacgtttgggactgtcaagaggacggctgctgaagttattgttctcattgtctcaatgggatatggtgttgtcacgcctactttgggtggcttgacatcaaaagtggtcatgcttggaggaacattctttctagcaacagaaattcttgaattggtagaaaatcttggtgctgttaatgatctatctggaaaagctcgtctgttcttggtctatccagtggccattttagatgctgcatttgttatttggatatttatttctctagctaagaccattggtaaacttcagatttactccaaatcaacagatgtgtttaatgaacgatggcagcatgcccggattattcctgccttctggcatgtcttgtctttcttacttctttgtgtcatttgctacctgtgggcaccttcacaaaactcaatgagattttcttatgatgcaagtgaattctttgatcgaaaggataacatctcattaattaggccagcacccagtgcatccaagaatggatggaatttatcttctacaccagagcccaaagctacaaaggatgtgaataccgtagcagattttgaaggtgatgatgaggaaaacaaaagggagtagaatgtactgccgatttgattacggagggtatatttgagatcctttgaagagtgtgctagagcaattttggtatttaggagaggattggccatgttagttattattaatggagcactccactcgatgttatttcttcgattcgttaccactacagtagttcttcacatggcgagttatgctgttatcttcatagtcttaatgatggtatatgatagaaacaattagtctggtgtataatatttataataatggcaccatattgcttctggttcctgtgaactcgacatatgctatgaatgtcagagaataaattacgatagaaacaattagtctgatgtataatatttgtattactggcatt

SEQ ID NO: 28401 - DNA, 1982 bp, Zea mays
  Clone ID: LIB4757-007-D2_FLI
ctcgaggccggccggggccttttccacctcccccattcccacccgccgattcactcaccttggggcctcacgcggtcgcgcctccagcctcccctaccctcgcgcccctcgcgcccagggaggagcccgagtcgcggcgagcgaagattccctccgattgctctcctcctagaacttccgatcggctcgtgatggccatgcagcagcacgcggcgtcggcgtcgagctccagcttggggctgcaccttctcgcctcgccctcgtccatcagggaggccacccacaccaaggttttcgtgggcgggctcgcctgggagaccagcagcgacaggctccggcgcttctacgagcgcttcggggacattctcgaggccgtcgtcatcaccgaccgccactctggccgctccaagggatacggattcgtcggtgacattccgtgaagccgagtccgcgagcaaggcctgcgaggaccccacgccggtgatcgatggcaggcgcgccaattgtaacctggcatctttgggtcgagcccagcatcccgtgccccctgggcggccaagatcagctgggtcctatttgggtgtcccagttccaaaggccttctatttagggggttacagccaccaccgaccgtttccacttgggtactaccaaggatttcctgttccccagtacagctacccttcatatgggaccgaatacatctatccacagggtacattaaactcatattccggtcagcaatatcttcctatttatggagtctcagctgcagggaacacatccaaccaagcatttagccagctgagtccatccgtttccggtggtggcaatggttatttgtcggttcatagttacaacgtgcctggaaatcaatatgtgcagctcactggatccaacttcagcggtgcatcaccaaccgctcgaccttccattcagacttcttttttagtagcaacacccgttcctgcacatccacacctaataattccagccccctcaccccagtttacacaagctagtggttcagaccaaagtgcaagttgaactgtgcatccaaacatttgtaccttgaggtacccttagattgcagcaggactaaaaagagcagtgttgctgtattcacagcatttgttcttgcctggcaagcaatcatccttgcattcataaggttgtcgttatcatggtcaacagatgtacctggaaaccatgaagttgcccctatggatggggcaagtgatccaagagtaacagttgctcttgcagtttcgctcagtttaatcgcaagcgtgatggagcatgaagccacagatgcagccttattggtcctgtatctgacaggctcatggaaatgtagcttatgctggaatggagtccagcatatgtaagatggattaatccaatggagatcagccttcaggtgattgtgcatctgaaaattcgtgttggtgtgtggtccctagtcccagtcaccgtgcacagggtctgatgatcaagaagtgtgtcctgtcctgtacaagtctgcagtcatcaactcatcaccccgttgtctgcatgactacgggcctgtttggtttggtgcctaacttgccatacttttctgcctaaggttagtttttcaattcgaacgactaaccttaggcaaagtgtggcagatttagccaccaaccaaacagcccctacattcatcagcagtcagcctttggaccaaactctggaagacctagctactctcttttcctgagagttaccagtaagtgtatccagttctgtatgcagtcatcatcgtgttgtttacaccactgggttgtagccagtgatgatcattcgtctgtaccaaatttttattgttgcaactaaggtgtgatctagcgtgtagtgctctgtgtttggtggtttcaagtatagagcgcttctcttgtacttcaaaataaacccgtttacccatgatatgttctaaactgatgatgctatatttagtg

SEQ ID NO: 28402 - DNA, 2053 bp, Zea mays
  Clone ID: LIB4757-007-F9_FLI
ggccggccgggcccttctcctgcagccatcagaaaagggggcaaaaaggcccccgaattctcctcgcccgggcacaacctcgctccagagtccaggccagaccagcaggccgcctttccgctcgagcacccacgcaatcatcaccgccgtcttcctctcgctcttctcttccccttccattcctcggcaccacgtcctcgggaacgccgcatgccctccgcacaaggcgccgcctgttcccggtgaccgcggggccgagatcggcgcgccatggccgcgcccggaggcctggaccaggactgtgcacaggacgccgccattaagctcttcggccgcagcatcccggttctccactcctccgtcttcgccgccaccgccgcggccgaatccgaggttagcaccaaattagcaaatgatgttagaagcaaagatggcatgccatgccttccaaacatgtctttgattgtcaaaacaaatcccttcccttccaagagcaatatgaagaatggtttacaggcaatcagcagtcagcatgggaaaatggaagctgattccaactctgaggaagctaagaatagtttacaagctatcatcagtcagcctgggaaaagatacgattccaagtctgaggaagctaagactgaatctggtggatctggccaagagaaggtactcaagaagccagataagattctgccttgccctcgctgcaatagtatggaaacaaagttctgctacttcaacaattacaacgtgaaccagcccaggcatttctgccgaaactgcaagaggtactggactgccggggggactatgagaaatgtccctgtaggttctggtagacgcagaaataaggatccatctcatcaccatcatttcaccaaggtgtgtgattataccatagctactaatggagatgtttctgatgcaactcagcgccagtccgttgcagccaagctatgtctccttcaaggttcagggaaacaaaatgaaacagcgtgcaagtctgtatctccagtcagtaatattaaagagcagaacaatgctgaccttatttccttggtctctggtgataataaggaagagaaatcatgtgcatcctctgcagtggtatctggttcctccgaaaattggatgccagaaaatacagttaaaaaggaggaggataatacttcagcgtatggtgatggtgtgaaattacctgatcacaaaatgcagtctcaccatgctggacccgtttcagtgttctccagaaatcctgctgcagtcatggtgactaatcagtgctcagaagatggtattcatacgccgggaaatggtacggtcagtcctctttcactgccaccaccacccatggtaccaaccccaggaatttgtgcacctgctgttccattccctttccctctcgtgccagccttcgtgagctgcattcctggctggccaagtggactatggggtgcaccatggcctggaagtagtgcccctacattactatctcttcctccaaacggtttagctggaagcaactctggggtgttaggaaagcatacaagggtagctaatttgcaggaagaacagaaggcagaaaagaagttttgggtccctaaagctctccgaattgacaacccagaagaggcagcaaagagttcgatctgggcctctcttggtatcaagcctgatgacagaatcatattcaagtctttccagtccaaggatctgaaaaatagtgcgactaagatgccagaatccctgcaggccaatccagcagcgttttcccgctctctgacatttcaggagagggcctgatacaaaaataaagtgtcctcaaaacaaaggataccagaggatggtcaatgttcctatttaagctttttcttgagttgatctgtcgctaagcgcagcagtttggcaatcaactcaggcctggccaagatttacattttttttctttctagcgatagctaggttggtgtgaagattctgactgctcaaggagcgcttatgtaaatacagtaggcctgtgaattgatgttgaatgttgatagtcttttac

SEQ ID NO: 28403 - DNA, 1864 bp, Zea mays
  Clone ID: LIB4757-008-B5_FLI
ccgggattccatccctccttcaattagcagcggcaccgatataatttatcctcctcccctagcctcaagctcaccgccgtctcctaccgcagtccgcagcacacagcctccgccagtcaccgagctagctagacccacccgccgcgccatgacgtggaacaggtccgcggccgacggcggtggcagcagcgccgggacgaccgccggcgacgacaccggcctggcgcgactgcgggagctcgggtacaagcaggagctgaagcgcgacctctcggtgctgtccaacttcgccttctccttctccatcatctcggtgctgacggggatcacgacgctctacaacacggggctcaacttcggcgggcccgccaccatgaccttcggctggttcgtggccggcgccttcaccatggccgtcggcgcctccatggccgagatctgctcctccttccccacctcaggcgggctctactactggagcgcgcgcctctccggcaagcgctgggcgcccttcgcctcctggatcaccggatggttcaatgttgtcggacagtgggcggtgaccaccagcgtggactactccctggcgcagctgatccaggtgatcatcctgctcgccaccggcggcaagaacggcggcggctacctggcgtccaagtacatggtgatcggcttccacgccgccatcctgctcagccacgccgtcatcaacagcctccccatcaccttcctctcctttttcggccagttcgccgcggcctggaacatgctaggtgtgtttgtcctgatggttgccgtgccgaccgttgccaccgagagggccagcgccgagttcgtgttcacccacttcaacaccgacaacggcgccggcatccgcagcaacttgtacatctttgtcctgggcctgctcatgagccagtacacgctcacaggatacgacgcctcggcgcatatgaccgaagagacgaagaacgcggacaagaacggccccatcggcatcatcagcgccatcggcatctccatcctcgtgggctggggctacatcctcggcgtcaccttcgcggtgaaggacataccctacctgctgagccccgacaacgacgccggcggctacgccatcgccgaggtgttctacctcgccttcaagagccgctacggcagtggcgccggcgggatcgtctgcctgggggtcgtcgccgtcgccgtctacttctgcggcatgagctccgtcaccagcaactccaggatggcctacgccttctccagggacggcgccatgcccttctcctccgtctggcacaaggtcaacaagcaggaggtgcccatcaatgccgtctggctctcggctctcgtcgcgctctgcatggcgctgccgtctctgggcagcctggtggcgttccaggccatggtttccatcgcgacgatcgggctgtacatctcgtacgcgctgccgatcctgttccgggtgacgctggcgcgcaagtacttcgtgccggggccattcaacctgggccgctacggcgtcctggtcggctgggtcgccgtgctctgggtggccaccatcaccgtgctcttctcgctgccggtcacgtacccggtcaccaaggacacgctcaactacacccccgtcgccgtcggcggcctcctcttcctcgtcctcgcgtcctggctgctcagcgccaggcactggttcaagggccccgtcaccaatctggacggatgaaaatgtataattggacatgtatagtagagaggctggcagagacggaagagttgttgccaacgacatgttgtaactactttgttccaaaaattaactagcaaggaaaccgacaggatgaattttctcgataaaaaaaaaaag

SEQ ID NO: 28404 - DNA, 1907 bp, Zea mays
  Clone ID: LIB4757-008-D7_FLI
ggccggccggggggtctctgcccatctccaacctcgagagcccaccaaacccaaagcccaggcctctccgtccccaatcccccatccggcttgcacaccatgtcgtcgcagtgcccctactgccgcgcgtcggggccggcgcggtgcgcgacgacgcagccgccgctctcgcgcgccgtctccgagtgctccgcctgcgcccgaatcgtcctcgagcgccacctccacacgcaccccttcttccccctcctcccctcactccatccgctcccccttgtcacccccgacctcgccacagccatcgatcccgccccatctccttcccccggcgacgaagatgacgaggacccctttctccccgcgggcttcgtctccgccttctcggctttctccctcgagcgccaccccgtcctcgcccgctccgcctccaccttctccggacacctcgccgagctcgagcgcgcgctcgccgtcgactccgccaccgcggcctccaacccggaccccgccggccccatggtctccgtcgacagcctccgcgcctacctccagatcgtcgacgtcgcctccatactcaggctcgacagggacatagcggaccacgctttcgagctcttcaaggattgctcgtccgcgacttgcctcaggaatcggagcgtcgaggcgctcgcgaccgccgcgctcgtgcaggctatccgcgaggcgcagcaaccacggacgctgcaggaaatctctactgctagcaatcttcctcaaaaggagataggaaaatacatcaaaatactcggcgaatctctgaaactgagtcaaccacttaacagcaactcaatagctgttcatatgcccagattttgcagcttgctccagctgaataaatctgctcaggaacttgcagctcatattggtgaggtggttgttaataagtgcttctgcacacggcggaatcccataagtatatctgctgctgctatctaccttgcatgtcagcttgaagacaaacgcaaaactcaggcagagatctgtaaggttacgggcctcacggaggtcacactacgcaaagtgtacaaagaactgttggagaattgggatgatttgctcccccctgactatacgcctgccacaccaccagagaaagcttttcccatgaccaacatttactcagggcgctcagcgagtggcaaggatatgtatcaggataagatattcgagagtattaagcaaaaatgccctgagcctgcagagcctgaccacatggtcgtggtgaaagaagaggaagacaagaaaacagctgctcttggccgtccgcctacaaaacttgaccatcctgagttgggcaaggtgttccggccaccaaatgcccctttctcaacatctcctaaatctgatcgtgacaaaacggaaactagcttacgtggattcaaccttaatgaggtatcatgtgcaatggactctgatagaacagacatcacagtgaaaccaacttttggtgatcgattgtcaaatgatcccaatgcgaatccatctcccaacaggcagcctttaccctggcagcttaagcaaggggcgcctgcaactgctccatcatattcaaggcttcgcgagcagcagtcgggcctggatcttgtagctgctctgaagggggttgggaaaaggagtcctggggatagtgatgtccgggataaagaagggaagtgaatagttggtgccttgtagatggggaacgactcttaagtgttaaatttgcaactatggtcggatcacgatccaaaggcccagaggactcgcacacctaagtcttgtctgtagtagagttagtttagccacctctatggctctatcactctgtatttcttttgcctcaggccggggctgtgaaatgtcatttcaggcgcattagcttctgtagt

SEQ ID NO: 28405 - DNA, 1545 bp, Zea mays
  Clone ID: LIB4757-008-E5_FLI
ccgggacccgaagcacatcccgtcgcatcccatcccactaccacccatctcgtcgtccgccgattcgatccggttcttccaacccaggggctgtgatggcgacgaagaggagcgtgggcaccctcggcgaggcggatctgaaggggaagaaggcgttcgtgcgcgccgacctcaacgtccctctcgacgacgcccagaagatcaccgacgacacccgcatccgcgcctccgtccccaccatcaagttcctcctcgagaagggcgccaaggtcatcctcgccagccacctgggtcgtccaaaaggtgtcaccccaaagtacagcttgaagcctcttgttccacgcttgtctgagctccttggagttgaagtcgtgatggccaatgattgcattggtgaggaagttgagaagttggctgccgctttgccagaaggtggagttctgctcctagagaatgttagattctacaaggaggaagagaagaacgaacctgagtttgctaagaagctagcatctgttgctgacctttatgtcaatgatgcttttggcacggcacacagagctcatgcttcaaccgaaggagttaccaagtatttgaagcctgctgttgctggcttcctcatgcagaaggaacttgactaccttgttggagctgttgccaacccaaagaagccatttgccgctattgttggtggatccaaggtctcaagtaagattggtgtcattgagtcgttgctgacgaaggtcgatatcctcatccttggtggtggtatgatctacacattttacaaggcacaaggatattctgttggaaaatctctcgtggaagaggataaacttgagctcgcaacttctcttattgagaaggcgaaggcaaagggggtttctcttttgcttcccactgatattgtagtagcggacaagtttgcagccgatgctgagagcaagattgtccctgccactgctatccctgatgactggatgggtcttgatgttggccctgatgccacgaaaaccttcaacgaagcattggacaccaccaagactgttatttggaacggccccatgggagtgtttgagttcgagaagtttgcagctggaactgaggcgattgccaagaagctagctgagcttacaaccacgaagggtgtcactaccatcatcggcggcggcgactctgtcgctgctgtcgagaaggctgggctggcggacaagatgagccacatttcgaccggcggcggtgcgagcttggaactcttggaaggcaagactctacctggtgtccttgccctcgatgacgcctagatccgctgctgctgctgctgctgctactcaggttctgccagctttgcgtgtcatctcgtttcggaccttggtgtaacgctgcaaggttaaggtttactcctccacacatggacttttggggataggcttgccatcgtgttttgctagatgagtcgtgaaataagcttttacttcctcgctgctgtgggtgaagtaactggaattcggaaatttggaactaacaaaaccccccgtggattgt

SEQ ID NO: 28406 - DNA, 2039 bp, Zea mays
  Clone ID: LIB4757-008-H8_FLI
ggccggccgcttcatccagatccaggccgctctccaagctctccccttcccacctcgtccccctcgacctctccacatcctggtgctgcacgccccacggtctcggcggccacgccccaccctcctcgtcctcctcctcctcctcgcacccctcctccccggcccgcgccgccgcccatcacatggacccgccgcccaccagctctaccgtggcctcctcctacgccactccgccccagccttcctacgcgccctcctaccctaccagctacaccaagttcaactccgcgctcaacgcggggttgctcaatcccatgtccccgccgccgctgccacttggcaagacgcgctccagccccacactctttgacatgatggccaacgagcaggactaccacccccgcaccgccgccggcatccactccatccccgccccgccccagccgcaccagctcccgcccgcgcgctccatggacaggcagatgctgctccaggaccgcatcgccgacctcatcggcagctgtagccccgggaaccagttcaacgacgccgactcctccgacgtccgcctcaccctcagctccaaggacggcctctccgtcacgctctgcgttcaccgccacattctcgtcgcgcacagcaggttcttcgccgccaaactgtccgaccgctggtccaagcagcagcggacgctgccgcacatcgtcgagatctccgactgcgacgacgtcgaggtgtacgccgagacgctgcggctcatgtactgcaaggatctccgccggaggctgatgcgggaggatgtgaacaaggtccttggcatcctgaaggtgtccgcagccattgtattcgatgccggggtgttgtcttgcttggagtacttggaggctgcgccttgggctgaggacgatgatgagaaggtcgctacattgttgacgcagctgcatcttgagaactccggggctggggaggtgcttaagagggtgtcactggaattggccccttcggcattggttgaagaggcagatgaaggaggcagctgcaacggtggcaattccagtggtggtgaggaggtattgctgaggctcctgcaggtcgtcctggaagggaaggacgaaaaggcaaggagggagatgaaggggctagtgtccaaaatgctcagggagaacagcacatcccgtggtggagcaattggtggcgaccttcgcaaggaatcgctctattctgcgtgcaatggatgcttgtccctgctgtgcgagcaatttgtgagggcttcagagggtgatcactcagaggtggcgcggatcgcaaggcaggctgacaacctgcattggatgcttgacatccttgttgagcgccagatcgcggaggatttcttgaggacatgggcaacgcagactgagttagcggcgatgcatcgtaaagtgccagcaatacaccgctacgaagtgagccgagtgacggcaagactctttgttggggttggcaagggccagatcttggtgtccaaggaggcccgttgccagctcttgagcacctggctagagcccttttatgaggacctcggatggatgcggcgagcatgcaaggggcttgaccggcatttgatcgaggatggactggcaaacacgatcctgacgctgcctcttgcaactcagcaggagatccttctggcatggtttaaccgcttcctcaactctggggaggattgcccaaacattcagagagggtttgaggtgtggtggcggcgtgccttctggaaaaggaactctgaaccagaaccaccatcccgtttgaggattactgcgatctgcgagaactcttgatgacgacggtccatattcgacatggaatgtggcggatgttgtgatataattattgattttctgtgatatgtagtagtgtctagctgtttctcagttttttttttgttatgtctgattaggcagttagccaattacacatgtcatcttgatcctgtttcaatgcaatgtataccaggtccaatgtactactatgccgcaaccattttgattcgaagc

SEQ ID NO: 28407 - DNA, 2047 bp, Zea mays
  Clone ID: LIB4757-009-E8_FLI
cggctagcccgaaggaactccgccgcaaatacagctatgagctcagccgcttccgcggcgccacctagccgccgcactaggagccgcccgccatcagcttcttctcgcaagtctgacgactcctcggccgccgccgccaacgggaatgggaacaggaaggtcgcaaccaagcccgcctccccccaccagctcacgggggagaggacagtgaagaagttacggctctccaaggcactgacgataccggaggggacgacggtgttggatgcgtgccggcggatggcggcgaggcgggtcgacgccgtgctgctcaccgacaaccaagggctcctctccggcatagtcaccgacaaggatatagctacaagggtggttgctgaggggcttagggtggagcaaaccatcatgtccaagatcatgacacgaaatcctgtttatgtgatgtctgacacgctcgccattgaggctttgcagaagatggttcaagggaaatttagacaccttcccgttgtagaaaatggtgaggttattgctatgctggacattgcaaaatgcctttatgaagcaatagcaagactggaaaaggctgcagaacaaggaagtgcaatagcagctgctgttgaaggggtcgaacgtcaattaggagggaacttttcagctccttctgctctcattgaaactctaagggagaggatgttcaaaccttctctgtcaaccatcgtcacagagaatacaaaagtagcaattgtttcgcctacagatcctgtgtgtgtagcagcacaaaaaatgcgagagttttgtgttaattcagtggttgtctctacaggaaacacattgcaggggatctttacctcaaaagatatacttatgcgtgttgtgtcacaaaatatttcccctgagttgactctagtagaaaaggtgatgactgttaacccagattgtgccacattagaaacaacaattcttgatacattacatataatgcatgatggcaaattcttgcatattcctgttattgacaaagatggacagattgctgcttgcctggatgtcctgcaacttacccatgcaactattcaattggttgaaggagggaatggaactgtgaataatgtcgcaaactcggtaatgcagaggttctgggactctgctcttgcattggagcctccagatgaggaatttgatagccatagcgaggtatccttactcctgcagtcagaggctggagatggaaagagtagtgtttatccccctgtggttggcaattcgttttcctttaagctccaagaccgaaaaggccgtgtgcacagatttacttgtggctcagagagcttggacgagcttgtgtcttctgtaagacaaagattaagtattgctgatgaaaaagaagctgtgcaactcttgtatgaagatgatgaaggtgaccgagtgctgctgacaacagatgccgatcttgctggtgcactgctgcatgccaaatcatctgggttgaaggtgctgaagttgcacatcgaagaccctagtttgaacactgaagtgacaaaaccatcccaagagctggcaccacctcccctcaagagtgggatatcgatggttcatgttgggttaacggccggtgtagtcgctctcagtggcgcagcagtgatggtttacttgaaacgatctcaactgtgatttcgaaaatcggaggatgttttttaggagcttgattatctgaaacaagcattgccatcagctaatgcattctgaagctttgccttcactcggtgccatttacaagctaagaactgaaggaatgtacagaaatgaagaccacatctgtgatcttttgatgagctgaaagtccgtacaggccacgggacaagatcactgtttttggaggtgaatttctgggcagaacggcgtgcctatctttgttcattcagcacaagccgtggcaatttcacgactatgatgtaatgtgtaaacattacatatttgttcctattcatactgatgtatttgtttgtagataaaaactcatttcacatgacactattgtttgagg

SEQ ID NO: 28408 - DNA, 1781 bp, Zea mays
  Clone ID: LIB4757-009-F9_FLI
ctcgaggccggccggggtcggtgcccacggacaggcgtgtgcgccacgagcccgacgaacaagggaacgaggccatttccaccggtcaaactaggagaagcaagcaaagctccccaccattagcagaatccgcccgaagtctgccccgctcttcggcctcgtcccttctctccagggccatggatgtagatgatgtgctcagtaacttgcgtgttgttggtgtgccaacaaagagtgcaatttacatatggggttataaccacagtggccagactgcccgaaagggcaaggaatgccacttgaggatccccaagagcctccctcccaaactattcaaattggggaatgggaagagcctcaggtggaccgatattgcatgtggccgtgagcataccgctgcagttgcttccgatggatcactgttcacctggggtgctaatgagttcggccagttgggagatgggacagaggacagcgcgaaagagcccaagaaggtcaagtcattggagactgagtttgtaaaatcagtatcctgtggcgcacattgtacagctgccgtcgctgagcctcgagaaaacgatggcacggtatcgaaaagcaggctttgggtttggggacaaaatcagggttcagattaccctcgtctattttggggagctttcacaccaaacacagtgattaagcaagtttcttgtggagctgttcatgtcatggctctatccgaggatggtctactgcaagcatggggtatacttggggactgggaagcatggggcagcttgggcattgctccctccaatctggagataatgagctgatccctaggcgagttgtggcccttgatggtatagtagttggggacgtttcttgtggaggtgtccactcttgtgctgtaactgaagggggagctctatatgcctggggcggaggacatgtgggtcagctgggagtcgggcctcagggtggcttcttctcttgctcccttaatggatccgacatgctgctccgaaacatcccagtcctggtgataccctcaggtgttcgtcttgctacctgtgggcactcccacacacttgtgtctatgaaagatggccgcatatatgggtggggctataatagttacggtcaagcgacgaacgagaaatctacttattcccaatctcgtcttgtgttgttcggagcgggcagcagcacacagccccatcccaatcctagtcgatcttcttcccctcctcaaggaagaaaagaagctgaaccatggggaagagaaagtcagctgctaagccacctcctaagaagcggatggacaagcttgacactgtcttttcctgcccattctgcaaccacgggagtagtgttgagtgccgaattgacatgaagaatctgattggcgaagcatcttgtagaatctgtcaggaaaacttcagcacaactgttaatgcactcactgagcctattgatatatatagtgaatggattgatgagtgtgagcgtgtcaacactgttgaaggcgacgatgatgcgtgagcttgccccatgcgatgaaactgttacctacaatcgtaatgtaatgtgctggtattctcgaatgccatagcccatagtcagccatggcttggaataacgtagtggctgactgatatgccagtaggcacctgtctagtacttacagaactacaaaaagtttgtactatacatatatggacaaccttataagtggctatgtgtgtacctatcctaacgcttatcccagatggtgtatcagcgtttttctgtgaaag

SEQ ID NO: 28409 - DNA, 1776 bp, Zea mays
  Clone ID: LIB4757-009-H12_FLI
ccggagtccactccacgcgtgtcgcgaaacagaaaacaggcaaaccacacccaggagtcaggacggacacccgcgccgccgccgcgccatgaccgacgccgcagcagcagcacggcgcctccgcgccttcaagcggtggatgcgcgcgcacggcgtcgtctgcagcgacgcgctcagcctcgacgtctccgatcccctcggcgtccacgtgcgcgcggccacgccgctacgcgacggagaccttgtcgccaccatcccgcgcggagcgtgcctcaccccgcgcaccaccggtgccgcggcagccatcgaggcagccgagctcggcggatggctcgcgctcacggtcgccgtcatgtacgagcgcgcacgcggcgccgactcgccgtgggacgcctacctccaactgcttcccgactgcgagtccgtgccgctcgtgtggcccgctgccgaggcagagtgcctactcgccggcactgagctagacaagattgtgaagcaagacagggaattcctttgtgaggattggaaagaatgcatcgagcccctcatgttttctggagagctggatgttgacccagatggttttagcttggagaaatatttatctgcaaaaactcttgtttcttcaaggtccttccagatagatagctatcatggatctggaatggttccattggctgacctatacctcagactcagatgatgaagaagaagaagatgaccgaagtgatgcttctgctgatgacaaaccggctacaaaaaatcccacaagtagtcctccaggttcgagagctaacgacgaagatttggaaataatcattgttagagatgtcaatgaaggggaggaggtgtataatacatatggaacgatggggaatgctgctttgcttcacagatatggtttcacagaacttgacaatcaatacgacattgtcaacattgatttagcattggttactaagtggtgcacatccatattctctggtcgacacacaagagcaagggtatcgctatggcgtaatctgggttattctgggtgcactagccaagataccgagtactttgagattgcatatgatggagagccccagcttgaactctcaatcctcctttacatcatcaacatgaaacctgatgtttatgacaagctgatctgcgtggcccatggtttcgttagtgacgaagagcatgagactatctgtaacgtgttcaagtttgtcaaagcaacaagctccaaccaaaattctgaagtcaatggcctcgagaaactgcctgatgtgaagaagttattgcatagtgagagcgtttgttcggcgcttctatcactcgctgacatgagggaaagcctctatggttcgaacactttggaagatgacgaggaagagcttcacgcatgctgcgttgtcaacgaaaggaagctctaccattctctggttttgcgggtgagtgagagaaggatacttcgtagattgagggagtttgcctctagtgggtcaaagggccggaagaggaagcacccctagtgtttaagcaatattctgcgggtcaggcttggtattcctgaacaccatgctcaataaaggtatggtgacgttctgcaattctgctgctcttgtaatggaatactaacatttttaggaacaataactacatacaggcatgctttgttttctttaagtagattagatacttgagatttacgacgtgggggacattatgtgttggtttgcgtggtaacaaacatttggacaagaaaaatccacaagaggttctccc

SEQ ID NO: 28410 - DNA, 1478 bp, Zea mays
  Clone ID: LIB4757-010-G6_FLI
ccggggacggacgcccaacgttagcattctcgccgagtcttcccacgacgtatacctccgacttcacgatggcggacactcagaaggatgtgctgttcaagacagtacagatcgatgctttggttgcgattaagattgccactgctagcggcaagtcgttcccttcgattgcgactggcagcatagtcggtatggagaagaacaatgtcttggagatcacaaactctttccctttccccgacgtctctcccgcacaggccgatggacagaatgagaccgccgcaaaccttgccgcagccgcccctcgcgcgaagcagaacattgcctacagcaacgagatgatcaagtttcttcgtgaagtcaatgtggatgcgaacaacgtgggctggtataccagcacaagcatgggcaactttgtcaacctgaacacaatcgagaaccaatacttctaccagagccagccaaacgagagaactgttgccttggtctacgatgtgagcaggagctcgcaaggtaccctgaatctgcgcgcatataggctctcgccctcgtttgttacggcatacaaggagggcaagttcacgactgagagtctacaaaagagcggccttcgctaccacgacatcctagtcgagcttccagttaccatccacaactcacacctcctcacctctcttctccaccaactgccatcgagcgcaccaaaggaggagctcaagttcccacccaacctagctgctctgcagcaagatcccaacatccctcagccacctctgtttcccaactacgactcgcttgacctctcaatcgacccgttcctggagaagacgtgcgatctactcctcgaaagcattgagaatcaccatactgagatcaacaactaccaatactaccagcgatctctcgctcgtgagcaggccaagattaccgcctggcaacaaaagcgcaaagcagagaatgctgcgcgcactgcctctaagcagtcactcctcccagaagacgagtggcagaggctattcaagctgccccaagagccaagcagactagagacgctcctcaactcgaggcaggtggagcagtactcaaggcaggtagatggcttcacggcgggtgtcacgtccaagatgtttgctgtcaagagcaatttgctgcctggagagtaaatggaggtgggtttggttgtgtttatgattatgcttctcttcgtcacggcatgggcatggcgttgcgggttagcggttcctttgatgggactgggtttgatcttttagacgagaggaaaagggcggatatgcgaagagacgtttgtagtgtgtgcttgagtatcgagatgacccaaagttggcggtgctgccaaagcgttgaagctcaagcgctgcccagtcaggcggctgaatgctgttctaggcgtgcagctggacaaaaagccacatacagagctgaatcagacaaagaagtaaacaagatagtgtcgcggc

SEQ ID NO: 28411 - DNA, 2244 bp, Zea mays
  Clone ID: LIB4757-010-H10_FLI
ccgggagtgatgtcgtgtttgaccacctcctccctcgctcggctcggctcccaccttcctccgttgcctcctcttccgcggccccgtcgctgggcttggctttaccagtggcgggttcccacacgggggctagacgccgccaccgctgaccccgtctacaccgaatccccgcgcgatttaacccctcgcctcgctcgccgcctccgcttccatacaaccgcgcactccaaacgcgcacgcgctgttcgttcctcggccgctctgtccacccccgtccttctccgcccccaacagatctccgccggccgtgcggttccttaattcgccttctccgggactgtcggatctccgcggcggctggggatgggcaactgctgcgtgacgccgaaagcagccgacgacgccggcggcggcaagaagcccaaggagccgaagcagaagaagggtaagaagccgaaccccttctcgatcgagtacaaccgctcggggcaggcgagcgcgccaaagctggtggtgctgcgggatcccacggggcgggacatcgcggcgcggtacgagctcggcgcggagctcgggcgcggcgagttcggggttacctacctctgcacagaccgtgcctcaggggaggcgctggcctgcaagtctatctccaagaagaagctccgcaccgccgtcgacctcgaggacgtgcgccgggaggtggagatcatgcgccacctccccaagcaccccaacgtcgtcacgctcagggacacgtacgaggacgacaatgccgtgcacctcgtcatggagctctgcgagggcggtgagctcttcgaccgcatcgtggcgcggggacactacactgagcgtgctgccgccttggtcttacgcactatcgttgaggtcgtgcagatgtgccataagcatggagtgatgcacagggatctcaaaccagaaaattttttgtttgcaaacaagaaagaatcagcggcacttaaggccattgattttggcctgtctgtatttttcactccaggcgaacggttttctgagattgttggaagtccttattacatggctccagaggtgctaaagagaaactatggcccagaggttgatgtttggagtgcaggagtgattctgtacattcttctttgtggtgtccccccattctgggcagaaacggaacagggtgttgctcaggcaatcattcgatctgtcattgatttcaaaagagatccatggccaagggtgtctgataacgccaaagaccttgtcagaggaatgctgaatccggacccaaaacgacgattgacagctcaccaagtgcttggtcacccatggttgcagaacattaagaaggctccaaatgtcaatttgggtgaaactgttaaggccagactccaacaattctctgtgatgaacaagttcaagaagcatgcacttagggttatagctgagcatctttcggtagaagaggctgctgacataaaggatatgtttgagaagatggatcttaacaaggatcaaatgcttagtttcgaggagctgaagcttggtctgcataagtttggtcaccaaatgcctgatgcagatgttcaaacactaatggaagcggcggatgctgatggaaatgggtccttgaattatggagaatttgttacattatttgttcatctaagaaagattggaaacgatgagcatctgcataaggcattcgcatacttcgaccggaaccagagtggttatattgaaattgatgaactccgtgagtcattagctgatgaccttggacaaaaccgtgaagagattatcaatgccatcatccgtgatgtagacaccgataaggatggcaagataagctacgatgagtttgcgacgatgatgaaggccggaacagactggaggaaagcatccagacagtactcgagagagcgattcacaagcctgagccttaagctgcaaaaggatggatcgctgcagatgacgagtacacggtagcccgataacaccacataggcaagttgtgaattacagatggaaaccatgtgtagatttttctggttgtttgttgacagctcttctgcttgtcctgatgttccattgctttgtattcttcgcttgcggcctgtttgaaggattaggggggattgtttatgctatgattgtatttagactgcatgatccatgcctcgctcgtttccaaagtgtactgtacaaaagaaagaggagaaagggattatgaggctctgctcatttctg

SEQ ID NO: 28412 - DNA, 1948 bp, Zea mays
  Clone ID: LIB4757-011-C3_FLI
ctcgaggccggccgggataagcatgcaagtaatatatcacgcattcagctcctctgcttacggtgccagaccgaccgagcaagatccattgatcgatatggagctgcttcctctgctcacgtggctcctccttgcgcacgccatggcctacctggcctggatggccgccgcgcgccgccggcagtcgcggtgctacctcctggactacgtgtgccacaagccccgcgaagaccgcaagctgtccacggaggcggccggcgccgtgatccagcgcaacgcgcggctggggctgacagactaccgcttcctcctccgcgtcatcgtccgctccggcatcggcgaggagacctacgccccgcgcaacatcctggagggccgcgaggactcgcccacgttgcgggacgcggtggacgagatggacgccttcttcgacgaggccatcgccgagctcttcgcccggaccgacgtcgcgccccgcgacgttgacgtgctcgtcttcaacgtctccatgctctccccggcgccgtccctgtcgtccaggatcgcgcgccgctacggcctgcgcgaggacgtggcggcgtacaacctcacggggatggggtgcagcgcggggctgatcgcgctggacctggcccggaacgcgctgcggacgcgcccccgcgcgctggcgctcgtggtgtcgtccgagtccatcgcgcccaactggtactccggcaccgacaagtccatgatgctggccaactgcctgttccgcagcggcggctccgcggtgctggtcactaacgacccggcccgccgcgggcgcgccaagatggagctcagctgcctcgtgcgcgccaacatcggcgccagcgacgacgcgcacacgtgcgcgcagcagcgcgaggacgccgagggccgcgtcgggatcagcctcagcaaggcgctccccaaggccgccgtgcgcgccttcgccgtcaacttgcgccgcctcgcgccgcgcgtgctccccgtcgccgagctcgcgcggttcgccgcgcgcctcctcgcccggaggctcttcccgcacctgcagcagcactcgtcgtccggcaagcacaagggcgacactgcggccccgcccaagatcaacttcaaggccggggtggaccacttctgcctccaccccggcggcgcggccgtcatcgaggcggtgaagcagagcctgggcctggaggacgaggacgtggaggcggcgcggatgacgctgcaccggtggggtaacacgtcggcgagcagcctgtggtacgtgctgtcgtacatggaagccaagcgccggctcaaggtcggggacagggtgctcatggtcacgttcgggtccgggttcaagtgcaacagctgcgtctgggaggtcaccggcgacatggccgacgacaggggagcatgggccgactgcatccacgcctatccgccggagaggctcgccaacccctacatggacaagttcggatggatcaacaacgtcgacggcgacaccctcatgttctaacggtacagtacgctcacgatcgagcactatttcgtacagtcgtacaagtgatggtacatatacatgctactgcatggcggaaccggtcaaccggacatgacgacaacggaagcagcaggttgttcagaacgacagacaggtgatgcatacgtgttagctaatgcgtactgtacgtacgtgtatctatttaccccccgaacaatcgaacatattctttcttttgattattttctaccgcaaatgagaaatatagttttactttttttctagaacagaggaaccatgtattttatattgtctttgaccttatcttgtctgcctgttaaatgatgttgacatgttgtccctgtccattcataaatgtttgcaaaaaaatcaagtgtaatcccccctaactttaaggaagatgatattatcacttctatagtgatttcgaagtgg

SEQ ID NO: 28413 - DNA, 1962 bp, Zea mays
  Clone ID: LIB4757-011-F12_FLI
ccgggcccaatcctccgcactctgtaaccccgcccgcgatggaggccgcaaccgccgccacggcggcgatgatgtggttccggaagggcctgcgcgtgcacgacaacccggcgctggacgcggcccgccgacacggggtcggcgctgcatccgcgcggctgtacccggtgttcgtgctcgatccgcgctaccttcgcccggatcccgtcgcggcgtccccaggttccgcgcgcgccggggtcgcccgcatccgcttcctcctggagagcctcagcgacctcgacgctcgtctccgccgcctagggtcccgcctcctcctcctgcgtgcccgcgacgacgtcgccgacgctgtctgcgcggccctaaaggactggaacattggcaagctgtgcttcgagtccgataccgagccgtacgcgctggcccgcgataagaaggtcacggattttgcattggcgtccggcatcgaggtgctcacgcccgtcagccacaccctctccgacccagaagaaattataaagaagaacggtggtcggccgcctttgacatatcaatcctttgtctccattgctggggagccgccagctcccgccatggaggaatactccgagctcccaccgcttggagacacaggggaatacgagctgttgcccgtgcctacggtggaggggcttgggtacggcgatatcagccaggaggagattccaccattccatggtggagagacagaagctctgaggagaatgaaagaatcgcttcaaaataaggaatgggttgccaaatttgagaaaccaaagggtgacccctctgcctttgtgaaaccttcaacaactgttttgtcaccatatctaaagtttgggtgcctgtcttccagatatttttaccactgcattcaggatgtgcacaggagcgtcagaaaccatacaaaaccacctgtttcattgacaggacagttgctgtggcgagacttcttttacacagtgtcttatggaacacctaattttgatcgaatgaaagggaacaaaatatgcaagcagattccatggagcgagaacgaagatctatttgttgcatggagagatggccagacaggatatccgtggatcgatgctatcatgattcagctgaggaagtggggttggatgcatcacctcgcacgccattctgttgcttgtttcttgactcgcggtgatatgtttatccactgggaaaaaggacgtgatgtatttgaaaggctactgatagattctgactgggccattaacaacggcaactggctgtggctctcttgctcatccttcttctaccagtaccacagaatttactcccctattacattcgggaagaagtatgatcctaacgggaactacactaggcatttcatcccagtgctgaaagacatgccaagggagtacatttacgagccttggactgctcccactagcatccagaagaaagccaattgtataattggcaaagactacccaaaaccagtggttgatcatgagactgcaagcaaagagtgtagaaagaggatgggagaagcttatgcgtcgagtcgcgttgatgccaaacctagcaaagggaagacgttgaactcacgccgaaaaatgctacatggtgaccgagacacgtctaactcaaccattgctaagcgactgaagaggaatagccgagttgagtgatgcgcagctcctcccgtgacaactttacactacttgttccatcttcagcattttttttattatcagttgtgttacctgcatctgtcatatgtagctcgtctgacattttaccaaagtagtctgaccgtaaggaaatgacttgagcccgtagctagtgtgatatcctacactgaaggatatatctgtaatatatgctcatgtagtaacaggtgtaataataataactgctgcccatgtactctaggtcttatttggaaggtgtgtgcagcaaatgagg

SEQ ID NO: 28414 - DNA, 2274 bp, Zea mays
  Clone ID: LIB4757-012-A11_FLI
tgtgtacctcgaggccggccgggacaccagagtagggagacgcaggacgcacagagcgacagaggagggagacctcgcccggtcgctccacccctcgcccacatcacttcgtctctctggtcgcatcccaccccacacccctcctctcccatctccgctcgatctcccattcttcctcgtctccgccgccgtctgccccacctccaaccaacgcccaacgatcagtattccagaagcttccccggcaaccttcgtccccgtcccggatccggggcgcccctgatgcggtgcccgcgcggcgcgatcgcgtgacggacggccgccatggatcccccaggccgcggcgaccaaggcgaggcgccgcagccgcagccgctggagtggcggttcgctcaggtcttcggcgaacgtgccgcgggcgaagacgtccaggaagttgacatcatatctgcaattgaatttgacaaatctggtgaccatcttgccactggggataagggaggacgtgtggttttatttgaaaggacagatgttcgggataatgccagccagagagaactggagagacaagatgttccagttactagacacccagagttccgctacaaaactgaatttcagagtcatgaacctgagtttgactacctcaaaagtttggaaatagaggaaaagatcaacaggatcaagtggtgccagacagccaacaatgctctctcccttttgtctacaaatgataaaacaataaaatactggaaggttcaagagaagaaagtaaaacgatttgcagtcatgaatttggacagttcccaaagtgcaggaagtagtaccactgctattgcaagtaccagtagttctaaggcacctcttccaaatggtggatgctctgatatgcttggttgcctgaataatgatctcacatttcctcctggaggctacccatcactgcgtttgccagttgttaccagtctagaagcaaaccctgttgctagatgtcgacgtgtatttgctcatgctcacgattaccatataaattctatttcaaataatagtgatggtgagacattcatatcagcagatgatctccgaataaatttatggaacttggaaataaacagccagagctttaacattgttgatgtgaagcctacaaacatggaagatctaacagaggtgattacatgtgcggagttccatccatcccattgtaatacactggcctatagtagttcaaagggttctatccgacttattgatctgcgccaatcagcactgtgtgacaaccattcaaaaatatttgaggaacatgaagcacctggatcaagatccttctttacagaaattattgcatcaatttctgatataaagttttcaaggaatggcaaatatattcttagccgtgattatatgacgctcaagctatgggatctaaacatgaattcaggccctgtttcaaccttccaagtccatgaacatttaagacctaagctctgtgatctgtacgagaatgactcaattttcgacaagtttgagtgctgtcttagtggggatggacttcgtgttgcaactggttcttatggtaatatatttcgtgttttcggtcgtcctccgggaagcatagaggcaacaactttggaagcaagtaggaacccaatgaggcgtcagattgcaaatccagcaaggcccacacggacactaacttcttttgcccgtggtgttcggagaggtggagaaaatcaaggcgttgatgctaatgggaattcactcgacttctcaacgaagctgctccacctcgcatggcacccgaccgagaattctattgcatgtgctgctgcaaatagcttgtatatgtattatgcgtagagaatgccctacagaaaatttgttttttttgtggcttgctctcggcgaaggcccagggcccttcaactgcaaccagagagatggtgcaggacattgttgtcagttcaccccttggggccagaagccgctgatgtccacaagatcaccaatgctgtgctaacagactgcgccctgttgattctttagtacatgtgtaaattataattctaaacatgggaagttttgatccaaatattcaatcgtggcagttgtattgggagtcggtggaagggacatatcgaagataaaattctgtattggatttgcaggacatgcattgcaatggtgtagtatgactggcaatccttatcatgtaataccacctagacagggataatgttgtttaatgtcagaaaatgatagatatttcccaat

SEQ ID NO: 28415 - DNA, 2114 bp, Zea mays
  Clone ID: LIB4757-012-B11_FLI
cgggggacgactctgcgcgcttcgatcccatccccccacagtcccacaccacctgcatatctccgtgcggccgtgccaagtcaaagtcgcacctcaggtctgccgaggttggcattggtggtggtgtggtgacccggcgatggcagcggagcgggatatcgacgacctgccgcggaacgacgccaactacacggcgctcacgccgctctggttcctcgagcgcgccgcgctgacccacccggccagggcctccgtcgtgcacgggcccgtgcgctacacctgggccgacacctacagccgctgccgccgcctcgcctccgccctcgcgcgccgatccgtcggccacggaagcacggtagctgtaatagccccaaacatcccagcgatctatgaagctcattttggagtgcccatggctggggcagtggtcaactgtgtcaacattcgactaaatgctgccactgtagcatttctcttggagcactcctcagcagaagttgtcatggttgaccaagaatttttcaccctggcagaggattctttgaggattatcgcggataaaaagaaaggcactttcaaacagccacttctaatagttattggtgacgcaacttgcgatccaacagccctccaagacgctttgagaaaaggagccatcgattatgaggcattcttggaaagtggagatcctgaatttgcttggagaccaccacaggatgaatggaagagtatcgcgctaggttatacttctgggacaacttccaacccaaagggtgtggtattgcatcacaggggggcttacctaatgtcactgagtggtgctttgatatggggaatgaacgaaggcgctgtttacttgtggactttgccaatgttccattgcaacggttggtgctatacatggacacttgctgctctctgcgggacaagcatatgtcttcgtcaggtttcagcgaaggccatcttctcagctatagccaacgagggcgtgactcacttctgtggggcaccggtcgtcctgaacaccatcatcaacgcccctccagccgacacgattctccccctacctcgtgtcgtcaacgtcatgaccgctggcgctgctccgccaccctctgtcctggcggcaatgtcgaagcttggcttccgtatcactcacacctacggcctgtcggagacctatggaccatccacggtgtgcgcctggaagccggaatgggacaggctgccagccgacgagcgcgcccggctccacgcgcgtcagggcgtccgttacgtcggcctggagggcctggacgtggtggacccgaagacgatggtgccggtcccggccgacggcaccacgatgggggagatcgtgatgcgcgggaacggcgtcatgaaggggtacctgaagaacccggaggcgaacgcggaggcgttcgagaacgggtggttccactcgggcgacctgagcgtgcggcacggcgacgggtacgtcgaggtgagggaccgcgccaaggacatcatcatctccggcggggagaacatcagcagcctggaggtggagaaggcggtgtacctgcacccggcggtgctggaggcgtcggtcgtggcccgcgccgacgagcggtggggggagtcgccgtgcgcgttcgtgacgctcaaggacgccgcggaccgctccgacgaggcggcgctggcgcgggacatcatgcggttctgccgcgagaagctgcccggttactgggtgcccaagtccgtggtgttcgggccgctgcccaagacagcgaccggcaagatcaagaagcatgagctcagggccaaggccaaggaactgggcccggtcgggaagagcaggatgtgatcgagcctcgagctcgtcttgctttgctacactgtactattcgtaggatggatggaagttgtatactacagactacagtgcaaactgcgtttcttctgtacaacaccactactgtacgaacaatacagtcgtgtctgagcttttcttttgccagtgaggactgaactttgtatgaagtatgaactcgcgaagggcgctgcaacactgctcccacttgtatattccaaatttccaagggtacagtaatggcaagacagttaagaagttgccc

SEQ ID NO: 28416 - DNA, 1167 bp, Zea mays
  Clone ID: LIB4757-012-E7_FLI
atcgaggccggccgtcatcctcccagttgcgccctcttccctccctcctctcgctcgcctcgcccgtgtctctgcctgtgccgtgtgcgtgactcgcggcgcgtgtcgtcgtagtgccgcaggggctcgggaacaacacgggcgactacgcgcggctcgccgcggcgctgcgggacgaccacggcctccccgcggccgtcgtggcgcgggtcacccgccccgactggctccgcaacgccgcgggcctcgccgacgacagctactggcggggcaccctccgcccacgccccgtgctcgactggtacctgaagagggtggacgacgcggtgtccgaggcgagggagctatgcgcgccaggtgggaagatatcactgatagggcattcagctgggggctggcttgcgcgcgtgtacatggcagagtttgatgcttccgacataagtctacttctcacccttggcactcctcacctgcctcctccaaagggtgtacctggggtaattgatcagactagaggactactgaactacgtcgaggagaattgtgctccagcagtttatacaccagaattaagatacgtgtgcattgctggaaggtacattcaaggtgctcctcttctggggaactccgcagctgcttctgatgagatcctcgcagttgacactccttcagaaggaggcgatgctgttattgtcagtagcagtgacaattctacatctactccatcagctgtctcgtggcgagcccggttcgttgggcaaggttacaagcaggtttgtgggcgagcagatgtgtggggcgacggcgttgttcctgagatggcagcgcatctggagggagcgctgaacgtaagctttgacggtgtgtaccactctccggtaggttccgatgatgaacaaaggccctggtatggctctccggcgatcctcaagcagtgggtgcatcaccttctcagctgagatagtgacatacaagagaagctagctgccggaacagacagaaactgggatgtgtcctgcagctgacatgacaccattggccaccaaagggcaaaggcaattttttttctctgaaattgaggtgcatgatatagcatggcagatccctggttgtttgttgtcagtttctgtagataatttaatcatttaacctgaggtctttttgtcc

SEQ ID NO: 28417 - DNA, 1741 bp, Zea mays
  Clone ID: LIB4757-013-F11_FLI
ccggggccttctcccatctcctctttcctacccaccgccgccgctccagggccccgaaatgtcggacgaaggcggcaccggcgagccgctcagcgacagccagaagcgggagatcgccgtctggttcctctccaacgcacccgccggcgagatccactacgtcgccaaagatgtgcgcgcgctgctaggggacgacgcggtgtacgaggccgccgccgcggaggccttcccggagtacaacaaggcccgcctcgtgtccctcgagctccccgaccgcagtggcgacataatcatcacaatttatggggagattgacaagaacaattatctggaccccaggtgcgcaagttgctactatagatcatatgaaacaggctttattgttgttgttgccttctcatgataaaagacttgtacgaaactgaggcccgctgaagatgaggagcttccatcggcttacattgaagagtttaggtgtgctttagatgttgaattgtcaaaatatgttgctgaagcttatcccaaagggacctgtgccgtttattgtactagtggaaaggatatagagggaccaggagcagatttcagtttcgcagcagttatttctgctactaagcgtagcccacagaacttttggtattgtctggttcatgccttctgtcttttccttattcctgaagaaatttgtcatattttcttaaatcttgcacatatggatcagttaggtttgctctgcattagaaaaagactaaattttttaacagatcctctttagcctttaaggcgatttagggatcctctgtttctagattctctttagaattgtattcaggaaattccttatactttagtttcctatcagtgtctccttgcactcctttgagcatacaacttttagtcttcagatttttcatgggtgacattttcttgagaattgttgtttgttttgagtatactattttatcattggcttagaaccttatgacttgtttaatgcctgcccgttctttctgtttctctaccagaggaattgcttcacatcatctcaatagaactgttaagtgtgctccaaaaagatttgtctttttaatcatttagcctctgatgaaggtcaactgaatattgtgtcatccagcaatggcagttggcgttcaatttggactatggaattcaattatgagttgcagtttgttgatattaaaggaaatatacaggtagatgctcactattttgaagagggaaatgtccagctggatactaacattggtcgcaaggactccaccataatgcagtcacctgacgactgtgcagtttcaataactagcatcattcgacatcacgagtctgaatatttgtcatctctcgaggaatcatacttaaatttgtctgatgcaactttcaaggatcttcggagaaaacttccagtgacccgtactcttttcccatggcataacacactggcagtcagtcttacgagagaccttgccaaacaattagcgcttggaaaatgaagtctttgcaggccatgtcaccggatggcttcaagtgttttttttaatatctatgtgctgttctgtagtaatcagtattcttcatctctgagcttcccaatcccattgtaaatcaagaacacattattttttgtggagatgtaaaagatttcgccttccctagggtttctttggatgccgttaggaaccaaacagcctcttactgacgtgtgtgaatcatatgtttcttc

SEQ ID NO: 28418 - DNA, 1896 bp, Zea mays
  Clone ID: LIB4757-013-H3_FLI
gccggccgggaaatggacctgtgagaaagcaagaaataaagatatatacacacatggctactacgggcacaacatctatgccagcacctgtgtttcaccccacggtgtggggggactacttcatcaaatttgtcccagagccattgcaggtttcagatgaaacgatggcagagagaatcaggcatttgagagaggaggtaagtggtatgttccaggcttgcaagaacgttgtggacaaaacgaacctagtagacgtggtacaacgtcttggaatagatcaccatttcgaggaacagatagccactgccctagccagcatccacagcgctggattattcaatagctcaagcctacacgaggctgcccttcggtttcgcttgcttaggcagcaggggttttgggttcctgcagatgaacttgtcaagttcatcaagaacgaagacgggagctttatcgatggtataaccaacgacccaaagggcctgttgagcttatacaacgcagctcaccttgttactcacgacgaggggacgacgacacttgaagatgccatcgcatttgcaaggcagcatctggaagctgctagaagatgtagtctcaagtcccctctagctgaacaagtcggccgtgcccttggtatcccactgccaaggaccttaaagagggaggaagcaatagcttttatcccggagtatagctcatcacaacaagatcaacaagtgtacagccccgtgatactagagcttgccaagctagacttcaacctccttcagcgtctccatcaagaagaactcaaggagatttctcaatggtggaaagacctctctggagaaatcggattaggctacgtcagggaccgcatcgtcgagtgttacttttggtcgtatactgtgcactacgagcgagggcaagcgcgtgcacggatgatacttgccaaggtattcatgttaacgtctttgttagatgacacttacgatgtgcatgcaactttggaggaggccagggagctcaacaaggctattcaaagatgggatgagagtgatgtttctcttctacccgagtacctaaagaaattctttgtcaaggtgataagtaacttcagggagtttgaggatgagttggagtcacatgaaaagtatcgtaatgtttacaatattaaagggttccaaacattatccaaacattatctccaagaagcagaatggtttcatcatggctgcactccaagcttcaaagatcaagtgaatgtttctgtcataacggggggcgctcaggtactaagcattggtttgcttgttggcatgggtcatgaggcaaccagagaggcattcgagtgggccatcggtgacactgatgctatatgggcttgtggagaggtgtcacgtttcatggatgacatgtcagcgttcaagaatggtaggaacaaaatggatgtcgccagttctgtggagtgctacatcaaggagcacaatgtccctagcgaggtcgccctggcaaggataaattccttggttcaagatgcatggaagaccataaatcaagcaccatttaagtaccctgctctattcccggttgtgcaacgagttacgagcctggcaaagagcatgacactgctgttcctcgataagagggatgcgtacacatacagcaaggactttcaaacgacactggagacccatttcgtaagacatattccgctctagtactaggctgtttatagaagggagttttaaataaaatgtgagctgccaggatagccttagaaagcaaaattcatggtgtgtgtttcagtcagacatctaataatctttttgttttcgtctaccatatgtattattttttttcataaggtatccggaatctgtgttatgtctgatgttagaaacatatttatag

SEQ ID NO: 28419 - DNA, 1891 bp, Zea mays
  Clone ID: LIB4757-013-H7_FLI
ggccggccgggatctcctctataatcgctccagtcaaatctcgtctatgtacaggaggtaatagtcttcagcccagctcgctctgcagtctgcgcgtagcaaaaacaatggccacagcggcggcagctcggcacgtggtcgcagtgccgtaccccggccgaggtcacgtcaaccccatgctcgtcgtgtgccgcctgctcgccgccgcggacgctgccttgagcgtgaccgtcgtcgtcacagaggagtggcacgcgctgctggccgcagcgggggtgcccggcacgctccccgaccgcgtccgcctcgccaccatccccaacgtcatcccctccgagagggtccgcggcgccgacttcgcaggcttcgtcgaggccgtgcatatcaagatggtggcgcccgtcgagcggctgctggaccggctgtccctggagcggaagccggacgccatcgtggccgacaccttcctggcttggggcgttggggttggatctgcgcgggggataccggtgtgctcgctgtggacgcaaccggccacgttcttcttggcgctctggcacctggaccgttggccgccggtggatggtcatcaaggggaagaaggcctaagctgcaggtccctggatcaatatctcccgttcccagccctcgcgccggtaaaatgttctgatatgaagaccctccgctccatggtgctgccaatgaaacggctagcgcaggtgttctccaacctgcgcaaggcacagtgtgtcctcttcacctccttctacgagctcgaaaccggcgccatcgatggaacatcgcaagtggttccatgccctatatatgcagttggcccttcaattccatatatgccactggaaggtgattcgggcgagtttcaccatgaagaagactacttcggttggctggatgcccagccaagaagctcggtactgtacgtctcatttggcacccatgtctcgatgccttcgtctcagctggaagaggtcgccctggggttgcatgaaagcacggttaggttcttctgggtggcccgggacagagctagcaccgccacccttgagcagatctctgctggtggcaagggcttggtggtgccgtggtgtgaccaactgaaggtcctgtgccacccctccgtcggtggcttcctgagccattgtgggtggaactcgaccctggaggccgtgttcgctggagtgccgatgcttgcctttcccgttgcttgggatcagctggtgattggccatctcgtggctgatgagtggaagatcggcgtcgacttgagggaacggagaagggaggatggtgttgtcggaagggccgcgatctgcgatactgtaacgaagcttatggatttgactgacgatgatagcctagagatgagaagaagggctgcggagctgagagaggcttcacgccgcgcagttcaggaaggtggatcttctcggtgttctttgaacagtttcgttagagatgtcatcgaaggaagactgaatgttgcagaaacttcacggtaggtttttgcttgaatttgtagtttcagggggacagaactgttgctcgtaggcagaaacgttgtgctcctgcaagtaaaggtacgtggctcctatcatgttcacgcatattcaccgccaccccactcgcaacaattattactggcttgaaatcacgattgccacagtacaggagtatagctgcacattttctgaagctgaaaacagaagacttgatgctgtctgtagcaaagatgggggacagcgatagtgatggcacaaaaaattctgtgctcctggacttgtgtaggttatgcacgtgatgagcaagcgtgtatatagccataaaaaatattgttttacatcgtatattatttatatagtaaagtttggat

SEQ ID NO: 28420 - DNA, 1746 bp, Zea mays
  Clone ID: LIB4757-014-A3_FLI
ccggggtccgtccccctcttccccccaccccatgtcaacggccaccgcgccgtctccgtccccgtccccttctccctcgtctggaactcgccctctgctccggatcggcgcggcccgtcgtttcgccatggcatttccgccatgggcggctctgctctttgcgggggttctggtggtggtgttggcggcggcgggagcggaagcgggaggagggagcgtctgcttcgaccggatgttcagcttcggggactcgctcacggataccggcaacttcctgctctccgtgcccgacgacttcccggaccccgcgcggaaccttccctacggccagaccttcttcggccgcccctccggccgttactccgacggccgcaacctgctcgacttcttcgcggaggcatttgggctgccgtatgtgccaccatacctaggcggcggggacttccagaatggtgcaaactttgcggtcggcggggcaactgccctcaatggctcgttcttccgtgaacgcggcgtggagcctacatggacgcctcactcccttgatgagcagatgcaatggttcaagaagcttctcacatccattgcaccgttggagacagagcaaaacaaaataatttccaagtcacttttctttgtgggagaggtcggcggaaatgattacaaccatttaatcgttagggataaatctgttgatgagctacatgaagttgttcctaatgttgttggtgccataagctcggccatcacggatcttataaatcttggagcaaagaagttagttgttccagggaacttcccaatagggtgcgtcccattatatcttgcaatctttcagagccaaaaagaggattactatgaggaacaaacaggctgcattaagtggctcaatgatcttgctgagtaccataataagatgcttcaggaggagttggagaaactcaggaatcttcaccctgatgtgaccatcatttatgctgattactatggtgctgcattgaacatattccgtgccccactccagtttggtttcacagtcccattgaatgcgtgttgtggaagtgatgccccatacaactgttccccttcaatatcgtgcgggcgtcctggatctacagtgtgccctgacccatcaaaatacatctcatgggacggcctacacttcactgaggcgagttacaaagttgtcattcaaggagtacttggggggtatgccaagcctcccctttcagaaacctgcaagggtgcggaattcaaagtttctcagcttcaccaatgtacagataatccaacaaacactgtatcatacgatgctttgagctcttttatttgatctgctcgtaaaagaagtgcatttagagttacagtgggcagcatagatgatgttgcaggaccgaacatcttggacactttctcaaagccgagaagagatccatcgatgtagggtcattcagttctacaatccacttcgctgctgggaggaggagaaaaacgggaggggagtttgtagtgcagaaatttgcgattgcttagtgcactactttgctctgctatgttttccttagcagcttactactgcaggctgtagaagggacaacgaaagttgacagtctctgcaggtggtcatactactatataggaacctagatcttttaaatcagctcctgagggcaatgtatgcagtacttgatatggtctcaattgccttttaacagatacaagcatatatacattgtagcttcatcg

SEQ ID NO: 28421 - DNA, 1431 bp, Zea mays
  Clone ID: LIB4757-014-C4_FLI
ccgggactcatcgtcagtcagtcgtcacagtactcgatcgagcgcgatctgatctctttccgagcaatcatccgttctagcgtagtagagcgcatggacatggcctcgtcctctgcatcagcagctctcctcctggctgtctccctcgccgctctgcacttgtgctgccgccatgggcacggtgccggcgacgccgccggcaacggcatcactgccatctacagcctcggcgactccatcactgacaccgggaacctcgtcaaggaggcgcctccgggcatgttcgagaccatcaagcacctcccctacggcgtcacgttcgggtacccgaccgggcggtgctccgacggcctcctcatgatcgacttcctggctcaggacctgggtctcccgttcctgaacccgtacctgggcaagaacaagagcttcgaccacggcgtcaacttcgccgtcgccggagccaccgccgtggacccggccgaccagttcaacctccccgccgtccccgtgccgttcgcctccaagtccctcaaggtgcagctccggtggttcaaggacttcctcaagtacaccttcggcaccgatgaagagattcgcagacggcttcaagcttctctggttttggtcggggagatcggcgggaacgactacaactacgccttcttccaggccaagcctgtggccgaggtggagaagctcatcccaggggtcgtgaagaccatcgtcggcgccgccaaggaggtgctggacatgggcgccaccagggtcatcgtcccgggcaacttccccatcggctgcgtgccggggtacctggccatgaacgccgcctcgtcggagccggcggactacgactcggcggggtgcctccgggagctcaacgacttcgccgccaagcacaactcgcggctccggcgcgccgtcgccgacctgcaggcgtcgtacccgggcgccgccgtcgcctacgccgactacttcgactccttcctcaccctcctccacaacgcctcctcgttcggtttcgacgccgcgagcacgcgcaaggcctgctgcggcgccggcgccggcgagtacaacttcgactggcggcggatgtgcggcttcccggggacggcggcgtgcgctgacccgtccacgtacctgagctgggacggcatacacatgacgcaagcggcgtacagggccatgtccaggctcatctaccacggcaagtacctggagccacagatactgagcttcccggagaaaaacgggcagacataaactcacgtcttcatcatatatagaacttagttagaaaatatactcgaaacaccggctacaaataagctgtcagtagtcagttgtatcggcaagtacatgcgcgctgttcaactaatgctatcatcaagctgtgagccacactgatgggggtgtttggttctgtggactaag

SEQ ID NO: 28422 - DNA, 1817 bp, Zea mays
  Clone ID: LIB4757-014-D3_FLI
ccgggagtcgtcccccccggccccgacccccctccgtttgccaacgactccgggctccactgtcgctcgctctcgctcccttccctcccacgcaatggtggccgatcgcctccgcctcgcgctgctgctctccgcgtgcctctgctccgcgtgggcgcgcccacgcctcgagccgaccatccgcctgccgtccgagcgcgcggcggccgacgacgccgtcgggacccggtgggccgtgctcatcgccggctccaacggctactacaactaccgccaccaggcggacatctgccatgcataccagatcatgaagaagggcggacttaaggacgagaacatcgttgtcttcatgtacgatgacatcgcgcatagcccggaaaatccgaggcctggtgtcatcataaatcatccccagggtggcgacgtctatgctggggtgccaaaggattacactgggcgagaggtcaacgtcgacaatttcttcgctgttctgcttggcaacaaaactgctctcaggggtgggagcggcaaggttgtggacagtggccccaatgaccatatatttgttttctacagtgaccatgggggtcctggcgtccttggaatgcctacgtatccatatctctatggtgatgacctcgtagatgtcctgaagaagaagcatgctgccgggacctacaaaagcctggtcttttatcttgaagcatgcgaatctgggagcatctttgagggcctcctgccgaatgacataaatgtgtatgcgaccaccgcgtcaaatgcagaggagagtagctgggggacgtactgccctggcgagttcccgagccctccaccggagtatgacacttgcttgggagacctgtatagtgttgcttggatggaagacagtgatttccacaatctgcgaactgaatctctcaagcagcaatacaacttggtcaaggataggacagcggttcaggatacattcagctatggctcccatgtgatgcaatatggttcattggagttgaatgttaagcatctgttttcgtacattggcacaaaccctgctaacgatgacaacacgtttatagaagacaactcgttgccatcgttctcaaaggctgttaatcagcgcgacgctgaccttgtctacttctggcagaagtaccggaaattggcagacagctcacctgagaaaaatgaagctcggaaggagttgcttgaagtgatggcccacaggtctcatgttgacagcagtgttgagctcattggaagccttctctttggctctgaggacggtccaagggttctgaaagccgtccgtgcagctggtgagcctctggtcgatgattggagctgtctcaagtccacggttcgtacttttgaggcgcaatgtgggtcgttggcgcagtatgggatgaagcacatgcggtccttcgcaaacatctgcaacgctggcatccttcctgaagcagtgtcgaaggtcgctgctcaggcttgcaccagcattccttccaacccctggagttctatccacaagggttttagcgcctaagaatcataaggtgaggcgaaatatttcagccgctccaccgcaacgaactggtttacattaccagtcctcaggggggtcctagttcttgaaccataggtgaagcagacttataccactattatagctgttccaccgtcgttccagattacatagctatgcccaatttccggtgtacatatatagtcggaaagttatttggcaattgtattggtcgttgctgtatatattccctatagtttgttagcagatgtgtagtttgtaattccataaaaatgaa

SEQ ID NO: 28423 - DNA, 1979 bp, Zea mays
  Clone ID: LIB4757-014-D7_FLI
ggccggccgggagtcgcccttcaacttgccagccgatcccttcgcgtttgtctccgcggttccgacgctccgcactccgctcccctctcccaagcaaacacagccgagtccacgcacgcctcccatcattcctcaaccgcctcgccggagcaaggggagtagcggaggatggagattgaccaggcggtgcgcgggtgcagcgaccgccgcatgcgcaccaagtacagcaacgccgtctacgtcgtccagcgggccttcgcgctctacccatttgaggaagttgccttcagctttaatggtgggaaggattcaactgtgctcctgcatttgattcgagctggttactacctttacaagaaggactctggtgatgtagcccaaacagatgctgttaaaaactgtccactgcgtactatctatttcgaaagcccttgtgctttccctgaaatcaattcattcacttatgagattgtctcaacttatgggttacctctggaaaccatccattcagatttcaagtctggtctagaaggccttctgaaggagaagcccaccaaagcaattttcattggcacaagaattggtgatccaaatgcggttggtcaagaacagttctctcctagttcacctggctggcctccttttatgagggtgaatccaatcttggattggtcatacagggatgtttggtcttttctaataacatgtaaggtcaaatactgcagcctttatgatcaagggtatacttccattgggagcatacacgatactgttccaaatgcactccttagtgattcatcatctgagaaaagttttagaccagcatacatgctaactgatggaaggcttgaaagagctggtagaacaaaaaagattaatcctaaagtagaaatgaattctgctgcaagcaatggcatcaacgatactgagggaggacggatgatctcacgggcggcatcaatcattgtagtcggtgatgaaattttgtttggtacaactgaggataacttaggagcagccttgtgcaagaagcttcatgcaattggctggcgggtttctcatgtagcagttgttcgcaatgagattgattctgttgctgaagaagttgaacgttgtaaatctactgatgacatggtgtttatttttggtggactcgggccgctacattcagacgtttctttggctggtgtcgcgaaagcatttggagttcgtctggctcctgatgaagaatttgaagattaccttagtcaactcatgggaaacaattacactggtgaccgaaatgagatggcacagttgccagaaggtattacagaattactgcatcacaaaacgctaccattgccattgatcaaatgtagaaatgtcattgctcttgctgcaaccaatatggatgaagtagacaccgagtgggattgtcttctaggtacccaggagagtggtctaatgccatcaaaaccttttgtgtcaaagcatctcagcactacactttcagatgttcaaattgcttcagtccttgcaaaactgtgcttagagttttctgatgtttacatagggtgtcatcggatatcaagagctggtcctttggttgtgaatcttactggaaaggataaccagagggtagatgcggctgccgagaagctgacaagcagctttgaaggacaattttcccaacttaacagttgcaaataagctgtcagagacacccctctatttttgccaaattctttccgcctgaagctctgagattgtgcaggactgatgatggtgctcaactgctctaaaccgacgaccaaaataaaccacggagctggtactactttgaagctacaaattttatttagggaacataggaattttgtactaggaattggtaactgggttctagcataatgtagctttgcagctaatattttgacattattatacgttccaaattatttcatttatactataatttatagcataactttactgtt

SEQ ID NO: 28424 - DNA, 2131 bp, Zea mays
  Clone ID: LIB4757-014-E10_FLI
ataacaggaggcgcgtctctgcaagtctgcactcggacggacgagcgaggcagacccgcaggtcgcagccacaacccaagcgcagcgctctgcctgcctccgctccggctcagctcccgccctgcctccgccttccattccaccgcgcggcgctgccgagtgccgacgtcgtccccgccgaagtttctggtttctgggttggatctctcggagtcggagcgagcgaggatgggcggcggcaacggtgaaaccacccagctgggggagccactgctggcgaagaaggcgaaggcgtatcgccctaggtgccccggctgccgggtggaccgcctcaacgcggagcgggagggtgtcttccctctcaaggacctcttcctcatctggctcgtcaccatcacctgcaccctgccgatccagtctctgttccccttcttgtatttcatgataagggatctgcatattgctaaacaaacacaagacattggattttatgctggttttgttggcgcttcttatatgtgtgggagggcagtctcctcaacagtatggggaatcgtggctgataagtatggaaggaaaccagttatcgtactgacccttattgcaatagttatcttcaatactatgtttggactaagctcaaactattggatggcattaatcacacgatgcctgcttggaatcatgtgtggttatctcgggccaattaaggcttatgctacagaagtgtgccgaaaagaatacaatcatctggctttggcagttgtttcttcctcacgaggcattggtctcattattggtccagctattggtggttatcttgcgcagcctgcagataaatatccaagtatattctctcagacgtccatatttgggaggtttccatactttcttccgtgcctgtgtatatcaatccttgcagttattgctctaattgcctgcatctggtttccggaaactttgcataaacacaatggggatgccgttgataattcagttgaaaccgtagaagaatctcttgctggcaccgacactgaaggaaatggaggtggcggatgtctaaaattatttacaaactggccgttgatgtcagctattactttatattgtatcttctctcttcaggatgtggcttatgcagagacattctctctttgggctgtcagtgacagatcgtttggtggattaagctttactaccacagatgtgggcaatgtccttgcgatgtcaggtctcttcctttttctatatcaaatgttgatctatccgttccttgccaaaacggtggaccacatcacattagtccgtgcagtggcgttattgactctaccggttcttgctagctacccattctttccttcgttgtccgggttcgggctcatggtggtagtaaattgtgcgtcttttctgaagatacattctcggtaactaccattaccgtgttcaacattttgatgaatgaagctgtgactcaggatgtaagagccgcagccaatgggatagctgtaacactaatgtccatctctaaagcggttgctccagctgttgcaggaatcatattttcgtgggcccagaggcgtcaaacagctgcatttcttccaggcgaccacttggtgttcttcatactgaacatcttcacgttcatcggtttcgtcttcaccttcagaccgtttttcgttcgaggcagtgccaagcactgaaacatggatgaaccggacgacgacccatgggtatcctatccaggggcaatcgaatataaattttcttccggcgtggccaagggaggtgccgagtctgtaccagtacgacgactcaggccagaacacacggcgtatggtatggtacacagcaaggccgtgttgttgctgtaagttttgtaatttctgtttcctgctcggcttcgcagcatgcagttgctgtatatgatggaagaacactctgttactgggcatgttgcgcggtttccacgcgtgtaagtaatgtagaagtcgctatggtaggtatttccataccgtcattagtggatcattgattttttttgtaagaaggttattgcaatgccctttttccgggcatgaataagaaaaaggaaatatgcttatatgcatggtatgaataagtgagcaataac

SEQ ID NO: 28425 - DNA, 973 bp, Zea mays
  Clone ID: LIB4757-014-E2_FLI
ccgggaagaaaaaaaatgtctctcagtcgattcctcaaggaaatctcaacagcaccagaagaagaacaacagcgcattcagaacgagtatgcactccaacaacaaccaaaccatctagtacaaacacccatcccctcattcgacctgcctggtgtccaagaccccatagagttcttgaagacacacaccgacgaccgctcagccgatgccaagatcaagatcaaacacggcaccaccaccctcgcctttagattccaacacggcatcgtcgtcgccgtcgattctcgtgccaccgcaggcagctatatcgccagtggtaccgtaaaaaaagtcatcgaaatcaacccttttctcttgggcaccatggccggtggcgccgctgattgtcaatactgggaaacttatttggggatccaatgtcgactgcacgagttacgaaacaaatcgcggatttcagtagcggcggcgtccaaatatttatcgaacctggtgtacagttacaagggaatggggttatccatggggacgatgatctgtggctgggacggctccgggccggcgttatactatgtggactcggatgggacccggatgaagggcgacgtgttctcagtgggctcgggttccaccttcgcctatggcgtcctcgaccagggttatcactgggacctctccgtcgacgacgccctcgaactcggaagacgtagtatctacgccgccggccatcgtgacgccttctccggtaacaccctcaacctctatcatgtcaagcaagacggctggcactttatcaacaactatgacttcaacaaacttcactacgacatggcgtatggctatgaagagaggttaaagcaagaagcggccgttctggcctgacgcggagtgatttcacatcttgcatcatgttgtgtgtgtgtgtgtttggagcaacacataagtgtaataaattgaatcgatccattttcacatg

SEQ ID NO: 28426 - DNA, 1875 bp, Zea mays
  Clone ID: LIB4757-014-F9_FLI
ccgggatgttttcctctgcctccttccttctgcaggcttaaactagttgctggatcgtcatcgaagtaaaatcatcatgtctcaactccaaactccaccaggcgtcaccatcacctgtgcggtcgaaactcctcatctggccattttgactcccgatgccctcaagttcttggccaccttacatcgctactttgaacctactcgccgagccctccttcaacgccgtcaactcgagcaagcacgcttggatgcaggtggtctacccaacttccattcggaaaccaaatggatcagagaaaaccttgcctggcaagctgccagcccagcccctggtttgagagatcgtcgagtcgagattacaggccccgtagaccgcaagatggtcatcaacgcgctcaactcgggcgctgctactttcatggctgactttgaagactcgcatgcacctacttggcttaataaccttgatggccagatcaatatgcgagacgccgttcgaagacaaatctccttcaaagctccgaatgggaaggattacaagctcaacgatcgtatcgccactttgatcgtgcgagctcggggttggcacttggatgaacctcatcttttggttgacgggcaacccatcagcggtggtatttttgactttgggctgtactttttccacaatgccaaggagtgcattaagaggggattcggtccttacttttatcttcccaaaatggagcactaccttgaggcgagattatggaacgacatcttcaaaatcgctcaagattatattcatatgcccagagggacaatccgcgctacctgcttgattgagacgcttcctgccgcgttccaaatggacgaaataatcttcgagctgaaagagcattcggctggcctcaattgcggtcgctgggactacatcttctcgttcattaaaaaaatgcgccataatcctcaatttgtgcttccggatcgttcggatgtcacaatgacggtccctttcatggacgcctatgtgcgtctcttgatcaagacttgtcattcgaggggcgttgctgctatggggggaatgagcgcgcagattcccatcaaagacaatcccaaagctaacgaggcagccataaacaaggtcaaggctgataagttaagggaggtgaaggctggacatgatgggacctgggtcgctcatcctgctttggtgaaagtagctcttgatattttcaatgagcacatgattgggcccaaccaatatcacgtgcgccgctcggaggtacaagtatctgctcttgatttgatcaacacgaacgtacctggcaaaatcacggagcatggtatccgggagaacgtttctgctgcgttacaatattgtgccaactggattactggtgttgggtgcgtgccgattgccaacctgatggaagatgcagctactgcggaaatagcgcgtcttcaaatatggcaatgggtgagacatgggtcgatgacggacgcgcataaaaaaattactgccgagtggattgatcagatcttggaggaagaaagcgcccaagccaagaagacgacggccaaggggttaccagaatccaaggtagatatggcaaagcgctacttgagtgggcaagcacatgcgccagtgccagatgatttcctgaccagtgcgctgatgagcagtttggatgatatggcagcaccgaaccgttcgaaactgtagatgggtaatgtctttgtgggaaaaagaaaacaaaaaaaaagagtgtgttgatgtattaagttattagatagtcgtgtttttttttattacaagtttatgttgttgtgatcagctctgacgttgtagagtgtgcttattagctttttcaattagtaaaattagtcattccg

SEQ ID NO: 28427 - DNA, 1167 bp, Zea mays
  Clone ID: LIB4757-014-H11_FLI
ccgggacaagcaccagaccaattaactagcttcttctagctctagctaggctcgtttgctgcaagaaggtaacagctagcaggcatggaggggaaggaggaggacgtccgcctgggcgccaacaagttctcggagcgccagcccatcggcacggcggcgcagggcacggacgacaaggactacaaggagcccccgccggcgccgctcttcgagcccggggagctcaagtcctggtccttctaccgcgccggcatcgccgagttcgtcgccaccttcctcttcctctacatctccatcctcaccgtcatgggcgtctccaagtccacctccaagtgcgccaccgtcggcatccagggcatcgcctggtccttcggcggcatgatcttcgccctcgtctactgcaccgccggcatctccggcgggcacatcaacccggcggtgaccttcgggctgttcctggcgaggaagttgtccctcaccagggcggtgttttacatcatcatgcagtgcctgggcgccatctgcggcgcgggcgtcgtcaaggggttccagcaggggctgtacatgggcaacggcggcggcgccaacgtcgtcgcgcccggctacaccaagggcgacggcctcggcgccgagatcgtcggcaccttcatcctcgtctacaccgtcttctccgccaccgacgccaagaggaacgccagggactcccatgtgccgatcctcgcccctcttccaatcgggtttgccgtgttcctcgtccacctggccaccatccctatcaccggcaccggcatcaaccccgcgcggagccttggcgccgccgtaatttacaaccagcaccatgcctgggctgaccactggatcttctgggtcggccccttcatcggcgctgcgctggctgccatctaccaccaggtgatcatcagggcgatcccgttcaagagtaggtcttaaaggagccgatgctgctgcttcgagatgccggtcttaaaaggatggattcgtggctgttttcaaatgatcccctactatgttacgtgcagttccattcctctttcaaagttcggagctgcttttatccgaacccagacttgtaattcatctgtaccaaatgtgtaatatgccgcgcctctgttatgtgcaattgaaaattatgagacagccgagtcg

SEQ ID NO: 28428 - DNA, 1942 bp, Zea mays
  Clone ID: LIB4757-015-G1_FLI
actctcgctttcttctgtctcgcctcgccctcgcctttgttgatcttttcctctctcgcgttcccctcgccttcctcttcctcccccacacccaccggtcgccgcccccgtcgccccgtcctcctcggtccagagacgagggggtccgcgccgttccgacgccacaccgcaaccgcatcacatcacacaccgcctgctcccaccgtccgtccgccctccctcgatcgcgccccccggatcgctggtacctccgcgcgcggctccgacctcatcttcctccatcgactggcatcggcagcggcggcgtgttcccggccagccttcgaaagggtaatcaatcgccagacttttgggagctctgttgggggggaccggggggaagagccaagttactgcagaggctaacatttcggttgtcgagtgatggcgcaaggcatcaacttccctgacttcatcggcgccgtgggtggccatgatggtggtgtggactttggtgggaacttctgtgacatggccttctaccagaagctaggggagggcaccaacatgtcggtcgacagcctcaacagcatgcagaccagcatgcatggggggtccatcgccatgtctgtggacaacaacagcagcgttggctctaacagtgactcccgcactggcatgcttggtcatcctggtctcaaggggcctgccattgtgggaagctactcggttgggcacagcatcttccgccctggccgggtgtcccacgccttgagtgaggatgcgctggcacatgctctgatggacaataagttcccaactgagacactcaaggattatgaggagtggactattgatctggggaagctccacttgggaatgccctttgcacaaggtgcctttgggaagctctacaggggaacatacaatgggatggatgttgctattaagcttttggagcgacctgaggctgaccctgagaaagctcaactgttagagcagcagtttgtccaagaagttatgatgcttgcaacactgaggcacccgaatattgtcaagttcattggtgcgtgcaggaagccgttggtttggtgtattgtgacggagtatgcaaagggtggatctctcaagaatttcttgagcaagaggcagaacaggtctgtcccgctgaagttggcagtcaagcaggcattggatgttgcacgtggcatggcctatgtccatggccttgggttcattcatagagatcttaagtcggacaacctcctgatttctggtgataagtccattaagattgctgactttggagtggctaggattgaagtcaagactgaggggatgacacctgaaactggaacataccgctggatggctcctgaaatgatccagcataggccatacaaccagaaagttgatgtctacagttttgccattgtcctgtgggagttagtgactgggaatgtcccctttgcaaacatgagcgcagtgcaagctgcatttgctgtggttaacaagggcgtgcgaccagccataccccacgactgcctccctgcccttgcggagatcatgaccatgtgctgggacacaaaccctgaagtccgtcccccattcgctgagattgtgaggatgctggagcaggtggaggtggaggttctgaccactgtccgtaaggctcgcttccgctgttgcatcgcccaaccgatgacgctggactgacggactgagtcgtccgcaatccaggaaaagaacctggagaggggtttaatcctatgtgtttataatcccaatagacttgtgcttcagaaacagaaggctgactcctcagtctgctcctcagtctgccttctgtctttgacatgttatcgtagagtacacctagctgtcgtcaccagtggttgtaatagaggtagctttatgcttgactaaatacccttccgttataacaagtgcatgctcttgctgc

SEQ ID NO: 28429 - DNA, 2153 bp, Zea mays
  Clone ID: LIB4757-016-F8_FLI
gtcccgacagagttcgaggaagctggggtgggcctgatgcttctccttctcttgaaacgtgatgatggattcagtaagcatgaagctgttagcttttgtgttcctcctgttgcgatgccagcgggcatcgcttgctcttgctgtcgacttccaagtcgaagcattggttgaaatgaggacgcaacttggtgacaaacgtggtgtccttagtgattggaaggataatcaaatgagcccctgctactgggccaatgttagttgccaagacaacaaagtcacaacaataattttgagctcgtcagggttaacaggatccttatcacccagcattgcaaagctaacaactttacagcagctgatactggataacaacaacattactggagggattcctccggagtttggaaacctgtcaagtttgacaattctaaaccttggaagaaataatttaaatggttcaataccggactcccttggacaactttctaaactccaaaatctggatctaagccataattatttgaccgggaatatcccaagctctttctcaaatcttctgtcattgagtgatattaatctggcatataataatataagaggtgcaatcccacaacatctacttcaggtggctcaatacaactatgcaggcaaccacttgaattgtggccaaaatttatctgcatgtgaacgaggcagcacattgacaggtggatcaaaaaattccaagctaaaggtggttattggaagcattgctggagcagtcacactttctgtaactatagttctagttttgctatggtggcaaagaatgcgttaccggcctgaaatcttcattgacgtgtcaggtcagaatgaccatatgcttgagtttgggcaaataaagcggttctcatggcgggagcttcagattgcaaccagcaatttcagtgaacagaatgttcttggcaagggtggttttggtaaggtgtataaaggagttcttccaggtccaaacagtataaagattgcagtgaaacgactactgaacgtggacagtcgtgatggggaaatggctttcctcagagaagttgaattgataagcattgctgtacacaagaacatattaaggttgataggattctgtacaacaccaacagagaggcttttggtataccctttcatggagaatcttagtgttgcttcgcgtttaagagatataaaactaaacgaaccagcattagattggtctacaagaatgcgaattgctcttggcgctgcctgtggtttggagtaccttcgtgagcactgcaatcccaagatcatccaccgtgatgtcaaggctgcaaatgtcctgcttgatgggaactttgaagcagtggtaggagattttgggctggcaaagatgatagacatagggaggaatacagtaacaacaggggttcgtggaactatgggccatgtagctcctgagtacataaagacaggaaggccatcagtgaagacagatatctttggttatggtgtcatgctgttagagattgtgacaggagagcgtgcaattgcattccatcctgaccgtatagaagaaacaggcgagatcctgctcactgatcaggtcaagctatggatggaagaagggcgactactcgacctagtggatcgcaatctaggtggtgtctacaaccttgaagagctggagaaggttacccagatagcacttctctgcactcacatggatcctgaacaacgccctacaatgtctgaggtggtgcagatgctggaaggagagattgtcccagcagagcggtgggaggagtggcagctggctgagctccaacgacgtcaacagcatgagatgaggcaacagggcaaactattcaacttcagtgaagagtctcaaaacatccaggaagccattgagttgtcagctggcagatgggctgtcataagaaagtgacatgattttcacttgttccttaaatagaaaggctataagagaaatattgactattaggaatagtctataaggtccttgtgtaatatcttgcacaagtaactccgtccatatgctgttaatacaacgataggaccacacatagttcagaccatgtgtatatcaagaatagactgttctacattttaattgcattctgtattagtggataactctgaag

SEQ ID NO: 28430 - DNA, 1843 bp, Zea mays
  Clone ID: LIB4757-017-B6_FLI
ccgggaccagaagcacggccgtgttctcatcccctccacacgtttccgcctcccgatccacgtccgccgttagccgcggccgacacagctcctcctcctcctcgcagctcttctccagctctcggaggcccgaggtttcatcgacccgcgctccttcatcctcgacacctcactccggcggcgcgggtccgcagtgctgcacatcgcgagctgcgcggcacagccgcacttgttgtccttcgtgcgtggggtgcggttcgacgcgggcggcgggatggcggcgagcgcgcgggacagcaccgatgcagcggagcgagttgtggatgaccacgacggctgggcgtcggacgccgagatggacgtggagatggatgtggtggaaggcgatgccgaccggagggacggcggcgcggatggtgatgatgagtacttgctgctcactaggataagggacacatcagcagctgaagcaagggcaggaaaggatatacaaggtataccatgggagaggatacacatagccaggcaagattaccgaaaagctaggttggaacagtataagaactatgaaaatttccctcaatcaggagagctcatggataagctatgcaagcaagtggagaagagcagcaagtattatgaatttcagcacaacactagatcagtgaagccatcaattctccattttcagtaagccactggtcatcattgtctcacaaattatcagaggttcttgacttctctgggcatgttgctccagcggagaagtatcctggcagtttactagaaggtttctctggtgttcaagttagcacacttgctgtgaatgagggtttggtggtagctggtggttttcaaggagaactaattggcaaagatgtggaaggctgtagtgtaaaattctgtatgaggacaactttgagtgacaatgccataacaaatgccatagatatacacagatcgatgagtggaagcctgcacattacagtatctaacaacgattgtggtgttcgtgaatatgatatggagagatatcagctcgtgaaccactaccgatataactggccggttaatcacacatccgtgagcccagataagaaacttttggctgtggttggagatgatcgagatgctcttcttgtggattcacgaaatggaaaggtaacctctaccctagttggccatctggactactcatttgctacggcatggcacccggacagccggacattcgcgaccgggaaccaggacaaaacctgccgcatctgggacacccgcaacttgtcgacttcacttgcagtactgcggggcaacatcggcgcgatccggtgcatccgctactcctccgatgggcggttcctggtgttctcggagcctgccgacttcgtccatgtgtacagtgtggctgcggactacaagaaacggcaggagatcgacttctttggtgaggtgtccgggatcacgctgagcccggacgacgagtccctgttcatcggagtgtgcgaccgcgtctatgccagcctgttgcagtacaggatgatccgcggattcgactatcttgactcatacgtgtgaagaactgagctttggtgaccggtgttgtgctaggtgctggctgaaggttctgatgcgcggttcagggaatatatctgcctgctcttagttcatggcgaatgatggttcggtgggactcgacgccagcgaatctgccgtgtaaatagtttagaatttgaagcgtagtgtagtgctgtggaccaatgctgtctctgaacatacatatgatcagagtaatgtgtgtttgcgctgttagtttcagactccggaatacaaatagttttggacc

SEQ ID NO: 28431 - DNA, 2349 bp, Zea mays
  Clone ID: LIB4757-017-D9_FLI
ccgggatctcgacaataagacattgccagccgactcaactttgagagatcgaaaaaatggcatctgaaatactaggcaacgttacggagaaggccaaggacctcgctggatccaagtcgaccaagatggctcagcttgctgaagtcaccaaggatgtccacgacgataagtggagaattaccagcgactacggagtgaagcagaacaacaccgacgactggctgagggttgccacggacgaccagactggccctctgttgctcgaggaccaattcgcccgtgagaagattcaccgattcgaccacgaaagaattcccgagcgtgttgttcacgctcgtggctccggtgcctttggaaaattcactctttttgagtcggcctcggatgtcacatcggctggaatcctcactgatacttcgcgcgaaactccagtcttcctacggttctcgactgtgctcggtagccgtggttctgcagacactgtccgcgatgtacgcggctttgctgtcaagttctacacggaagagggcaactgggatatcgtcggtaacaacatccctgtgtttttcattcaagactcgatgaagtttcccgatgtgatccacgctggcaagccggaaccggactgcgaggtgccgcaagcgcaatctgctcacaacaacttctgggacttccagtacatgcaccccgaagccacgcacatgttcatgtgggccatgtctgatcgcacgattcctcgctcgtaccgaatgatgcagggtttcggtgtcaacacatacactcttatcaatgctaagggcgagaggcattttgtcaagttccacttcacacctgaactcggtgtccacagcttcgtctgggatgaggcactgaagattgctggtcaggacccagacttccaccgcaaggacttgtggatggccatcgacagcggtgcgtaccccaagtggaagtttggcattcaagtcattcccgaagcaaaggagcacgacttcgaattcgacattcttgatgctaccaaggtgtggcctgaagagcttgtgcccgtccgatacattggcgagcttgagctcaacaagaaccctgacgagttcttcacacagactgagcaagtcgccttctgcacaagccatattgttcccggcatcggcttcagcaacgaccctcttctacagggccgcaacttctcttaccaagacacccaactctctcgtctgggcatcaactgggaagagctaccaatcaacaagcccgtctgccccgtcatgaacttcaaccgtgacggagccatgcgacacacaatcacaaagggtaaggtcaactattggcctaaccgcttccagactgtgccacctgcgacggagaaggagggtgcatacgtagagttccccgagaagactgccggcatgaaggtacgcatgcagagcaagaagttccgggagcacaagagccaggccgagctcttctacaactccatgtcggagaacgagaagatgcacatgaaggctgcttttgcctttgagcttgaccactgcgacgatcccgttgtgtacgagcgcctctgtgagcgtctgtgcgagattgatctcgagctcgctcagagtgttgccgagatggttggcggcgagcaaccgactaagcagactcggcccaagcacaacaagaaggccaagggtttgtcgcaaatggacttccagcccgagaagcctaccattgcgactcgcatggtggcaattcttattgccgacggctacgacaaggctgcctacactggtatgaaggctgctttgaccgcagctggcgctcttccttttaccatttcgcctagaaggaacaagatctttgctgatggagaggacaagagcggctctggagtagtggcagaccatcaccttgagggccaacgctccaccatgtacgacagtgtgtttgttcctggtggcgccaagtcgattgagacgcttagcaagaacgggcgtgcggtacactgggtgcgtgaggcatttggtcacctcaaggccattggtggtactggcgaagcggtttccttcatcaagcaggctgtggatctacccggcatggaattctcaacgtctggtgatgtggtcaacagctacggagtggttacggctacggcagtgcagcctgagagcttcaaggaggcggtcaacatggcgaaggaggccaaggactttgttagcgcgtacatgtatgcgatttcgcagcacaagaactttgagcgcgagactgcgggactgaacgccatggttgcgtactaacggcagggagatgatttggaactgcctgtcctaatgatttagctgattaatgttaatgataccaattatg

SEQ ID NO: 28432 - DNA, 1630 bp, Zea mays
  Clone ID: LIB4758-034-H9_FLI
ccgggattcttccccgagtcgccgtcgtctgctccgggctgctgttctgcgcctccacaaggctttggcctctgttgtaagccatgggtaaggagaagtcccacatcaacattgtggttattggccatgtcgactctggcaagtcaaccaccaccggccacctgatctacaagcttggaggcattgacaagcgtgtgattgagaggttcgagaaggaagccgctgaaatgaacaaacggtccttcaagtacgcttgggtgcttgacaagctcaaggctgagcgtgagagaggtatcaccattgatatcgctctgtggaagtttgagaccaccaagtactactgcactgtcattgatgcccctggacatcgcgacttcatcaagaacatgatcacgggtacctcccaggctgactgtgctgtcctgatcattgactccactactggtggttttgaggccggtatctctaaggatggccagacccgtgggcatgctctccttgctttcacccttggggtcaagcagatgatttgctgctgcaacaagatggatgcgaccactcccaagtattccaaggcccgttacgatgagattgtgaaggaagtttcatcctacctcaagaaggttggatacaaccctgacaagattgcctttgtccctatctctggttttgagggtgacaacatgattgagaggtccaccaaccttgactggtacaagggtccaaccctgcttgaggctcttgaccagatcaccgagcccaagaggccttcagacaagcccctgcgtctgcccctccaggacgtgtacaagattggtggtattggaactgttccggttggtcgtgtggagactggtgtcatcaagcctggaatggttgtcaccttcggtccaactggcctgaccactgaggtgaagtctgttgagatgcaccacgaggctctgcaggaggcccttcctggtgacaatgttggcttcaatgtgaagaacgttgctgtgaaggatctcaaacgtgggtacgtggcctccaactctaaggatgaccctgccaaggaggctgctagcttcacctcccaagtcatcatcatgaaccaccctgggcagattggcaatggctatgccccagtgctggactgccacacctcccacattgctgtcaagtttgctgagctcataaccaagatcgataggcggtctggcaaggagcttgagaaggagcccaagttcctgaagaatggtgatgccggtatggtgaagatgattcccactaagcccatggtggttgagaccttctctcagtatcctcctctgggtcgttttgctgtccgtgacatgaggcagacggttgctgttggagtcatcaagagcgtggagaagaaggacccaactggtgccaaggtgaccaaggctgcaataaagaagaaatgatgcgtcctcccatgtgccctcgtttattttgtacttgtgcccgtatacttcgatctgttaaaatctattggttgtgtgccctgtgtctgttgtttgggtatctatactgttattttgagacatggttgacttgcatggtcatctggattgggttcgcatttctgagtcatttgtcttgacatgaaaatcttgcttttttttct

SEQ ID NO: 28433 - DNA, 702 bp, Zea mays
  Clone ID: LIB4758-036-E8_FLI
ccgggacacaaacatttcatcgcctcctaaagcagcatcggccactaacaccgtctcttcctcacctagctagggaacgagaacgaccatggcgtcccaggccatcgagagccaccgtgcaggcgctgaggtcgtcaccggaggagacgcaatctgcaggaagaagtcaatcgagctgctggaggagctcggcctccccaagggcttcctgcctcttgaggacatccaggagttcgggtacaaccgcgtgacagggttcatgtggctggtgcaggggaagaagaaggtggagcacaccttcaaaaagatcaagcagaccgtatcgtatgccgctgaggtgacggcattcgccgagaagggcaagctgaggaagatcaccggcgtgaagacaaaggagctgatgctctggctcagcgtcgtcgaggtctacgttcccgaggcctcaccagagaaggttaccttcaagactggcactggcctatccgacaccttcgatgcctctgcctttgcgctgggagagtaattagcagtcataaaaatggttggcgtcaaaagacatgcataatctatcttttgtatttgtaaatttttcatatatcttgagatgagtttgtagtactcatgggcgatgcccattgaaacatttctatgtattttcttgtttatcagataggctttttttaaataactcacttcaaaact

SEQ ID NO: 28434 - DNA, 634 bp, Zea mays
  Clone ID: LIB4758-037-F5_FLI
ccgggaggccaacccaaacgcaaccgcaaccgtagccacagcacagcacaacacgtcggcatgtatccgcccaaggccagcggcgatccggcgccggtgactggcttccccgtcggcgggcctgccgcctcctcccagtggtcctccggcctgttggactgcttcgacgactgcggcctctgctgcctgacttgctggtgcccgtgcatcacgttcgggcgcgtggcggagatcgtggaccgcggcgcgacgtcgtgcggcacggcgggggcgctgtacgcggtgctggcctacttcacgggctgccagtggatctactcgtgcacgtaccgcgccaagatgcgcgcccagctcggcctccccgagaccccctgctgcgactgcctcgtccacttctgctgcgagccgtgcgcgctctgccagcagtacaaggagctcaaggcccgcggcttcgaccccgacctcggctgggaccgcaacgccgccgccgccactatgctgcctccgtccgcacaggggatgggccgctgaccgctgaccggccagcgcctctgcgtaaataaattattaatgcttatatatgtatgtgtttctttcagccggaagaaaataatatatatgtcgtgtcaagact

SEQ ID NO: 28435 - DNA, 832 bp, Zea mays
  Clone ID: LIB4758-041-B12_FLI
ccgggagaaaacgagttgaagacttttcgatacacgcacagatcgcctttcaagttgaacgggctgccggcctaccgcttacagacgattcaaccgtccgccaaatccaaacgcaccgatccattccagaccatggcgacgaccaaggatcccgcgaccatcggcggcgagcccgccattggcattccctaccacccggcggcggaggcccaggggcactattactacgcgccgccgccgaacccctacgcggcggggatgccgccgcccaacgcgatctacgccggcgcgcccaagggggtgccgctccagcagaccatgttccgcgacacgcccgcgcccttccactgccaggcctgcggtgaagccgccgtctcctccgtccggtcaaagccaagccttgcatccgtcgtggcttgcatgatgccattcatgctgggggtctgcttcctatgcccttcgatggactgcctctggcacaagtaccattactgccccagctgtggggaaaaggtgggtgagttcaggaagtcggacccgtgcctcgtcgtggatgcgacccggtggtccgagccgagcttcgccgtgcctgcgtagcgcacatatgcaccacttgctatactgccttaaaaaaatgagagtgttcgtttctctcgtctagtctgtatataaaagatgctactggcttgttgcatgctgtatattactgaacctgaagaactgccgttgcgctctagtctctcctcccaacgttagaattgaatattttttgttttctttggaacagaataaatttgctgctcttacaagtgcataatcgaatctagtacac

SEQ ID NO: 28436 - DNA, 1009 bp, Zea mays
  Clone ID: LIB4758-044-A6_FLI
ccgggagagcgagactgggagcttcgaaagccacacgccccacgggccacgggcgcagctcctttcccctgtaccccccaacggcccaaccccgctgggtcgctactcctctgctcctccggtgaccgcgtcatgccgctcccgacgatgacccactcctctgcctatctcctcccggccccaaccgccccgtccgaccccagcggcgctgccccgaccacctacgcgctcgtcgtcctcaaccagcgcctcccccgcttcgcgccgctcctctggtcccgcgcgcgcctgcgcgtgtgcgccgacggaggcgccaaccgcgtcttcgacggcatgccggaactcctcgcgggcgaggaccccgccgaggtccgcaccaggtacaagccagatgtaattaaaggggacatggactcaataaggccagaagtgaaggagtattattccaaattgggcacaaacatagttgatgaatcacatgatcaggacacaactgacttgcacaaatgtgtatcatttatcacaagcaatctccctatcccagagaactgtgtattcttgttcttggcgcacttggcggaaggttcgatcatgagatggggaacatcaatgtattataccgcttttcaagcatcaagatcatcctcctatcagacgactgttcaatctttctgctccctaagacacactcccacgagatccatattaagaaatcggttgaaggtcctcactgtggtttgattccgatgggtggaccgtcagctaccacaacaaccacagggctccgatggaatttagataacaccaacatgatgtatggtggattgataagcacatctaacatcgtggatgacgataaagtaacggtgacttcagattctgatctggtttggaccatatcgcttcggaattgagttcaacttgtataattccatgcccaaattttgtcgcctcaaattacatgtattcagtttcaatattattctgtaactggtgtgatattgtttcc

SEQ ID NO: 28437 - DNA, 1727 bp, Zea mays
  Clone ID: LIB4759-023-B1_FLI
ccggggcttcagctcggcgtcttcacaaacgccggcgcaaactctcgcccgagcccgacagatcttcaattccccattccgcccaccgatcgaccttcacgccagtctcggtctcttccgaaggcgtcgcgcgcggttgtttgagaggagaggaggaagatgagggagtgcatctccgtccacatcgggcaggccggcatccaagtcggcaacgcgtgctgggaactttactgcctcgagcacggcatccagcctgatggccaagtgcctggagataagaccgcgggacatcacgatgatgccttcagcaccttcttcagccagactggtgctgggaagcacgttccccgtgcaatcttcgttgatctagaacccactgtgatcgatgaggtgcgcgctggcacataccgccagcttttccaccctgagcagctcatcagtggcaaggaggatgccgctaacaatttcgcccgtggccactacacaattggcaaggagattgttgatctgtgccttgaccgtatccgcaagcttgctgacaactgcaccggcctccagggcttcctggtcttcaatgccgttggtggtggcaccggctctggccttggttctctcctccttgagcgcctgtctgtggagtacggcaagaaatccaagctgggcttcactgtgtacccatctccccaggtgtcaacctctgttgtggagccttacaacagcgtcctctccactcactcactcctggagcacactgatgtctctatcctgctcgacaacgaggccatctatgacatctgcaggcgctccctcgacattgagaggcccaactactccaacttgaatcgccttgtgtctcaggtgatctcatcgctgactgcttctctgaggttcgatggtgccctcaatgtggatgtgaacgagttccagaccaacctggttccttacccgaggatccacttcatgctctcctcctacgcaccggtgatctcttctgcgaaggccttccacgagcagctgtctgtggcggagatcaccagcagcgcgttcgagccggcttccatgatggtcaagtgcgacccacggcacggcaagtacatggcttgctgcctgatgtaccgcggcgacgtggtgcccaaggacgtgaacgccgcggtggccaccatcaagacgaagcgcaccatccagttcgtggactggtgcccgacggggttcaagtgcggcatcaactaccaggcgccaacagtggtgccgggtgccgacctcgccaaggtgcagcgtgccgtgtgcatgatctccaactccaccagcgtcgtcgaggtgttctcccgcatcaacagcaagttcgacctcatgtacgccaagcgcgcgttcgtgcactggtacgtcggcgagggcatggaggagggggagttctccgaggcacgcgaggacctggccgccctggagaaggactacgaggaggtcgccgcagagggcggcagtgatgacggtgacgaggaggaggaatactgatctgcttgcatgaatctgtttggctgtcgagccaggttgtggtgttgaaaaacctctgcttgcatgaatctgcttggctgtcgagccaggttgtggtgttgaaaaaccttcgttttgtgtcctggccctctgtttgggtgtttccttccatcatcacttgctgaactgaaccgctctagtgtttgcatttgtaattgaagtctgtcgctttaagc

SEQ ID NO: 28438 - DNA, 1480 bp, Zea mays
  Clone ID: LIB4759-032-H6_FLI
tgtatggcttatttgcgcttagtttgctttatttctatggattgtttcaaaaaagaaaactatggagattgcatacagttcacgacagatcaagaggatcatcgatgtcctgctgcgctggtcatttgttgcatctgttgctggtgatgcaatatatgaattttactccaaaaaaaaaaaaaaaaaaaggggcccgccatcaccaacccacctcccttcaattataaacctataaaatatcatcattgacccaagctgaggcgactagtgggtattgatttttggtggggcagatcaaggagggggggagggggttaacttccaaggaaccagttcattgctggttctgctagcaggaggttggatttcagaggcagaagctttcagccaggcgggctcagggcgcgggcacatcaatggctggcaaggaaatcctccacaaggtgaaggacaaggtgaaagatgcatttagttcatcaggaccagaaacagggaaaggcaagacaaagttatcaggcaagcgtgtcaagcatggttaccatctggtgaagggcaaatctaatcatccaatggaggattatctagtggcagagtaccggcaagttggtgaacatgatttgggattgtttgctatattcgatggtcacctgggccacactgttccagactttttgagctcccatcttttcaataacatcttgagtgagccagaattcttgagtgatccagaaactgctatccgaaacgcataccaacttacggatcagaagatattggaaaacgcagcagagttgggaagaggtggctccacagctgttactgccatcttaataggaagtgacaagttcgtgaaactagttgttgcaaatgttggggattcacgggcagttattagcaagaacggtgtagcgaagcagctttcagttgaccatgaaccaaacatggagcgacaaacgatcgagcagaagggtggctttgtatcaaacctaccgggtgatgtgccacgtgttgatgggcagctggcagttgcaagggcatttggagaccggagcttgaagaagcacctcagctctgatccatatgtggtcgagcaaactatcgatgaaaatactgagtttttaattctagcaagtgatggcttgtggaaggtgatgtccaaccaggaggctgtcgacgagatcaaggattgcaaggacgcgcaggcagctgccaagcacctgacggagcaggccgtgaaccggaagagcaaagacgacatttcagttatcgtagtcaagttcatgtgctagcacatcgtcaggttaaatggtctcccgattgtataccgtgttaaattatcttttaagtcttgtgctcgctggtgtcggacattttgtttaccttctttggttttgggaccccacaaagagggtcaaggcttgtaacatattgttgtttgtttaaggctccaaataaagcatggtaccaccatagtaattac

SEQ ID NO: 28439 - DNA, 1520 bp, Zea mays
  Clone ID: LIB4759-036-H6_FLI
ggcgaggaaggaggcgaaaggaaccatggattcctccggcggcggcggtggagcgcagatcaagggtatggcgacgcacgggggccgctacgtgctgtacaacgtgtacgggaacctcttcgaggtctcctccaagtacgccccacccatccgccccatcggtcgcggcgcctacggcattgtctgcgcggctgtcaactcgcagtcaggggaggaggttgcgatcaagaaggttggcaatgcgttcgacaaccacatcgacgccaagcggacgctcagggaaatcaagctgctgcgccacatggaccatgagaacatccttgccttaaaggatgtaattcggcccccaactagagagaactttaatgacgtgtacattgttactgagttaatggatacagatctccatcagatcgtacgctcaaatcagccattgactgatgatcattgccagtacttcttgtatcagttgttacgagggctaaaatatgtgcactcagcaaatatattgcaccgcgatctgaagccgagcaatttgttcctaaatgcaaattgtgacctcaagattgcagactttgggcttgcaaggaccacttcagagacagatctcatgacagagtatgtggtcactcgttggtaccgggcaccagagctgctgttgaactgttcacagtatactgctgccattgatgtctggtcagttggatgcatactaggtgaaatcgttactcgtcaacccctgtttcctggacgggattacatccagcaattaaaattgatcactgagctcataggctctccagatgatgcaagcctgggatttcttcgaagtgataatgcaaaaagatacatgaaacaactaccacagtttccaagacaggacttccgcctgcgtttccgcaacatgtctcctggcgcagtcgatttgttggaaaggatgcttgtgtttgatccaagcagacggattacagttgatgaggctctgcatcatccatacttggcttcacttcatgagatcaatgatgaacctacctgccctgcacctttcagctttgattttgagcaaccatcctttacagaagcgcatataaaagaactcatctggagggaatctttagcatttaacccagagcctccctactaatatcaaaaggatgatgagttatctgctagaggcatatgaagatctctaggtccagcggacgcaagaacttatgtctgtgtcagtgtgcgttgattatttacgtgcggtttgttgggcatacgggcatgggttggtgctgcaattgcaactctattatggcttgtgagagcaaacaaacgtctgtattcattttcagatgcctgaaccaggcttgtattataccgcttgactccataaattattcttgtgtatctatgcttgtaattttgcagacaattacttgaacgccccttgtatatctgagttgacatctcttttctattgtaacatctcaaacataatttattgtgatgttactaagggtcggattggaagg

SEQ ID NO: 28440 - DNA, 597 bp, Zea mays
  Clone ID: LIB4762-017-F11_FLI
taccctcgaggccggccgggacacacgcgaatcctcaaatctgcccttgccgccgccactgcccgatccaggtgtgcagactgctccctcctcctctccgctccgaatggcccgcacgaagcagacggcgcgcaagtcgaccggcggcaaggcgccgcggaagcagctggccaccaaggcggcgcgcaagtcggccccggccacgggcggcgtgaagaagccgcaccgcttccgccccggcaccgtcgcgctccgcgagatccgcaagtaccagaagagcacggagctgctcatccgcaagctccccttccagcgcctcgtccgcgagatcgcgcaggacttcaagacggacctgcggttccagtcctcggccgtggcggcgctgcaggaggccgcggaggcgtacctggtggggctcttcgaggacaccaacctctgcgccatccacgccaagagggtcaccatcatgcccaaggacatccagctcgcccgccgcatcaggggcgagagggcttgagctgtcgcgctgctgctgttcgtcgttgtaatgtctgaagtagatggtggtgggtgctttctatgccgtgcctatttggc

SEQ ID NO: 28441 - DNA, 907 bp, Zea mays
  Clone ID: LIB4762-018-A6_FLI
ccgggacgccgcaatcaaataaataaataaaaacacgccgccgccatcaatggcgatgtcgcgcttcgggcgctccgggcagccggagaaccgcgaatctttctccctcctcgtcctcaacgtctccttccgcactacggctgacgatctcttcccgctcttcgatcgctacggcaaggtcttagacatctacatcccgcgcgaccacaggactggggatccgcgagggttcgcgttcgtgaggtacaattacgaggatgaggcgcgggatgccattgacgggcttgatgggatgaggtttgatgggcgtgcgctcatggtgcagtttgccaaatacggacccaatgctgaaaagattcataggggtagaattacagaagaaaatccaaagccaaggggtcgttgcagaagccgcagtccaagacagaggtatcgagaggattatcgggatagagactatagaaggcgaagccagagcagaagtagggagcgatatgaacaggccgggtacagagatggtgatcatcgtcgccataggactcacagtatcagtcctgattatgacaggaaacgtaacagacacagtggctctcctgtacttaaacgctccagtcatagcagaagtcgttcgcctcgtagggcacctcatgaaggaatacctagcaagcccagagatggccgcgctgcatgttctggaagcccttgaccctgagctgtggctgaatatcacacagtttctcctggacagcttgaggcatctaaacagttctcatcatttgtattttcttactaagatggcctttgttttagtccaggatgagtagactgagctttggcaaaaacaacaatgtctgcttggttactgaatctacatggtgacaatgatggaatattgtgtggcacagcc

SEQ ID NO: 28442 - DNA, 714 bp, Zea mays
  Clone ID: LIB4762-026-H3_FLI
tccctctttctataagatttaatgaaaactcccaagttcccgatctcggccgcgcgagtcagtgcaccccgtgcgtgatcaacagaatcttggcggccagccatatatgggtgtactgctaggttccgggaggttcttggcgcgacggcctcccctcgctgctctcgaggctccccggacaaaagcggcagcgacaaaggtgaaacctctgctgattgggacaaggcatggtctgccttcaagaagaaagggaagaggaccctgttttctgatttctcaccggacaagtacgtgacctggaacccacggcgcagcgagtatccattgtcagaagaggtggatccaatcaagagaactgaaagatctaacttgatgctgtggacaagcccccagttcaccttggtcggggcgattatcatcgtcttgacattgctaatctatacactagttgttcctcctcccaagtaactgcagaggtgacaactactagggggggtgagctgtaaactagtagcatttcaattgggaagtctgcattgtacattttttacgtgtactatggcaactatagcagtattgattcaattgcaatcatgtagatacaacaccactgtccattccattctggaggttttcttcaattgtgtgctaaatggctgctgtctgagtcttatattcacttattataatgaagaaatatttggggtcaggtac

SEQ ID NO: 28443 - DNA, 631 bp, Zea mays
  Clone ID: LIB4762-027-B6_FLI
cgcaatcttcaatctccccagcaatccctagcagaagccttccatcctcactcgctcgatggcccgcacgaagcagacggcgaggaagtccaccggcggcaaggcgccgaggaagcagctggcgactaaggcggcccgcaagtctgcccctgcgaccggcggagtgaagaagccccaccgcttccgccccggcaccgtcgcgctccgggagatccgcaagtaccagaagagcacggagctgctgatccgcaagctgccgttccagcgcctggtgcgggagatcgcgcaggacttcaagaccgacctacgcttccagagctctgctgtctccgcgctgcaggaggcggctgaggcctaccttgtcgggctcttcgaggacaccaacctctgcgccatccacgccaagcgcgtcaccatcatgcccaaggacatccagcttgcccgccgcatccgcggggagagggcctaagcgtcatattttctgtcatcagtgcccgatcagaagatgtagagatatgctgggttctgtagtttgggttactgtcgaatcatcgagtgttggctgttcactgctgtaacttaattatcatgatgcatatgaaatggcaatgaactctgttatcagttctcc

SEQ ID NO: 28444 - DNA, 628 bp, Zea mays
  Clone ID: LIB4762-047-A6_FLI
acaccgcaatcttcaatctccccagcaatccctagcagaagccttccatcctcactcgctcgatggcccgcacgaagcagacggcgaggaagtccaccggcggcaaggcgccgaggaagcagctggcgactaaggcggcccgcaagtctgcccctgcgaccggcggagtgaagaagccccaccgcttccgccccggcaccgtcgcgctccgggagatccgcaagtaccagaagagcacggagctgctgatccgcaagctgccgttccagcgcctggtgcgggagatcgcgcaggacttcaagaccgacctacgcttccagagctctgctgtctccgcgctgcaggaggcggctgaggcctaccttgtcgggctcttcgaggacaccaacctctgcgccatccacgccaagcgcgtcaccatcatgcccaaggacatccagcttgcccgccgcatccgcggggagagggcctaagcgtcatattttctgtcatcagtgcccgatcagaagatgtagagatatgctgggttctgtagtttgggttactgtcgaatcatcgagtgttggctgttcactgctgtaacttaattatcatgatgcatatgaaatggcaatgaactctgttatcg

SEQ ID NO: 28445 - DNA, 617 bp, Zea mays
  Clone ID: LIB4762-050-F3_FLI
ttcgtactcgtacatatcctcctctgctgtcctggcgtttgcgggcccggtgctttctcttccttccggccgcggcaatggcgtcggggaacaacaacaagcagaggagcgaggaggagtggcgcgtcgtactctcccctgagcagttccgcatcctccgcctcaagggcaccgagttacccgggacaggagagtacaacaaattctacggcgacggggtttataactgcgctggctgcgggactcccctgtacaagtccgccacaaaatttgattctggctgcggctggcctgcattctttgaggggcttccaggagccataaaccgaacaccagatcctgatggtaggagggtagagatcacatgtgcagcctgcggtggccatctgggccatgtgttcaagggtgaaggcttcaagacacctactgatgagcgccactgcgtgaatagcgtctcgatcaagttcagtcctggctcctcctagatcatcttgagattctcgtgtcatggaactgcgggaagtacgacgaataagatttattgagcatgtgtgcgtgcctgcattctgctactctggctgtgagatgaatctattatcataagcagctgttacttt

SEQ ID NO: 28446 - DNA, 702 bp, Zea mays
  Clone ID: LIB4762-051-B7_FLI
ttcgctgcgccgccgcctccgacatcgtctcttcgtccccacgagcaaccgataatccgccggcgctgagatgttggtttatcaagacctcctatctggcgacgagctcctgtcggattcattcacctacaaggagctcgagaacggcgtcctgtgggaggtcgagggaaagtgggtcacccaaggtcctgttgatgtagacattggtgccaatccatccgccgagggtggtgaggatgaaagcgttgatgacacagccgtgaaggtggttgatattgttgacacattccgtctacaggagcaacctccttttgacaagaaatcatttgtctcttacataaaaaaatacatcaagaatctcactgctgtgttggagccagagaaagcggatgagttcaaaaagggtgtcgagggtgcaaccaagtttctccttagcaagctgaaggaccttcaattttttgttggtgagagcatgaaggacgaagcgtccgtggtattcgcctattacaaggatggtgccactaatccgacattcctctatttctctcatggtcttaaggagatcaagtgctagattagttacccatgttgggtactatatatgttctattgttatagccacaactatagctgccctgcctgaactgaactcaggttttttttaagaaaaaactgtccaagattggattgcttgttaaagag

SEQ ID NO: 28447 - DNA, 1038 bp, Zea mays
  Clone ID: LIB4762-052-C10_FLI
taaaaccatcgccctgcccccgtctccgcctccgctgcatcccatggcggctgtgcagcgcctcctccgggcagtcgcccccggtggctcggcagcggcggcggtcaggaggcgcatgacgtcgcttgcgccggagcaggcgccgtctgcagccgccgggttcccattcgcggcggagcagagggcaaggcggccggtggcggcggagaggaacgtgcagtgggtgttcctgggctgccccggcgtgggcaagggcacctacgcgagccgcctgtcgcgcctcctcggcgtgccgcacatcgcgacgggggatcttgttcgcgacgagctcacctccaccgggccacttgctacgcagcttgctgaaattgttaatcaggggaaattagtttctgatgaaattatcatcaatcttttgtccaaaaggcttaagaaaggagaagaccagggagaatcaggatttattcttgatggttttccccgtacagtaaaacaagcggaaattcttgatggtgttacagacattgatatggtggttaatctgaaactaagagaagatgttatagtagagaagtgccttggcagaaggatttgcggccaatgtggaaagaacttcaatttggcctgcattgatgttaagggtgaaaatggactcccaccaatctacatggcaccactgttgcccccaaacaactgcatgtcgaagcttattacccgagctgatgataccgaagaggtggtcagaaatcggcttcagatatataatgacatgagtcaacctgtggaaggtttctaccgagagcaggggaagctcttggaatttgacttgcctggtgggatccctgaatcttggccaaagctgctccaggttctaaacctcgaggaccaagaggagttgaggttggctgcagcgtaggtctctgggagaccgacctacatactgggaaaaaagaccataccacattttttttaataatggagaagaggaaacttactccatagtttagtgcgttatgcagaagtaatggttttcttgtc

SEQ ID NO: 28448 - DNA, 1465 bp, Zea mays
  Clone ID: LIB4763-017-C4_FLI
ctcgaggccggccggggccccgtcccaaatccccctgtcccgctaggattccccccaaaccctcccccaaaaccccagagcggagaagagcgcaagatgttcggcttcgggcaccacggccaccacggccagaacccgccggcgcacggcggcgtgcaccagcccaccttcaagatcttctgcaaggccgacgaggggtactgcctcaccgtccgcgacggcaacgtggtgctggcccccgccaacccgcgcgacgagcaccagcactggtacaaggacatgcgcttcagcacccaggtcaaggacgaggagggcaaccccgcgttcgccctcgtcaacaaggccactgggctcgccatcaagcactccctcggccagtcccacccggtgaagctggtgccgttcaacccggagtaccaggacgagtcggtgctgtggacggagagcggcgacgtgggcaagggcttccgctgcatccgcatggtgaacaacatccgcctcaacttcgacgccttccacggcgacaagggccacggcggcgtgcacgacggcaccaccgtggtgctgtgggagtgggccaagggcgacaaccagagctggaagatcctgccctggggcgacgaggcctacgccgggggcggcagcagcgccgccaacgcgccccgcttcggcggcggcgagcccaccgtccgcatctactgcaaggccgacgaagggttcagcgccacggtccgcaacggcgccgtgtgcctcgcgcccaccaacccgcgcgacgagtaccagcactggatcaaggacatgcgccacagcaacagcgtcaaggacgaggaagggtacccggccttcgcgctcgtcaacagggtcaccggcgaggccatcaagcactcccagggcgagggccacccggtcaagctggtgccctacaaccccggctaccaggacgagtcggtgctgtggacggagagccgcgacgtcggccacggcttccgctgcgtccgcatggtcaacaacatctacctcaacttcgacgccttccacggcgacaaggaccacggcggcgtgcgcgacggcaccaacatcgtgctctggaagtggtgcgagggcgacaaccagcgctggaagatcgtcccctggtaaatgtgctgttctgtggctgcactggtcatcaccatgatctggagctttgaaggcatagccacctgtggtcagcaactgctgccgtgttgctagaataaagttggtggcgatcgatcgatcgatctttggtgatgggtgtccctccctgtgtgtttgtgtttagttccagtcgtttgtgaggaagtcagttatgtttgagtgagaggggtacttcgctcttcggttaactctgtacttgtcatgaggagagttttcatacccggagtgtaggaactctgtactgtactcggatccttcctttttcatcgaagtgggttttattttatct

SEQ ID NO: 28449 - DNA, 2155 bp, Zea mays
  Clone ID: LIB4757-017-G10_FLI
aagaacaaaggagccgccaagacggcaaggcgccaaggcgaccggacaggcctaggcgaagcgggcgcagctcctgccggtggtgggtagtggccctagcaataaacatcttgcccaaccggctctcgctacgcgcctacgcttcgtcaacaccggaaccgcccccaccccgccccgagcgccaattgcaccgccgctcccggccaaaccggccaagtcaacggcgcatccacttctccttaccatcccggaggtaatcttgcgccgattcggtgccgatttgcgccatccgcgaccggaggctccgccgggtcttgtgttcttgcggggcgggggctcaggacaacctggcctctgcttgattggattcggggcgttcggcgcctccagctcgcgatctttcctgccggtttcgtcgaccgctggtcaacctggccggtcggtcccgggggctcttcacctccgtgctgcctgccaccgtcgctttagtcaagtctcggccaagattttagctatctccggtcaaaaggctttaccgattcttggattggtggcttcttgggggcgagaagccggttcctgtttcgtctcttgtgctccagcatgttctgtagcacaccggttccccatctccagtgaaggtgttcgtgtgctcttggttttgtgcctcccggaatcgttcccggaaagctacttttggccgctgcggcgatggcgtcgagcaccagcgagatggccgaggggaaggagaagctgaagaggtccggcagcttgggaagcaacgatacgtatgtgcgtgcagacaagattgatcttacgagcctcgacatccagctggagaaccagctcaccaagacctggggcaaagccaatctcaaatcccaggggccaaaggaggagtgggagatcgaccttgcaaagctggagatccgctatgtcatcgctcaggggacgtatggcacggtctaccggggcacctacgatggacaggacgtcgcagtgaagcttttggattggggagaagatggttttgccacagaggctgaaactgctgctttacgaacatcatttaagacggaggttgctgtttggcataagctcagccaccctaatgttacaaagtttgttggtgcatctatggggaccacagaccttaagattccatcaaacaattccaatggtgctgcacgtacaaatttgccagcaagagcatgttgtgttgtggtagagtatcttgctggaggaactttgaagcaatatttgataaagaatagccgacggaagcttgcttataaagttgtggtccagcttgcattggatttggccagaggattgagctatctgcactccagaaagattgtacatcgggatgtgaaaagcgaaaacatgctgcttactccacagagaaaccttaagattgccgatttcggtgttgctcgtgttgaggctcagaatccaaaggacatgactggtgcaacaggcacacttggttatatggctccagaggttcttgatggtaagccatacaacaggaagtgtgatgtttatagttttggcatttgtttatgggaaatctattgctgtgacatgccttacccagacctaagttttgccgatgtctcatctgccgttgttcaccagaatttgcgcccagacattcctcgctgctgcccaagcgcatttgcgaatgttatgcggaaatgctgggatgcaaaccctgataaacgccctgatatggatgaagtggtgcagcttttagaggctctggacacgagcaaaggcggtggcatgatacctgatggccaatcatcaggatgcttatgcttcacaaaggctcgtggtccatagatacttttcatggtactcccttcccttggcaacactttccccgtgtaaatgactgggccacagcatgcttctctttgcacgacctgtgcagtcgtcgcttacagttctccatagctgccttgcgatcattgcgtgtcaacctgtagctctcatacgatttttgctgtcctctgtcgacaatcttttcatatactagtgtgctgctgtaattgtggttctaaaagagatttggcatacgcgttacactcttgaaactgctgtatgatcagtataaatctttactctgattattatttccatttgtgct

SEQ ID NO: 28450 - DNA, 2001 bp, Zea mays
  Clone ID: LIB4757-017-G3_FLI
ccgggaacggcctcgccccgctttataggccgccgcccgcgccacatcgccaccgtctcgcaccgtcgcggccacccattctctctcgtccatcgcatcgctccggctcccagcgcaatcgatccatccgtccctaggtgtgcttcagctatgcagttcagcagcgtgcttcccctagagggaaaagcgtgtatgagcccagtgaggagaggcagtggaggttatgggagtgagaggatgaggatcaactgctgcagcatcaggcgcaacaaggcactgaggaggatgtgtttcagtgcaaggggtgctgtgagcagcacgcagtgtgtgctcacatcagatgctggcccagacactcttgtcgtccgaacatcctttcggaggaattatgctgatcctaatgaagtcgctgccgtcattttgggtggtggtaccgggactcagcttttccctctcacaagcacaagggccacccctgctgttcctattggaggatgttacaggcttattgatatccccatgagcaactgtttcaacagtggcataaacaagatatttgttatgactcagttcaactcagcttctcttaaccgtcacattcatcgtacctatcttggtggggggatcaacttcactgatggatctgttgaggtgctggctgcaacacaaatgcctggggaggctgctggttggttccagggcacagcagacgccgttagaaaatttatctgggtacttgaggagatcaactctatcgtatggattacatggagcttgtgcagaaacatgtcgatgacaatgcagacataactttatcatgcgctcctgttggagagagtcgagcatctgactatggattagttaagttcgatagttcaggccgtgtaattcagttctctgagaaaccaaagggtgctgccttggaagaaatgaaagtggataccagcttcctcaatttcgccattgattccccagctgaatatccctatatcgcttcaatgggagtttacgtttttaagagagatgttttgttagaccttctaaagtcacggtatgctgaactgcatgactttggttctgaaattctgcccaaggctttgcatgagcacaatgtacaggcatatgttttcactgactactgggaggacattggaacaatcagatctttctttgatgcaaacatggccctctgcgagcagcctccaaagttcgagttttacgatccgaaagcaccattcttcacttcccctcggtacttgccaccaacgaagtcggataagtgcaggattaaagacgcgatcatttcacacggctgcttcttgcgtgagtgtgccatcgagcactctattgttggtgttcgctcacgcctaaactctggatgcgagctcaagaataccatgatgatgggtgcggatttgtatgagaccgaagacgagatctcaaggctactggcagagggcaaggtgcccattggcgtaggggagaacacgaagataagcaactgcatcatcgacatgaatgccagggttggaaggaacgtctccataacaaacaaagagggcgtccaagaagccgaccggccggacgaaggatactacatccggtctgggatcgtggtagtcctgaagaacgcaaccatcaaggacggcaccgtcatatagagactaactttggccttacgcatggcgtgcaaggttacaggttagtcatcgtcttgagagttgagacttagtttgaggcgcgcgcccgaccttgacttgagccgtcggagggacaagaacatgaggaagaagggctggtggtgccggatgttgccatggacgacgagaaatggtttggtgcggtcgcatcggttccagtagctagctcttccgatgttattaatatatgtatctagtggagtagtgcgaacagtgcaataagctgggcgagcaaagccgcggcaactcttggcttggggattgttggtgcatcttgtaaataataaactcggacgcagcc

SEQ ID NO: 28451 - DNA, 1077 bp, Zea mays
  Clone ID: LIB4757-018-A2_FLI
atcgaggccggccggtacttgaagcctcaccagaccacaaggagggatattcgcaggaccagcagcacccgaggacgaggtgtgtggagaggctgctctgccataccaaaaagcagacagaggaccaaggaaggaagcagggatccggctttgctctgcaaccatgagctccctgtacgacgtctcctgcttcgccgctggccttgctggcaacgtcttcgccctcgccctcttcctgtcgccggtgccgacgttcaagagggtcctcaaggccaagtcgacggagcagttcgatgggctgccctacctgctgtccctgctcaactgctgcatctgcctctggtacggcctcccgtgggtctccgacggcggcagggccctcgtcgccaccgtcaactgcaccggcgccctgttccagctcgcctacatctcgctcttcatcttctacgccgacagcaggaccactcggctcaaggtcgcggggcttctggtgctagtggtcttcgcgttcgcgctcatcgcacacgccagcatcgccttcttcgaccagccgctccggcagctgttcgttggcagcgtcagcatggcgtccctggtctccatgttcgcttccccgctggctgtcatgggtgtggtggtccgcaccgagtgcgtggagttcatgcccttctacctctctctgtccacgttcctgatgagcgcatccttcgcagtgtacgggcttctcctgcgtgatttcttcatatacttcccgaatgggctcggagtcatcctgggagcaatgcagctggtgctgtacgcgtactacagccggagatggaaaagcagcgactcgtcagcaccgttgcttgcctgatcatgtagccgagttcgtcagtccaattgcccgtgccgtgctttctgttgttctctgttctgccatcctgtaattctaggagaggagctaggcggtgttttggaacagattaatcgtactgctacgaaatatattttttgagatagattattttaaatagagatggtcataaagtttattcgtcttctaagagaattttgaatacgatcattttatttact

SEQ ID NO: 28452 - DNA, 1852 bp, Zea mays
  Clone ID: LIB4757-018-C4_FLI
ccgggaaacgcgaagcgaccagagggcgcccgtggcccgcgggccgcccccattccattccttccagttccagatcccataattgcacgcgacactacaccgcccccttccgcaagtcagagggacattgcattggggaactacagaaaagggtccgaatcgaatccgtggtgcactgccccttcctcccccacaagccgccgccgccgccgtgaggactccggcgaatggcgtcccgcgtcgcctcgggcctcctccgccgccgcgccggcgccacactaggcctcctaaggagttatgcacatgtcagaagctacaacagtcaactttcagctttggtttctgctacatctgaatgctcaaatctgccgagaagatgctattacttacctaatccctctccataccaagtttggagtaggtcatttgcttcagacaacggagacaagtttgaggctgttgtgcccttcatgggtgaatctgtaactgatggaactcttgctaacttcttaaagaaacctggagacagagtcgaggctgatgaacctatagcgcagattgaaactgataaggtcactatagatgtcgcaagtcctgaggctggtgttattgaaaagctcattgctagtgaaggcgacacagttactccaggcactaaagttgcaatcatatccaagtctgctcaacctgctgaaacacatgttgctccatcagaggaagcaacttcaaaagaatcatctccaccaaaagttgaagataaaccaaaggtagaggaaaaagccccaaaagtagatcctcccaagatgcaagcaccaaagccaactgcaccatcaaaaacatccccttcagaaccacagctccctccaaaagaacgagagcggcgggtgccaatgccaaggctcaggaagcgtattgcaaaccgtcttaaggattctcagaacacctttgcaatgctgagtacatttaatgaagttgacatgaccaatttgatgaagcttcgttctgattataaagatgaatttgtcacaaagcatggtgtaaaattgggtcttatgtcttgctttgtcaaggctgctgtttctgcacttcaaaaccagccaattgtcaatgctgtcattgatggtgatgacatcatatacagagactacgtagacatcagtgttgctgttggcacttccaagggccttgtggttcctgttatccgagatgctgataccatgaactttgctgacattgagaaagggataaacaaccttgcaaagaaagcaactgagggggcgctctcaattgatgacatggcaggaggaacattcaccatctccaacggtggtgtctatggaagcctcctcagcacacctatcatcaaccctccacagtcgtctattctggggatgcattccattgtgcaacgccctgtggttgtgaatggtgacatccttgcgaggccaatgatgtaccttgcgctgacttacgaccacaggctgatcgatggcagagaggctgtcttcttcctgcggcgcatcaaggatgttgtcgaggaccccaggaggttgctgcttgacatataaattcatgcaccagcgctgcgctgccctgccggactgttttgtgcaattgtgcttatctggaaataatgccatggaaatttttgactgatgaaaaagaattacttcctcagaaagacgaaatctgagctgaggataccgaggtttttctctatataatcgtagaagagcaaactcaactcaacatgaggtcatgtttaattttcggatctgagatgttccattacgggatgcagttcccacaaacagtcattttatttaatatgcaagagcaatagagctgctgc

SEQ ID NO: 28453 - DNA, 1201 bp, Zea mays
  Clone ID: LIB4757-018-F2_FLI
cagacaggggagactagttgagacttgagactggacaggagaccagcttccggaacctcctcgagcacactggttgaagctctgttccaccctctcgctatcggttcctataaataaagcaagagcccctcgtcgatcctcacctccgcagctagcatcgatccgccattgctcaccgcacaagtgcacgctcacctgtcacctcacacacgcagctaagtagctaacgccggaggcgagaacaagaaaaagctcgacatggccgaggagaagaagcagggcctgcagctgctggacttctgggtgagcccattcgggcagcgctgccgcatcgcgatggacgagaagggcctggcctacgagtacctggagcaggacctggggaacaagagcgagctgctcctccgcgccaacccggtgcataagaagatccccgtgctgctgcacgacggccgccccgtctgcgagtccctcgtcatcgtgcagtacctcgacgaggcgttcccggcggcggcgccggcgctgctccccgccgacccctacgcgcgcgcgcaggcccgcttctgggcggactacgtcgacaagaagctctacgactgcggcacccggctgtggaagctcaagggggacggccaggcgcaggcgcgcgccgagatggtcgagatcctccgcacgctggagggcgcgctcggcgacgggcccttcttcggcggcgacgccctcggcttcgtcgacgtcgcgctcgtgcccttcacgtcctggttcctcgcctacgaccgcttcggcggcgtcagcgtggagaaggagtgcccgaggctggccgcctgggccaagcgctgcgccgagcgccccagcgtcgccaagaacctctacccgcccgagaaggtctacgacttcgtctgcgggatgaagaagaggctgggcatcgagtagagcatccatcggtcggccggtggctggccgggagtaataatgacgaaccaattatctagttttggtttgagtgtgctcagcagagcagttcgtgttcatgagttcgtcgtcgttgtattttctattgtcagcggtggcagcgccgtacgtgttgcctcgtacaccacaaccgaataagggggtgtttggtttgcccctcctaaaatttagcccctatcacatcgaatgtttgaacctccgttcggggtattaaatgtagtcggattag

SEQ ID NO: 28454 - DNA, 1882 bp, Zea mays
  Clone ID: LIB4757-023-F1_FLI
ccgggatccgtgatgcaagacaatttcctgaaccactgtgattagtacagcaaaaatcaccatctttcgactgagattgacacaaatagatcaagcttatatacgcaattaagtaggtagccacaatggaggacaaggtgctcatcgccgtgggaacggtggcggtggtcgccgtcctctccaagctcaagtcggccgtgaccaagccgaagctgaaccttcctccagggccatggacgctgccgttgattggcagcatccaccacatcgtcagcaacccgctgccctaccgggcgatgcgcgagctcgcgcacaagcacgggccgctcatgatgctgtggctgggcgaggtgcccacgctggtggtgtcgtcgccggaggccgcgcaggcgatcaccaagacgcacgacgtgtcgttcgccgaccgtcacatcaacagcaccgtcgacatactcaccttcaacggcatggacatggttttcgggtcctacggcgagcagtggcggcagctccgcaagctcagcgtgctggagctgctgagcgccgcgcgggtgcagtcgttccagtgcatccgcgaggaggaggtggcgcggttcatgcggagcctcgccgcgtccgccagcgccggcgccaccgtcgacctgtccaagatgatctcaagcttcatcaacgacaccttcgtcagggagtccatcggcagccggtgcaagtatcaggacgagtacctggctgccctggacactgccattcgggtggccgcggagctaagcgtaggtaacatcttcccgtcgtctagggtgttgcagagtcttagcacggcgcgacgcaaggcgatagcgtcccgcgacgagatggcgcgcatcctcgggcagatcatccgcgagaccaaggaatccatggatcagggtgacaagacttcaaacgagagcatgatctccgtcctgctcaggcttcagaaagacgccggcttgcccatcgagctcaccgacaacgtcgtcatggcgctcatgtttgacttgtttggcgcgggcagcgacacctcgtcgacaacgctgacctggtgcatgacagagctggtccggtacccggcaacgatggccaaagcgcaggccgaggtccgggaggctttcaaggggaagaccacgatcacggaggacgacctgtccacggcaaatcttaggtacctgaagctcgtggtggaggaagcgctcaggttgcactgcccggtgccgctcctgctcccacgcaaatgccgggaggcgtgccaggtcatgggctacgacatccctaaaggcacatgcgtgttcgtcaatgtctgggcgatctgtagggaccctaggtactgggaagacgccgaggaattcaagccggagcggttcgagaactccaacctagactacaagggaacatactacgagtacctcccgttcgggtctggccgtcgcatgtgcccgggagcaaaccttggagtggccaacttggagcttgcactggccagccttctgtaccatttcgattggaagctaccaagtggacaggagcctaaggatgtcgatgtctgggaggctgcaggactggttgcgaagaaaaacataggcctggttctgcaccctgtcagccacattgctccggttaatgcctaattgacgaaccagtttgctcctgtatttttcatgctttactgatatatgagaaaataaatccaaccagttccctcctgtatttttcatggaagcattatatctctgtatctatctatctatctatctatctatctatctatctatctatccataatgcttcatcaagagaaatgttggcgaaaatctatttttgcaagaataacaatatcagagccaacaacagttttatatgtgcatgg

SEQ ID NO: 28455 - DNA, 1510 bp, Zea mays
  Clone ID: LIB4757-025-C10_FLI
ccgggaatactcgctgtttagcttctcactcgcctgcgacatcggcccaacttttgagcccgcgacgaccagcaacaatcactgccaggacaactcccgccagcctatacactctcgtcgcacagcacagaatggcgtcctcctcctcagtccagaagatcaaggtcaaaaaccccgtcgtggagctcgacggtgatgagatgaccaggatcatctggcaggtcatcaaggacaagtttatccacccttaccccgacattgacctcaagtactacgacctgggcctgccataccgtgatgagaccgacgaccaagtcacgctcgatgccgccgaggccatcaaaaagtactcagttggtgtcaagtgcgcaaccattactccagacgagcagcgtgtagaagaattcaagctcaagaagatgtggttgtcgcccaatggcaccattcgaaaccatctaggaggaaccgtcttccgcgcacccattgttatccccaccatccctcgtctcgtccctggatggaagcagcccatcatcattggccgtcacgctttcggcgaccagtaccgcgccaaggaccgtgtcatccccggtgagggtaccttggaaatggtcttcacaccaaagggcggcaagcccgaggtgatcaaggtctacgacttccctgcagagggtggtgtcgctcagacccagtacaacacaaccgagtccatctcgggcttcgcacatgcctcgttcaagatggcgctcgacaagaagctgcctctgtacatgagcactaagaacaccattcttaaagcctacgacggaaagttcaaggatgttttccaagaaatctacgacacccagtataagaaggactttgaggccgccaagatctggtacgagcaccgtctgattgacgacatggtcgctcagatgatcaagagcgagggtggctacgttattgccatgaagaactacgacggagacgtccaatctgacattgtcgctcagggtttcggctctcttggtctcatgacttccacactcatcacccccgacggcaagacgttcgaggctgaggccgcgcacggtaccgttacccgccactaccgcgagcaccaaaagggcaaggagacatctactaaccccattgcctccatctttgcctggacacaaggtctggccaagcgtggcgagctcgacaacacccctgaacttgtcgtctttgccgagacgctcgagaaggcttgcatcgacacggtcgatgttgacaagatcatgaccaaggatctggcgctagcgtgcggaaagaaggatagggctagctgggtcacaaccaacgagtacctggacgcagtggaacgaaggctcaagtcgagtttgaagggaaagctatagacgcaaggagcaggccaaggacaagatatcctggttgagtgatcaccctacgtatccaatgttgagcgcatatagacggatgagtgcttattcccatgtagaaatcaaatctaccaattctcaggacg

SEQ ID NO: 28456 - DNA, 1985 bp, Zea mays
  Clone ID: LIB4757-025-D8_FLI
ccgggatacacaagcacgatggctcacaaccttctgcccgtgaccgtcgtcctcgccgtcgcactgctcatggccccagccgcgggttacccgtggctatcgtgtggcaccagcagcagcttcgcggccaacggcacataccaggaccacttcaacttcgccgccgccaccctgcccaagaacgcctcgacatcccctgacctttttgccagcatagtcgtcggcaccgtgccggagcagctctcagccatggccctttgccgcggcgacgtcaacagcacgacatgcttcagctgcctgaccgaggccttcggagacctgcccagcgcctgctccaacgacaaggctgccaccatctactacgatccctgcatggtccactactccgacgtgcacaccctccccgacgacgacgacaccggcccgtcgatcgacacgtaccccatcggcgacaaccagtacgtgaccgccgaccccggccagttcatacgcctgctggccgcgctcgtgaacgccaccgccgactacgccgcgtacaactccacgcggcggttcgcgactggccaggctgacaccggcttcgacccggagttcccagagctctacgctctggctcagtgcacgccggaccagacgccggcgcagtgccacaagtgcctcgccgggctcatatcacagtcgctaggcgggttccagaaccgtgacggggccaggatgctcgcggtcagctgcacctacaggtacgagaccaagcccttctataacgggccggcgatggtgcggctggcctcaccaagctctggagcgccggcgccggcgcccgctgtgaactctcgggttcgtgcggcggatggagggaggcgaaagtaccatgtgccctgggtggcgattgcaattgtgctgccagctctagcagccatgaaccttgtcgcctgcctctgcttccggaggcggcggcggctactgatcgcacaggccaaacaccagaatcccatgtactccactgaagcagaggacaccgaaatggtggactccatgatgatggacgtctccgccctccgggccgccacgggggatttcgacgagagcaacaagctcggcgaaggcggctttggcgccgtgtacaagggtgtcctcccggatggcgaggagatagcggtgaagcgtctgtccagtagctcgtcgcagggagtgcaggagctgaagaacgagctggcgctggtggccaagctgaagcacaagaacctcgtcaggctcatcggcgtctgcctggggcagcaggagaggctgctcgtctacgagttcctgcccaaccggagcctcgacctcatcctattcgacacggagagtgaagagcgtggacgacgacggctggactgggcgcagaggtacaagatcatcaacggcgtcgctcgggggctgcagtacctccacgaggactcccagctcaagtgggtacatggcgccggagtacatgatgcgggggaactactccgtcaggtcggacgcgttcagcttcggcgtcatggtgctggagatcgtgacggggaggaagaacagcgacgatggctgcaacctcttggccacagtatggacgcactgggaggccgggacggtggcgcagctggtggaaccgagcagtatgggcggcagcttcccggagggcgacgtgctgcggtgcgtccacatcggcctgctgtgcgtccaggcagaccccgcggcgcggccggtgatgtcgtcggtcgtcatgatgctcggcagcgacaccgtcaccctccaggctccatccaagccggggttcttcgtcaggaacaacagcgccaacgcagccgcgtcgacggtgtcactggatcgttagctagccagcaggccatgggatcgagcccagaaattgggaacatatatttgtaccgttaccctgttaccgaaatgtatgacagcagctaataagcagctagcgtaagctacaagattagattttgcac

SEQ ID NO: 28457 - DNA, 1988 bp, Zea mays
  Clone ID: LIB4757-025-G11_FLI
ccgggattaaacacaaaatctcacactagtccgcggcactgctcaagtaaagaaaaccagctagacaggaaaaaaaatagggaacacaagtgcgtcgtggtggtgctggcggttttgagttttgacccaccattcccgcattccttctcttctgcagtggcggcagcggcagccaggaaacgcaaacgaggaagaggagcggtcgattcccaatctttatacgattgattctttaccaattgtatcgccattccttcctgttcattgggcgtggggtttcaacctaataaatcggtccttttccgcgcaactagtggggagtggagccgctgagaaatagcaccccttttcctgccccaagatgcctgtttccgcttcttttccacgccacaccttttgaaaatccttcgccgtcagctccccttttgcagcactagttgtttctcagcctgcttggagtttggagggggcagagaacaccatcctgtcgattcaagaaaaaggctgagccgatgggcagtaagagcggcgtgcgactgcaatgcgccgaggccaaatcagcgacggattggagctgctgcttcctggccctgccaccggcagcaccatccggtgttgatggcgatggcgggtttaacctctcgtggaacctccgcaagtccttccacccgccggcgggactcttcgccagcatgggccagcaggttggggttgggttcccggggacttcttctaggtccccgtcgccggagacacctcgggatccgtacatgaagtacgtctcgccggaggttgtcgagacacctccgtcgggggaaggggtggcgttgagggacaaggggaagaagaaagccgtgaagctcaggattaaggttgtgaatcatcacctcaagaggctgatcagtggagcactcgcaggcacagtgtcaagaactgctgttgcacctttggagacgatcagaacgcatttgatggttgggagtaatgggaattcgtcgacggaggtgttccagtctatcatgaagcatgagggatggactgggttgttccgtggtaactttgttaatgtcatccgggtagccccaagcaaggcaatcgagctttttgctttcgatacagctaacaagttcttgacccccaaatctggggaggaacggaagatcccagtccctccttcactagtggctggggcatttgcaggtgttagctcaacactgtgtacataccctctggaattgattaagacacggttaactatacagagaggggtgtatgacaatttccttgacgcgtttgtcaagatcgtccgcgacgaagggcctactgaactctaccgaggcttaaccccaagtctgattggagtggtgccatatgctgcaaccaactacttcgcctatgacaccctgaagaaggtgtacaagaagatgttcaagacaaatgagattggcaatgtcccaacgctgctcatcgggtctgctgcaggagctatctcaagctcagcgacattccctcttgaggttgcacggaagcacatgcaagttggagctgttggtggcaggaaggtttacaagaacatgctccatgccctcctaagcattcttgaggatgaaggggttgggggcctctacaaagggttggggccaagctgcatgaagttgatgcctgctgctgggatttcctttatgtgctacgaggcttgcaagaagattctgatcgaagaagaggatgagtgaagtgtgtgcggatgcattgcgtcattagaactcagttttgcgacatcctgaattcctgatagcaggcagcttctttcggtatttctttgagtcgactggtgctggagttggttgaaactcaagactgaggttactgctgcagtcagcataagttctttttttttgatgagtcgaccaaggggggagaggcccccaccagatccactgcattatgtagctcttcgagttcaaagtacacgccaagcacatattctg

SEQ ID NO: 28458 - DNA, 1164 bp, Zea mays
  Clone ID: LIB4757-026-D6_FLI
cttttcgcagccccatccgcccgcgcggctccgcgtctcctccaccgtcgttgctctccacaagcgcaaccccaagcggctcaagtacgccgccgagcgccagttcacgtctctttggtggctgggttttgcgcgaacgaagagaggggatgccgggttgctgcgggtggaggtggagccctccggcggggacttctggaagcttgaccccattatcgacctcatcaatcgcggcgccgtcggggtgatccctactgacaccgtctactccgtcgtctgtgacctgagtaacaatgaatcgattgagcgccttcgcagactgaaaggcattggagactccaagcctctcagcatcctgtgtcgctcattacgtgacatcgatacctacacaacaggatttcctcaaggcactaaccaagggcaagctaacatttttcgtgttgtcaagcgtgcaatacctgggccttacacatttattttacctgcaagcaagcagtttcctaaacaatgtataaagcatggttcttccacaaggtatgcaaaaaggaggcaggttggcgtccgaattccagatgatcccatctgccaggcaatattgcaaaatcttgatgaacctttgatatgcacaagtgtcaaatatctatcggaggatgaatggatacttgatccagtaatcattgcagatctttatgagccactggggcttgattttattgttgatggcggacctagaattgctgacccttctaccgtagtagatatgatgggagcaaaccctactgtaattcgtcagggaaagggtctaaagttggattggatggtagcaaaagatgaagaggaggacgaggcacagtcgatgttttctttcaaatcagcttgaaatttgcttcgcctgacctgtatgggctggcactttgctatggtcccccaaccgaagcgtcttctttcaactgcatataggatgtcagttgttagctgtaagcatagatgtcgaacacgaactgcgtgctgtaaatatgcaaggcgatgtaagcgaactggcagaatttgctcagtagcaacctttgctggaggtgatggaaagtttcctgctggttttcttgaactttgccgtgtacgcctaccagaatttccgtcctggaaggttccatattattccaattc

SEQ ID NO: 28459 - DNA, 2434 bp, Zea mays
  Clone ID: LIB4757-027-C5_FLI
ccggggagcccacctgcagcctcagggtcaggggctcagggcaccagttcccatttcctcggcctccgcgccggccatggacgtcgatgacccctcaccgcgcgccggcggaggcagcggcgtggacccgccccgcatccggcggctggaggaatcggtggtgaaccgcatcgcggcgggggaggtgatccagcgcccgtcgtcggcggtcaaggagctcgtcgagaacagcctcgacgccggcgcgtccacagtctccgtcaccgtcaaggatggaggactcaagctcatacaggtttccgacgacggctacggcattcggtttgaggatttgccaatactgtgtgaaaggcatactacctcaaagttatctgcatatgaggatttacagaccataaaatctatgggctttagaggggaggccctggccagtatgacttatgttggccatgttactgtaacaacaataacagagggccaacttcatggctaccgtgtttgttataaagatggagtaatggagaacgagccaaaaccctgtgctgcagttaaaggaactcaaatcatggttgaaaatttattttacaatatggtagctcgtagaaaaacattgcagaactccaatgatgactacccaaagattgtagatttcattagtcgttttgcagtccatcacatcaatgtgaacttctcctgcagaaagcatggagccaatagagcagatgttcatagttcgagcacatcttctagactagatactattaggaatgtctatggggcttctgttgttcgtgatctgattgaaatagaagtttcagatgaggatgctggagatgcagtcttcaagatggatggttatatatcaaatgcaaattatgtggcaaagaaaatcatgatgatccttttcataaatgataggcttgtagagtgtactgctttaaaaagggcaattgaatttgtgtactctgcaacgttgccacaagcatccaaacccttcatatacatgtccatcaatcttccatcagaacatgtggatgtcaatatacacccaaccaaaaaaagaggttagcctcttgaatcaagaccgtattattgaaactataaagaataccattgaggaaaaactgaggaattgtaataccacaaggatattccaaactcaggcagtaaactcagcacttactcaagtttacacgcagaaggacaagggtactgaggtcaaaatggcccctggagtgaaatctcaaaaggctcctgtgagccaaatggtcagaactgatccacgcaatccatctggaagcttgcacgcttactggcatgggcaatcttcaaaacttgaaaataaatatgaccttgtttctgtaagaaatgttgtaagatcaaggaggaatccaaaggatgctggtgatttatctagccgtcatgagcttcttatggaaatagattctcactgccatcctggtcttttagaggttattaagaattgcacatatgttggcctggctgatgaagtttccgctttgatacaatacaatactcacttataccttgtcaatgttgtaaatgttagtaaagaactcatgtaccagcaagctctgtgccgttttggaaacttcaatgcgatccagcttagtgaaccagctcctcttcaggagctgctgctgatggcactgaaagatgatgaatcaatcggtgatgaaaatgacgaggagaaactggagattgcagaggcaaactcgaaaatactgaaagaaaacgctgagatgattaatgagtacttctctattcacgttgatcacgatgggaacttgaccaggcttccagttgtacttgatcagtacacccctgatatggaccgtctcccagaatttgttttgactatggggaatgatgttacctgggatgatgagaaagagtgcttcagaacggcagcagctgctattgggaacttctacgcactccatcctcccatccttccaaatccatcggggagtggtgttcaggtgtacaagaaaaataaagcttgcatggcgagtggtgaacatgttgatagtacagatgaagatgacattgatcacgaactacttgcggaagcagaaacagcatggtcccaacgtgagtggaccattcaacatgtcttgtttccatccatgcgacttttcctcaagcccccaaagtcaatggcaacagatggaacctttgttcagattgcctctctggagaaactttacaggatttttgagagatgttagcccacacttctaactacttacatgaagccaagaaagacaccctataacatgttttgcactgtacatattcgtgtagtgtcgcaaatgtttttttaatagttcattgacttatgagatggaagtataccatgagcatgctattgttttctccctctaattgagttgtctaatgatatctaaag

SEQ ID NO: 28460 - DNA, 1786 bp, Zea mays
  Clone ID: LIB4757-027-G8_FLI
ccaggactctcaccaccaccgcgccgcctccactccccccacccccggtctgaaacccaagcttccgcttctctcatggccgacgccaccgccgccctctcagctcggagcaaggtgcaggctttcctggaggctgcgcgcgccggcgacctccaatccctcaagaacctcgtcgcggcgctcgacgaggacggcacgggcgccgcctccgtcgccgccgccgtgcgcgacgccaacaagcgcaccgccctccacttcgcggcgatcggatgtcgcaccgacgtctgtgaattcctcatcggcgagctcggcctccctgtcgacccaaaggacgatgatggcgaaactccgctcatccatgcgacacgccagggccatctggacactgtcaagtatcttctcgaccatggagctgatccttcggtggccaccagcctaggagccacagcgctacaccatgctgcaggcatagggaacacggaactcatgaagcttctcctctccaagggagttgacgtcgagtcagaaagtgatgctggcactccccttgtgtgggctgctggtcatggcaaccaggatgctgtcaaacttctgcttcaacacaatgctaagttggaagacttgctagtcgttctggctgaccgacatgtttgagtgcttcaagccactacacaagatatgcatatgtttctctggacctgggatgtgccaatctggaagcataataattatcatgattcctgagtctggcataaattcatttaggcttcctttgacgttgtaaataggttaattctttgtatagatattttttcagccatgtaaatatgttaattctttttttgcagccaaatactgaaaacgatgatggtgtcacagcattgttatctgctgttgctgcaggttccctcccatgcttggaggtcctaattgaggctggtgcaaacccaaatgtcaaggctggtggagcaaccccattgcatattgctgcagatagtggaaatatagaagtcatcaaatgtttgcttaaagctggagctgacccaaatacctgtgatgatgatgaattgaagccagttcaggttgctgcttggagaaataaccgtgaagctgttgaacttcttttaccgttaacatccccaattccaggtgtttcaaactggaacgtagatgggattatagaacacatgctccctaaagagtatgaggaaaagtctcaactgaaggaagcggcatctctgaaatcaggcctaacacaaactattgaggtgtcatctgaagcaaaaaagaggtccttggaagccaaatcaagaggtgatgatgccttcagaagaaaggactaccttgtagcggtggatgcttatacgcaggctacagagttggacccaactgatgcaacagtgctctcaaacagaagcctgtgctggctgcgggcagggcaagctgagcgtgctctggaggacgccaaagcatgccgtgcattgagaccagattgggcgaaagcctgctacagggaaggtgcggcgcatcgtctgttacagaggtttgaggaagccgcaaacgccttctatgagggggtgcagcttgagccggagaacacggagctcgtcaacgcattcagggaggccatcgaagccgggaggaagttccatggcgtcaacacgccaaactcaacacaatgagactttgctgtttggttggataggtagatgatgaagcggatggacatgaacgttgtcttagttggaatttggtgagatgatgaatgagatgatcatgaaattcg

SEQ ID NO: 28461 - DNA, 1957 bp, Zea mays
  Clone ID: LIB4757-028-D7_FLI
ccggagtcagtcagcaggactcagcagcactatctcccaccccccatccttcgctactctttcgttccttctgatcgccgctatcctcttcagccccgactgaggaggcggccggcgctccccaggcacgcacgagttgacgggtccagcagcggcctcgggatcttgccgccagctgcagcggcaatccggtccgtccgcccaggaaaccagtgctgtcttaggtattgttgattcatgattcttgattccgggaggcggtttcgtgttgtgacagcccggtcttgcggttcagcagagagccaatccgctgggcttccgtggatatacacatactggtctgagttgtcaagtccttgacctgatcatatcagttttgcttataaggatgggggtttacctcagtactccagaaactgacaagctatctgaaaatggagaaaatgatagacttaagtttggtctttcatctatgcaaggatggcgagcaaccatggaagatgctcattcagcattgctagatcttgatagcgagacagcattctttggtgtttttgatggtcatggaggaagagtcgttgccaaattctgtgcaaaatatctgcatggtcaagtcctcaaaagcgaagcctattcaactggtgacctaggcactgctgtccatagagctttcttcagaatggatgaaatgatgcaaggacagagaggttggcgagaactatctgcacttggagacaaaataaacaagtttagtggtatgatagaaggattgatttggtctccaaggggcagtgattcaaataatcaacaagatgattgggcttcagaggagggacctcactctgactttgctgggccaacatgtgggagtacagcgtgtgtagcattaataagaaacacccaacttgttgtggcaaatgctggtgattcccgatgtgttatttcaaggggtgggaaggcatacaatttatcgagggaccacaaaccagagcttgcagctgagagagaaaggataatgaaagcagggggcttcatccatatgggacgagtaaatggaagtttaaacttgtcaagggcagttggagacgtggaattgaaacagaacaaattcctgcctcccgagaagcaaattgtgacggccaatcctgatatcaacgtcgtggagctctgcgatgatgacgactttgttgttgtagcatgtgatggcatttgggactgcatgtcaagccaacagctggtggattttatccacgagcgtataaacacggagagcagcctgtctgccgtgtgcgagagagtgctggacagatgcctggctccatcaacgatcgctggagacgggtgcgacaacatgaccatgatcctggtgcagttcaaaaaacctgtcgatcggaacaagaaggccgaagcagcagggcaatctgccagcaatgtggacgaagccaagagtcgtgttgctgaggagtgaagcatggctggcactcaccagggcgcaaccatttgctttcataaggcaggtgaaaaaaaggaacgaagaaacctgcagtgtacgtatctcaactgtacgtggcatgccatgcaaatcctgcctaagttaccccggacaatggcattgcctagtgcagtggtggatcttcagatcacaacctttcttgtgccagctttcggtcatctccactctccagccctcggaaccatggctgagtctgtctattctttgtgtggtgtgtagcattcctcgtgttttcgttgtccaaaatggtgtcaaatccagttttttgttgcgagaatgaaccgtgacgttagtgtgttttgctggcggttaggtgcaaaatactcgaaacctgaattgcccgctcgctatttcgggttgtaagtataaatgatgaatctgattttagttgcatggtgtacccatcttatctgaaaataatgaaagatctgtttgtggttgact

SEQ ID NO: 28462 - DNA, 2427 bp, Zea mays
  Clone ID: LIB4757-028-E11_FLI
ccgggagtttcagaccccgtgtggattagtcgctgtcacgatcgaggcggggcgccaattgcggtggccaccacctccaatccactccccgcggtggcctcgccgagctgttcttgctccgtcctccctccaactccaagatttgtttcgcacccgattcctgagcttccgcggcgcttcttgctgaaaagaaagctccgagttcttcagttctggatcgatagagaggcggttcctttgcgggctctgaggttggaaccttattcttctttcactatacagcgtctcttccttcctggatccgaggcatgttatgatgtggctctgtttggggattagagttgtttctttcgtcctgttgtctgaattttgcttgcagatccagtgtcgaataccgtgtcttgaatcatggccttgtgaattccaatataaacgttcctgcttggcttgctttgttttgacacaagcgttgtactccttggggttttccctccaggttcagctctcgctcttgatttgtctcatcgacgcatcagttgggctgcaggcttagagctggaaggaataatttgactagagaaatggggcagtgttgtagcagagctcccgccccggactctggacggggaggcaccaatggttatggctattctaaccaggcaaagccagcgcaaacaccttcgagttacaaccctcctcagcagccggccgaggtgaggtacacgccgccggcgacgaaccctccggtagtcccacctgtgcctgtgccaccgaagcccacggcggacacgattcttggcaaacagtacgaggacgtgcgctctgtctactccctcggaaaggagcttggccggggccagttcggggtgacatacctctgcacagaggttgcctctggtaagcagtacgcctgcaagtccatctccaagcgcaagcttaccagcaaggcagacagggaggacattcgaagagagatccagatcatgcagcatctgtctggacagccaaacattgttgagttccggggagcatacgaggacaagagcaatgtccatgtggtgatggagctctgcgcaggtggggagctcttcgatcgcatcattgccaaggggcactacacagagcgtgcagctgctacaatctgcagagcagttgtgaatgttgtcaacatttgccacttcatgggtgtgatgcaccgtgacctgaaaccggagaacttcttgcttgcgagcaaggaggagaatgcaatgctcaaggccactgattttgggctttccgtcttcatcgaagaaggaaagatgtacagggacatcgttggaagtgcttattatgttgcgcctgaagtccttaagcggagctatggaaaagagatagatgtttggagcgcaggtgttattttgtacattcttctcagtggtgtgcctccattttgggctgaaactgaaaaggggatatttgatgctattctgcatgaggagattgactttgaaagtcaaccttggccatcaatttctgagagtgctaaagacttggttagaaagatgttgacacgagatccaaagaaaagactgacttcagctcaagttcttcaacattcatggctcagagaaggtggaggtgcatctgataagcctatcgacagtgctgttctttctagaatgaagcagttcagagcaatgaataagctgaaaaagatggccctaaaggttattgcctcaaaccttaacgaggaagagatcaaggggctaaagcaaatgttcatgaacatggacacagacaatagtggcacaatcacgtatgaagaactcaaagcaggactagccaaacttggatcaaagctgtcggaagctgaagtaaagcagttgatggaggctgctgatgttgatgggaatggatccatcgactatgttgagttcatcactgccacaatgcatagacacaagctcgaaagagacgagtatttgtttaaggcattccagtacttcgataaagataacagcggtttcatcacaagagatgagctggagtctgctttgatcgagcatgagatgggtgacacgagtacaataaaggagatcatatcagaagtggacacagacaatgatgggaggattaactatgaggagttctgcgcaatgatgagaggagggatgcagcagccaatgaggctcaagtagcctgttcccttagtagaaatggtgtaccgttagttactgttcttcactctttttcccccttcgtatttggtactcttggtagccggattaagcttacaatgggcgtcgctcttttgcattgtcaagagatgattgtgtatatctttttcttttgctcgtgtttgttgcattgtagtatcctgaacgtcccttccttttgtaagtttgtttatacacaagcacatccaatagaaagtgcaatttgtgtccc

SEQ ID NO: 28463 - DNA, 931 bp, Zea mays
  Clone ID: LIB4757-028-H4_FLI
ccgggaaggctcactcctcaccagcttctgctctctccctcctcatctctgctctgctctggaccgttaactctccagctccccctcgctccgttcccttccgcccaaatcaccgggaccaccaccgccttcttcaagatcggcgggcgggcaccggccggctatgacatccaccgtcaccacaaccgttgggtgcggggggctccccgtccgcccgtcgtcgacggcgaccagaggacgcccacgcagatgcgccgtccgagcccaggccgcgggagcggatgcctccaatgataagtcagtggaggtcatgcgcaagttctccgagcagtacgcccgccgctccaacactttcttctgcgccgacaagacagtcactgccgtcgtcatcaagggacttgctgatcacagggatactcttggagctcctctatgcccttgtaggcattatgatgacaaagctgcggaggtagcacaaggattttggaattgcccatgtgtccccatgcgtgagaggaaggaatgccactgtatgctttttcttactcccgataatgactttgctgggaaggatcaggcatgttgctttcttcttgtcctctgacatctgcatccttcatacgttctgtgcaaacacctggagaatgatttctgttgtatacttgtggcaggttatctccttcgaggagatcaaagaggcgacatcgaagttctagcccttgtatttgtcacggagtgtttacttgacagctaattttttatatgtatatgtacttaagtagcatctataagatatgccatcaggaaaattttcataaaatgtgcagtaaacagcacttcgcaaggctgccgatcatatgagccgccttcggcctttttattgtatctgggctccatttcgtgaattaaacctacgcaattcgccgctctc

SEQ ID NO: 28464 - DNA, 1090 bp, Zea mays
  Clone ID: LIB4757-029-E1_FLI
ccggggcctccaccaagttcctcctcccttcgacttcctctcccccgtctggccgtgcagccccggtccccggaggcgtcactgggcaaggaggctgggtggggacctcaaacgccatggatgtgcagccctaggcaccaggatggatggagtcacacaagctgttgaaaatcttaaggaagaatggggccaagcagtttcacagcttgacaagaacattactgcaatcgaatcatgtggaaaaacagggaaagggacagaggaagcaaattctcttccaaggttgaatggttctgcacaggatgctctgcagttgctgaagtcactgcagttccagcttgatcttctagcacaacagcttcccacttttgatgaggtgcagtctggtcaagcaaccttgaagtcatgggatgaacaatacaagaagcttcgtattagcctgaggaatgctaacttagaagcaaaagacaacattagacaagctgctgaagaggagagggcacttcttctaggcggtggtgaagagtctaccatccgtaggcgtaatctccagacaaaggctggaatgacatctgctgctgaaagtatcactgagagcctccgacggtctcgccagatgatggttcagacgaatcaacaggtgttctccagaaggctgaaggtgaatatcaaggacatcgctctttgctgatgcgtacccgtggtttgctctccacaatgcaacgacaagatgtttttgataggatcatcctgactattggtttcaccattttctccttggcggttctttacgtcgtctcgagacgtattggtctgttgactctgcaaaggaaactggccgatgccatcagatcaggttctttatcagctgaggacattgtcgcgaaagcccaacatggacctgccccgggaaatgttcctgctcctgctcctcgcgtttacgatgaattatgaatcgcttttattttccgttttatgaaatgtgtgaccaggagcgattgttaaggtaatactttccacaagtaagctattaagatttcttatctgtagtctcaaatgatgatgcaccaacctgtcaacgtttgaaact

SEQ ID NO: 28465 - DNA, 1947 bp, Zea mays
  Clone ID: LIB4757-030-F2_FLI
ccgggaacaaaccaaacgcgcactacggtgctcaccgctgatcatggactcgccaccgctccaacccacggtgttctccctgatacttgctctcatcctagtgctatacttggcgctccggcgccgcggcggcggcaagaaccggagctacccgccggtggctggcaccgtgctgcaccagctgttcaacttcggccgcctgatggagtaccaaaccgcgctctcccgcaggtaccgtaccttccgcatgcttaccccgacctgcagctacatctacaccgtggagcccgcgaacgtggagtacatcctcaaggccaacttcggcaactacggcaaagggagcacgctgcacgagctgagcgaggacctcctcggcgacggcatcttcaacgtggacggcgccaagtggcggcaccagcggaaggtcgccagccacgagttctccacgcgggtgctgcgcgactacagcaccggcgtgttccgcgacacggcggcggagctcgcgggcatcgtggctgccgccgccgccgccgcgggggagaagctagacatgcaggagctgctgatgcgttcgacgctggactccatcttcaaggtcgggttcggggtcagcctgggcgtgctgtccggctccagcgaggaaggcgccgcattcgccaaggcgttcgacgacgccagcgagcaggtgctgcgccgcttcttggacccgttctggaaggccaagaggttcctgaacttctcgtcggaggcggccatgaagcgctcgctccgcaccatcaacggcttcgtctacgccgtcgtcgacaggaagatcgagcagatggaaagagaccaacaggaatttgtgagcccagaagatattacctctccgtagtccgtacatgatgggtgcagtgcagacgggacgacgggatcacgagaggagattacagttctgacacggtgacatttccctgacacgccaagaaagaggacatcctgtcgaggttcctggtggagcgggagagcgatcccggctgctccgacaacaagtacctgcgggacatcatcctcaacttcgtgatcgccggccgcgacacgaccgcggggaccctgtcgtggttcctctacgtgctctgcaggaaccagagcatccaggacaggatcgcgcaggaggtgcgcgccgccacctcgggcgacggcggcctcggcgctccagagctcgtcgcgtgcctgaccgaggacgccatcagcaagatgcactacctgcacgcggcgctgacggagaccctccggctctacccttccgtgcccatcgacgtcaagtgctgcttttcggacgacacgttgccggacggctacgctgtcaagaaaggggacatggtgaactaccagccgtaccaaatgggcaggatgcggttcctgtggggcgcgggcgccgaggagttcaggccggagaggtggctggacgacgccggcgtcttcgtccccgagagccccttcaagttcacggctttccaggcgggccctcgcgtctgcttgggaaaggaattcgcgtacaggcagatgaagatcttcgcggctgcgcttctctacctgttcaggtttgagatgtgggatgccaacgctaccgtgggttaccgggccatgctcaccctcaaaatcgatcgcccgctgtatcttcgtacgtcgctccggcgatgaggtgaggcgggcggcatgcctcaatgtcaaacggtcagacacgtctgtaagtgtaggaaaacaacatctccaaacatcagcatagtcttcgggccacgattgggcttcttagaaattggtatgatgatttttaccaaacacccccacatatggaagtgactattttctcccaatccaatcctcacatgggattgtctctttatttctatttaaaattctattcaggactcacggtcaataaagcccctctccaccattacctcg

SEQ ID NO: 28466 - DNA, 1245 bp, Zea mays
  Clone ID: LIB4757-032-A5_FLI
ccgggactcatccattccatcatcccctttgcaagtatagtctctctgctaagcgaagcgaagcttcaagctagtctcgggctctagaagacgatgggcaaggacgacgtgatcgagagcggcgctggcggcggcgagttcgctgccaaggactacacggaccctcccccggcgccgctgatcgacgcggcggagctggggtcctggtcgctgtaccgcgccgtgatcgccgagttcatcgccacgctgctgttcctgtacatcacggtggccaccgtgatcgggtacaagcaccagacggacgcgtcggcgtcgggcgccgacgcggcgtgcggcggcgtgggcgtgctgggcatcgcctgggccttcggcggcatgatcttcgtcctcgtctactgcaccgccggcatctcggggggccacatcaaccccgccgtcaccttcggcctcttcctggcgcgcaaggtctccctggtgcgcgcgctgctctacatcgtggcgcagtgcctcggcgccatctgcggcgtcggcctcgtcaaggcgttccagagcgcctacttcgacaggtacggcggcggcgccaactcgctcgcctccggctactcccgcggcaccggcctcggcgccgagatcatcggcaccttcgtgctcgtctacaccgtcttctccgccaccgaccccaagcgcaacgcccgcgactcccacgtcccggttctggctcccctccccatcggcttcgccgtgttcatggtgcacctggccaccatccccgtcaccggcaccggcatcaacccggccaggagcctgggcgccgccgtcatctacaacaaggacaagccctgggacgaccactggatcttctgggtgggccccctcgtgggcgctgccatcgcggccttctaccaccagtacatcctccgggctggcgccatcaaggccctcggctccttcaggagcaacgcgtgatgagcggggcttggctgtggagcaatggcgggcgacctacgggcggggggccgtgagcgaggagaatgccatcattcatcgatcgacttgggtgccggtggttggttcgggtcgccttattttgtttcagcagctgctgcgttgcgcgcgtgcgtgagatttggtttggtttcgttcccctgcaatgtaatcatgtcgtgactctctcaagggattattccgctctgctcttatggcctctgttttctattttaatgattgttattaccatgtagcagc

SEQ ID NO: 28467 - DNA, 1572 bp, Zea mays
  Clone ID: LIB4757-032-A7_FLI
ccgagtctctgtctctctagggtttttgattttagccgccgccgctgctcatctcacatccctcgggaagacgcctgctcctcgccgatcgatacgatggccgtcttctccgacctccacaccgccgacggcctcaagtccctcgaggctcacctcgccggcaaaacctatgtgtctggtgactccattactaaggatgacattaaggtcttcgccgcggtgccgtcgaagcctggcgctgagtttcctaatgccgcccgctggtacgagaccgtctctgcggctgtagcctcaagattccctggtaaggctgttggtgtaaatctgcctgcgggatcagctcctgcggcagctgctcctgcggatgaggctgaggatgatgatgaccttgatctttttggtgatgaaactgaggaggacaagaaggcagctgatgagcgtgctgccgctgccaaggcctcttctaaaaagaaagaaagtggtaaatcctccgtccttatggatgtaaaaccatgggacgatgagactgatatgaagaagctggaggaggctgtccgcagtgtccagatggagggtctgacttggggagcatcaaagcttgtgcctgttggatacggcatcaagaagatgactatcatgttgacaattgtcgacgatcttgtgtccatcgacactctaattgaggaccaccttacgcaagagcccatcaatgagtacgtccagagttgcgacattgtggctttcaacaagatctagagttcagtttctgagtttgggcaacggcagcggctcagcccgtcaagtttgtgctgggatgccagtttatcccttctagtctattacagaaacgttgttcggagctgagtctattataaacatcttggtctgagtttattgttgacctactgacgagctcgccatggcctccctctcctctgccgccgtcaccgccccttccttcgccgcaccagcgccagcccgcgccgtggtcagaaggaggtccttcaccgtgcgcgcctctctccgcaaggccaccggcaccgccgccgtggcaatggctgccagcgccctgcttgccggcggtgccatggcccaggaggtgctgctgggcgcaggcgacggcgggctcgtcttcgagcccagccagttcaccgtcaaggccggcgacaccatcacattcaagaacaacgccggcttcccgcacaacgtcgtcttcgacgaagacgaggtgccgagcggcgtcgacgccaccaagatctcgcaggaggagtacctcaacgcgccaggcgagacctactccgtcaccctcaccgtgccgggaacctacggcttctactgcgagccgcatcaaggagccggaatggtcggcaagatcaccgtcaactaattaagctagctatcgatcgatatccattcatgtattagctgttgcttcctgctttgtactccgccgatctgtccatctctacatgttttcgtcttcacacaacaacctctgctacgactacgtatatatgcatgctactagctgattgattttaacgaccaggccgaccccgaaagctagcttgg

SEQ ID NO: 28468 - DNA, 1789 bp, Zea mays
  Clone ID: LIB4757-032-B12_FLI
ccgggatcgataaagaaaaaaaaaaatggatgctttcatggggtcagtgctgggtgccctcctggccgtgctcgcctccacgctgctgatcggagcgctgttctttctggtgtggaagccctacgtcgtcacccggtggtttcggggccagggcatcgggggcccaagctacaggttcctcgtcggctccctgccggagatcaagcggatgaaagccgccggcagcaagatcacactcgacgtcggctcccatgacttcgtccccatcgtgcagccgcagtaccgtagatgggtatccgattacgggaagacatttctgtactggttcggcgcggtgccgaccatctgcgtcgccgaggtgggcctggtgaagcaggtgctcgcggagaggacaggcctgttccccaaggactacatgaacgacagcatggaggtactccttggcaagggtctcgttctcgccaacggcgaagactggaaacgccaccgcgaggtggtgcacccggccttcaagcccgacaagctcaagacgatgtcggtggtcatggccgacctggtgcagcggatgatgcagcaatggcgatctcagatacagcgggccagcaaccatgaggctgaaattgaactcagcagcgagttctcggagctgacttcagatgtcatcgcgcacacggccttcggtaccagctacaaggagggtaaggaggtgttcgtcgcgcagaaggagctccaagaactcacattctcgacatggcttgatatccctgctcctgcttgtctaaggaaactgaaattgccaactagcaagagcagccgacgagttgaagagctggacaagaaggtgaggagcatgctcatggcgataatcgaagggcgccttgccgcgaggggcaccagtggatacggcaacgatctgctcggcctgatgctccaagcgcgcgctctggagcaagaagggcaccagatgctcaccacggaggagatcgtggacgagtgcaagaccttcatcttcgctgggcaggacaccacctcgcacctcctcacctggaccatgttcctgcttagcaggtactctgagtggcaacacaggctgagggaggaggtgctgagagagtgtggcgatgcagtgccaaatccggacacagtcaccaagctcaaactggttaacatggttcttctcgagtcattgaggctctacagccccgtggtgttcataagaagggccgtaggctcagacatcctgctccgcagcacgagggtgcccaagggaacaatgctgtcgataccaattgcattgctgcacagggacaaggatgtctggggccaagatgctgacgagttcaaccctgacaggttcgagcatggcgtgtccaatgccgctgccaaacaccccaatgccctgctgtccttctcccaggggcctagggcttgcatcggccagaacttcgcgatgcttgaggcccgtatcgggatcgccatgatccttcagaggttctcgtttgagctctcgccaaactatgtccatgcacccaaggaagcggtcacccttatgcccaggttcgggcttcccatcatcctgaggaaccttcacgattgagatgtgctaccataaatatatatacgcactgccacttccttttgcccgaggtttgtcacactaaacaaacacttgtgggtatttggtatgtcattatgtgatgctgttgtatttttttactttatttacggtttgctttagtttcttacgcagaatgtaatgaataaaaacttgtcagggagattacccccg

SEQ ID NO: 28469 - DNA, 1777 bp, Zea mays
  Clone ID: LIB4757-033-C12_FLI
ccgggacagcaagtagtgtcgaacgagagccacatcccgctctccacccgggcgcgcgtgtcctccgtttcgccatgtccaactccaagcagcacgacgccgccgacgacggcggcatcccagcccccgaggcgccggcaaagcgcccaccgcttaacaagtacgccctcgcctgcgccgtcctcgcttccatgaactccatcctccttggctacggtacgcgcacgcatgatgcatacaattccatgcacccgttggccgttgccatatgcagcacgcgtacgtgcgcctcatgctatctgtatgcagatgtgtcggtgatgagcggagcgcagctattcatgaagcaggacctcaagatcacggacacgcagatcgagatcctcgccggcatcatcaatatctactcgctcgtcggctcgctcgcggcgggccggacgtccgactggctcggccggcggtacaccatggtgctcgcggcggccatcttcttcgcgggcgcgctcatcatgggcctcgccccgagctacacgatcctcatgcttggccgcttcgtggcgggcgtcggcgtcggatacgcgctcatgatcgcacccgtgtacacggccgaggtctcgcccacgtcggcgcgcggcctgctcacgtccttcccggaggtgttcatcaacacgggggtgctcctcgggtatgtctccaactacgccttccacggcctccccgtgcacctcagctggcgcgtcatgttcctcgtcggcgccgtcccgcctatcttcctcgcactgggggtcctcgccatgccggagtcgccgcggtggctcgtcatgcaggggcgcatcggcgacgcgcgccgcgtgctggccaagacctccaactcccccgccgaggccgaggagcggctcgccgacatcaagaatgccatcggcgtcccagacggcgtcggcgacaacgacgacgacgtggtggtggtcgcccgcaggaacaagggcagccatggcgaaggggtgtggagggacctcctcatccgcccgacgccgcccgtccgccgcatactcatcgcctgcctcggcctccagttcttccagcaggcctccggcatcgactccgtggtgctgtacagcccgcgggtgttcgagaaggctgggcttaggtcgaacaacaactctttgggcgccaccatggcggtgggcgcgaccaagacgctgttcatcctggtggccacgttcttcctcgaccgcgtcgggcggagaccgctgctgctcacaagcgcgggcgggatggtggtgtcgctggtgacgctggcctcggcgttgcgcgccatcgaccggctcccagagggacaggcgacgtcgctggcgggcgtgagcatcgcggcggttctcacgttcgtggcgtccttctccatcggcatgggcccgatcgcgtgggtgtacagctcggagatattcccactgcggctccgcgcgcagggctgcgcactcggcacggcgatgaaccgggtcatgagcggcaccatcaccatgtccttcatctcgctctacaaggccatcaccttcgccgggagcttctacttgtatgcaggcattgctgctgccgggtggctgttcatgttcttcttcctgccggagacgaggggcagcaacctagaggacaccgagaagctcttcggcggtggcgaccacgacgaggacaaggaagatggacacgatgcgcagaagtccactgagttgagtagtaaccaacagtgaccttatctgtatctgatagtatgtacgctagt

SEQ ID NO: 28470 - DNA, 980 bp, Zea mays
  Clone ID: LIB4757-033-F1_FLI
ccggggatatcaaatctatcactgtcctgtggggccgtcgccggtcgacccccatatagttctccaccaggccgccgcccacggctagacagcctcccattcatcagattcagatcagatcgtagcagccaaggattccgcgctccgggggtgccatgaagctgaagctcctctctccctgccttctcctcctcgccttctttgccaccgcggcgtacgcggcgtcggcgtcggcgtcgcgcgcggcggccgtcgtcaggggcgcgggcgccccgtcgcagtcggagttggagtcggacccggagaaccagtgcgtgtacacggtgtacgtgcggacggggtccatctggaagggcggcacggactcgaccatcggcgtgacgctgctgggccccgacggcacgggcatccggatccgggacctggcggggtggggcggcctcatgggcgccggccacgactactacgagcgcggcaacctggacatcttcagcggccggggcccctgcatgagccaggcgccctgcgccatgaacctcacctccgacggcaccggcgcgcaccacggctggtactgcaactacctcgaggccacggtcacggggccccacctcgggtgcgcgcagcagctcttcaccgtcgagcagtggctcgccaccgacgcgtcgccctaccgcctgtacgcggtcgtcgacaagtgcaagacgaagcggcaggagccgcgacgctcgccggccggcgaggccgaggccaccgtgaccgcgctctaggtacgaccagtagtaaatcatcgacagaggctagctcctgcctctgctgtgtgtaattactgtatgtgagtgaccgatcccatcggattgcgttcgtcttgtggagacgctgcgtgatcgcgcgattggtttcgctttcgccgccttgtttttgcacgaggaggttctgctagtgcgtacggggagaataaaagcagcattcctgctgcc

SEQ ID NO: 28471 - DNA, 1582 bp, Zea mays
  Clone ID: LIB4757-033-G7_FLI
ccgggcttcttgtgttttcattctccctcgctcgaactcttttattagctgcttgatgcgatagagactggatcaagatttaagcttaacctccaaccatgggtaaggagaagtcccacatcaacattgtggttattggccatgtcgactctggcaagtcaaccaccaccggccacctgatctacaagcttggaggcattgacaagcgtgtgattgagaggttcgagaaggaagccgctgaaatgaacaaacggtccttcaagtacgcttgggtgcttgacaagctcaaggctgagcgtgagagaggtatcaccattgatatcgctctgtggaagtttgagaccacaaagtactactgcactgtcattgatgcccctggacatcgcgatttcatcaagaacatgatcacgggtacctcccaggctgactgtgctgttcttatcattgactccaccactggtggttttgaggccggtatctctaaggatggccagacccgtgagcatgctctccttgctttcacccttggggtcaagcagatgatttgctgctgcaacaagatggatgcgactactcccaagtattccaaggcccgttatgatgagattgtgaaggaagtttcatcctacctcaagaaggttggatacaaccctgacaagattgcctttgtccctatctctggttttgagggtgacaacatgattgagaggtccaccaaccttgactggtacaagggtccaaccctgcttgaggctcttgaccagatcacggagcccaagaggccttcagacaagcccctgcgtctgcccctccaggatgtgtacaagattggtggtattggaactgttccggttggtcgtgtggagactggtgtcatcaagcctggaatggttgtcaccttcggtccaactggcctgaccactgaggtgaagtctgttgagatgcaccacgaggctctccaggaggcccttcctggtgacaatgttggcttcaatgtgaagaacgttgctgtgaaggatctcaaacgtgggtacgtggcctccaactctaaggatgaccctgccaaggaggctgctagcttcacctcccaagtcatcatcatgaaccaccctgggcagattggcaatggctatgccccagtgctggactgccacacctcccacattgctgtcaagtttgctgagctcataaccaagatcgataggcggtctggcaaggagcttgagaaggagcccaagttcctgaagaatggtgatgccggtatggtgaagatgattcccactaagcccatggtggttgagaccttctctcagtatcctcctctgggtcgttttgctgtccgtgacatgaggcagacggttgctgttggagtcatcaagagcgtggagaagaaggacccaactggtgccaaggtgaccaaggctgcaataaagaagaaatgatgcgtcctcccatgtgccctcgtttattttgtacttgtgcccgtatacttcgatctgttaaaatctattggttgtgtgccctgtgtctgttgtttgggtatctatactgttattttgagacatggttgatttgcatggcc

SEQ ID NO: 28472 - DNA, 1773 bp, Zea mays
  Clone ID: LIB4757-034-G11_FLI
agcgcgagccaggcgtccttcctttccttctccccgccgtcgtcgtgtcctcatccagccgtgcaggcagtggcggtggaccggagatctccgctccagctccgattgagcccaagagaagtcgttggtgcagacagccttggattggatgtggaatgaggcgatggcatctgacggatcatcatcctctaccttcctggggttgtacggcaacgtccacggcccggcggtgctcactggcgcggcgttcgcgctcgtggcgctcctcatctcgctctggctcatcctgcagcacctcagatcctacagcgatccagctgaacagaagtggatcatagctgtgctgttcatggtgcctgtttatgcctgcgaatcgataatctcactgtggaactcgaagctctctctggcctgtgatatattacggaattgttacgaagcctttgctctgtacgccttcggacgatacttggtggcttgccttggcggggaacggcaagtgttccgtctgcttgagagcaggaagagggacgagctgagccaggagttgctagacaaggcacgagctcgtaaccgcagcggagcgtacagtttcttctgtgaccctgacgctctgggagagaacctgtacacgattataaagttcggccttgttcaatacatgattctcaagacactatgcgctctcttggcgttggtcttggagccttttggagcctatggagatggcgaattcaagtggaattacgggtatccttacattgccgctgtcataaacttcagccagacatgggcgttgtattgccttgtgaagttttacaacgcgacgcatgaaaagttacaggcgataaggccactagccaagttcataagctttaaggccatcgtgtttgccacttggtggcagggagtcggcattgcgatcatctgccaaactggactcctgcccaaagaggggaaagtgcagaacgcgctacaggacttcctcatctgcatcgagtgtagatggctatcgcagcggtagcgcatgcctacgtcttcaccgtggagccgtaccagcacgtccctgctgtacctcctgatcacggggaagtcatgtgtcaggaaagcaaaatggaggtggaggtggatgtcgtcgacgacgatacagggggtacaccagctaccattgcgcagcaggagacccatgtcgaagctccaggagggacgagcatcaaggagagcgtgcaggatgtcgtcctcggcggcggccagcatgttgtcaaggatgtcgcgcttacgatctcacaagcgatcgggcccgtggagaagggcgtcgggaagatccaggagaaattccaccacatctcgctgaagccaggggacaagaaagagcctcaagttgctgtggaggagcacgtaactgagaacgtggtggatgccaaacctgctgttgcggtcaacgcggaggttgaagtccaacagaaggcgcaggatcgtcgtggcgaggaagaaggtgtgcaactcaaaagaacagagaaggacgattgtcacacctgagagtgccatggtggaagatgcagaggaagcgggagcaagcggagtcgaaggctgaagctgtgcgagggccggacgatgaacaggggtgagtgtgttggcctgcacctgaatgggctgtaagtggtgtgtggatgaattgtgtagtgtgtcggcccaacagggtcagttctggtgtttaaaggagttgtaacagacttaagggagaaattaagaagaaaatagagaaaacttact

SEQ ID NO: 28473 - DNA, 1779 bp, Zea mays
  Clone ID: LIB4757-034-H3_FLI
ccggctcttcccctcccctgcgactcgtcgccccctgcctcatgtccctccctcacgccgccgccgctgggttcccctcccatcccatctcctctcggagactgtggcgttaatacgggctttctctgctagtaaaaaaatgacaatagattttgaatggaacctgtagtgcatggccataagtgtactcgatatgcggcagggcggggtccggtccattccgagggaagacaaaacacgcaatacaatagtattagaatttagaaatgtatgtctctatcctactatttaatgttgggatcgatatatatgatgcccaaggtgcctgctgcctagagtccattgttcattagcaagaagtgcccgaaaacagccggcgacacagctgaggcggcagaagcagcttctctcgtcgtggtgtttgagtttcagcaggcagcatggcgcatgctcaagaaattcagctccagatcagaggcattccggacgaggaatccgtcgacgtccgtgatggacccaaggccgccacggggcggcccacgagaagcagcttccgatggtggatgacggtgctggtggacatgctgatggttctctgcgggacgactgtggccaccctcctcggccgcctgtacttcaactccggcggcaacagcaagtggatggccacgctgacgcagtctggcggctcgccgcttctggtcgtcccgctcctcctgtcgccggcgcgctcggcggaggagcgccggccggcggcgctcaagatggttgccatctacgcgggcatcggggtcatgatcggcttcgacaacctcatgtactcgtacgcgctgcagtacctgccggtgtccaccttctcgctcgtggccgcgacgcagctgggcttcaacgccatcacctcgcgcctcatcaacgcgcagcggttcacggcgctgatcgccaactccgtggtcgtgctcaccttctccgccgcgatcctcggcgtcggatcctcctccgacgagacctccagcaacgtgccgcgcggcaagtacccgctggggttcgtcctcgtgctggccgcctcggcggtgttcgcgctcattttgtccctcttcgagctcaccttcgagaaggtggtcagggtgcggacggcgcggtgggtgctgcggatgcagatgcacaccaacctggtggcgtcggcggtgtccgtggcggggctgctcgcgtcgggggactggcggacgatcccgggggagatggcgtcgttcaaagacgggaggacgaggtacgtgctgacgctggtgggcacggcggtgtcgtggcaggcagcggccgtgggcttggtgcggctgatcatgagggtgtcgtcgctgttcgcgaacgtgacgtgcacgctggcgctgccgctggtgccagtgtttgcggtggcgctgttcggggacaggatgaccggtataaagatcgtggccatgctcatggcggtacgggggttcctctcctacatgtaccagcactacatcgacgcacggcggcgggccggggccgagaacgccgagtaacgccgagtgccgcgtctgcgccacacgcacgggaagccacgcggtcttgcccgcttgaggctccgttgtgggcctgtggctcgacagtgtgtagtactcaatgctacatagatagctagatgcctaaagatagcaaaatgtttagggctatgggatccatgttattttctaggatagtaattccaaagaatatcatttgaataagatattaagttatttatggaaagttttttccttc

SEQ ID NO: 28474 - DNA, 2120 bp, Zea mays
  Clone ID: LIB4757-035-F2_FLI
ccgggactcaccaacccacccgcaggagaacggaaaaaaaaatcgtgtcgaggcgactttcgccgccatggcaggcgatcccccgacggctgcggagaaggagaccctggtctcctccttcatcgagatcaccgccggccagaccctcgagactgccacccagttcctccagatgacgagctggcacctggaggaggcgctgcagctgttctacatcgacggcgaggccgcccacaccgccgcgcattcggtggacccgtcgcctgcggcggcggccccgtcggcactagcggcggcggccggggtggaagaggcgatgaggttcgctccacccccggcggctgcactgggcgatgcaatgtcgcatgggtttggggtcagggaggacgacgacgttcgcgcgcccctgccggtgaagagggagactctctacggcgagggaatcgtgtccgtcatgcgacctaatgcatcagctgcatttcgtaactttgaacaagaagcaagacaatctgctgtttgggactctgagcagaatgttgcatctagttctggtgataatcttgcttctttataccgtccaccttttcctttgatgttcaatggatcctttgacaaggcaaagttagaggcttcttccctggacaaatggctattaatcaatttgcagtcgacagaggaatttagctctcacatgcttaaccgagacacttggggaaatgaagcggtggctcagttaattaggtcaaattttattttctggcaggtttactatgacaccagtgaggggaggaaggtatgcacctattaccatttggtgtccatgcctgctattctcctaattgaccccgtcaccgggcaaaaagtacatgcttggaatggaatggttcacccagaccgtttactcgaggatttactaccttacctggataaaggtccgaaggggcaccatgcagctcaacctcaaaagcgcccaaggaaagttgatcaggaagcttctacgggcaagcaaggcaaaatcgctgtagaggatgaggatgaagaactagcaagggcaatagcagcttcgctagaggtagtcattgaagcatcagacgccagtgatgatgatatggctgaagctgaacctgaggaggaaaatgagcccagcttaaacatcaagcctgattatcctcctctccctgaagaacctaaaggaagcagggagcttctctgcagggttgcgattcggctaccgaacaatcaaaggatccaaagaaacttccttcacacagatcctatcaagctcctgtggtcattctgcgctcctcaggttgaggacggggagaagagggctttccacttcgtacaggccattcctggagcatcccagaagctgcagtttggaagcgacctaactttcaggaaagctgggctggccaactcgatgatcaacctcttgtggggctgagacgcttccatcttgcgcttggaaggccttgatcaggacgtgtccagtgtcctccggatgggcttgaagatccagttatttttcattccttgaggattaactcttcatattctgctccgtcccctgggctgcatgttgaaatgctcctttttgccgttcgttcttgtgtctacacatacatcgctgtccccggtagggttttgcctcgatttagtgcacatatctatcagagattcaatctggtggtgtggggcgtgcgcatggtctggtgctttgctttgatgtttcccttttgtatggtcgtggcaaagtctgaaagggagatgcatgaaggcaggcagcgcaatcagattcacagctggacctggatccaaaaccatgaatgaatgagcaggcatggtccttggtgtgccccgtccaacctcacacagtggccgctcaaagctgccggcacaggacagcgtgcggatgcagatgcagtgatgggagatcgcaggcagggagagtagagcagagagagagggacatcacaaggttacgtccctttgatgaatcatcactgcccctccagagacattgtttcgttgcatgatttatatgttctatgacaccttttgtgaacttgcttgatgtatgactgtacctaataatctaatatgttcctttttaaaag

SEQ ID NO: 28475 - DNA, 705 bp, Zea mays
  Clone ID: LIB4758-001-H2_FLI
ccgggatggttccctagccaactatagctgctaatagctgtagctgtacgtgtgtagccgagagactccattatattatattgctcgatctctccatctgaacgtacacacagtccaacacagatggccgccgccaccgccctggtgagcagcagcagcctccgcgccccggcggccttctccgtcgtcgtccgcgcggcctcccggccggcgcctgtcgtcgcagtagtgacgccgctgcccgcggccaaggcagctgccgcccgcggcgccaggctgcgcgcgcaggccacccacaacgtcaagctcatcacgccggacggggaggtacagctcaagatgcccggcgacgtctacatcctggactatgccgaggaacaagggttggacctgccctactcctgccgcgccggcgcctgctcctcctgcgtcggcaagatcgtctccggctccgtcaaccagttcgaccagagcttcctcgacgacgaccaggtcgccgagggctttgtgctcacctgcatcgcctaccccacctcggacctcgtcatccagacgcacaaggaggatgcactcgtcgagtcgtactagtatagtcagcaattaatgcaccacgtatgcacgctctccttgcattgcatgcatgtaataataataataacgacgccgccatgtaataataactaactatacatggtcctcaaaaag

SEQ ID NO: 28476 - DNA, 857 bp, Zea mays
  Clone ID: LIB4758-001-H6_FLI
ccgggcccgcgctccggagtctcctccgggcgggccgctcgctgctccgagaggcattcgtacgttacacaaatagccatcctcgttcccttgtcttgtccatcaccaccagccatcgcgccagccctcgtccagtcgccggcggcgtacgtgtatcgaccaacgacctgtagaacagattgaggacacatggacatggcggaggaggcggcggcaggagcaggaggctcatggtcatcatcggagaagccggtgatggtggtgggcatcgacgacagcgaccacagctactacgcgctgaactggacgctgcagcacttcttcgtcgccgggcagccgcagcagtaccagctggtggtgctcaccgccaagcccccggcgtcctccgtcatcggcatcgccggcgtgggctccgccgagctgctgcccaaggtggagaccgacctcaagcgctccgtcgcccgggtcatggacaaggccaagaagctctgcaccgagaccgaggtgaccgacgtcggctacgaagccatcgagggggacgccaggagcgtcatctgcgacgcggtcgagcggcaccacgccgagatcctcgtcgtcggatgccatgcctacagcaagtggaagagggctgtcctggggagcgtgagcgactactgcacgcaccacgcgcactgcaccgtcatgatcgtcaagaggccaaagcacaagcactgagatttcggatcgatttcggatctttgtatctcttaattagctgcgcgtgccaaacttttccaattttggactagcaatattgtcgagtaactcatcatcccatatcatttaggtcacgaaactcttaaaatgattttttttgg

SEQ ID NO: 28477 - DNA, 619 bp, Zea mays
  Clone ID: LIB4758-001-H7_FLI
ctcgaggccggccgggacgctagtagtgtatcataatacggtcagcgccgactagcaaggagccaagcaggctgcggctgcagtaacaagtcaaggaggttgaaggcgaactagagagaagaggaagatgttggcggcgacggatccgatgctgtggcacaaggtggccgccgtctccggggttgccgctttggggctcggcacctacggcgcgcacatgttccgccccaagaaccccgcgtacaaagaggtttggcacacggcgtccctgtaccatctcgtccacaccgcggcgctgctcggggcgcccatcaccaagcgccccaacgttttcggagggctcctcactgctggaattgtgctcttctctggaacgtgctacaccgtggcttatcttgaagataggaagttttcttcaccggcaccattggggggctttgcttttattgctgcttgggccagcctcctcttctgattaaattgtgcttttccaagaaaacaaaaaaaaatcataaacctctctatctggtgttttatcaggttgtgaaaaatatacttgtaaagtgtatacagtggacagtatgcgcctctgtttaataattcaatctgtgattcctag

SEQ ID NO: 28478 - DNA, 1303 bp, Zea mays
  Clone ID: LIB4758-003-A3_FLI
ccgggacacaaacagcacatctgtttagccaagctgtggccaacctctgcgaggaatggagatggagtcgactcctctcttgacaccatacaagatgggcgatttcaacctggcacacagggttgtgctggcgccgctgacgaggtgccgggcgttcgggaacgtgccgcagccggagcacatggctctctactaccgccagcgggcgacgcccggcggcttcctcatcgccgaggcctgcgccgtgtcggagagcgcgcgcgggtacccggacgttccggggctgtggacccaccaacaggtcgtggcctggaagccgatcgtcgacgccgtccacgccagcggtgccgtcttcttcgcccagctctggcacaccggccgggcctccccctcagcgcatcgtccggtcatcttgtggcccagtgccagtggccactgctggctacagcaattccaaccaaatgggcaggcaccgatctctagcacggacaagcaaatcccagcacaggtgaaccattccggtgacgtcaacacgttcgcggtgcctcggagactagagacagaggagataccacacgtcgtcaatgacttccgggttgccgccagaaacgccatcaaagcaggctttgatggagtggagatccacgcggcaaacgggtacctgttcgatcagttcatgaaggacagcaccaatgaccgagacgactcctacgggggcagcttggagaaccggtgccgtttcacagccgaggtgatggcagccgtcgcggacgaggtcggtgccaaccgcctcggtgtgcgcctctctccgttcgcggattatatggactgccacgactccaacccagaggcgctcgcgcttcatgtcatcgacgagacgctgaacccgctcggcgtgctttactgccacatggtagagccaaggatgcgggtgaacccagacgacggtattatgactctcgagcacatgctgctaccgttcaggagggcgtttcgcgggacgttcattgctaatggaggctacgaccgtgaggaaggcaatgacgccattgcccgtggccgtggctatgcagatctcatcgcatacggccggatattccttgccaacccggaccttccgatgcgttttgccaagaatgccccgctgaacaagtatgataggagcaccttctatacctctgatccggtggttgggtacacagattatccatttctcgatcaactctaggatgattggcttataaacaatttccccacctggagtactatcttgaccttaaaataaaatgagtgtcactatagt

SEQ ID NO: 28479 - DNA, 1237 bp, Zea mays
  Clone ID: LIB4758-003-B10_FLI
ccgggacatccccttttgccagccactgctcccgtcccacccgccacaccgtccaccggcacgtccaccggctcccatggcgctccacgccgtctcctccgcggcggtctcctccccgttgcgcgccctctcacgcagcctcccccagcgcccaggctgtggttgtttaccaaagcagtccgtcatgatttactccacaaaatttgcaagacctcaggctggaccggtggacttcgctggcaggcctctggttcttggacgctcggacaagagttttgatgcatgccactattgaagaaatcgaagcggagaaatccctcatcgaagaccaagctaaagaaaagatggagaaggcaatcgaaacagtccaagctaacttcaacactgtgaggacaggacgtgcaaacccggccatgcttgaccggattgaggtttcatggttgagtactacggaactccagtaaacttgaagagcattgcacagataagcactccagatgcaacttctcttcttattcaaccatatgataagtcaagcctcaagcttattgagaaaactatagttgctgcaaatcttggtgtgacaccaagcaatgatggagaagtaatacgagtgactgtcccaccattgacatctgatcgcagaaaggaattatcaaagacagtagctaaattagctgaagatggcaaggttgctataaggaacataagaagagatgcaatcaaagcttatgataaactagagaaggaaaagaagctttctgaggacaatgtgaaagatttatcagctgatctacaaaaagtcacagatgagtacatgaaaaagatcgaatccatccagaagcagaaggaacaggaactgatgaaaatttagacctcaagctgactgtatggctggtgaggagtaaccgcctccgtgaagcatggacccctgcatatgttggtgtttctgaagcaatttgtttggttcatggctttggcgtctcggcgctgcgccagggatgcacgttttgaatcaggcgctttgctggaacttttgggtgcacacaagttgagactgctgctgctgctgtgtgtgtgttttgagattaagacaatgctgctgtgttttttctttgagattaagacaatgctgttgcgtgtgttcttctcgttttctgtaatgttcgtaaatagtctcttcgtcgccgtgttgtctgaccgctacattgtcaatatttcaaaacatacgtctctg

SEQ ID NO: 28480 - DNA, 1387 bp, Zea mays
  Clone ID: LIB4758-003-F6_FLI
ccggggatcctatcgcatcgaatcgaaactgttccgctcccactccgatcggattcggtgggacggtggcatctatgcgcccgtcgcaccgtcgctcaaactgtataaacctgcgcccgaacacttcgagctcacccgcaacctcctccgggaagcgcgatcgccgtctcgaaggagctgaaatccaagattccaagctcttctgtcacaggttgagggaagttgaagcaaaagtctaagcaaaaatgttttacgggggatatgcttaccatggcaactcgtttgagcaaacataccgttgttatccagcatcgttttttgataagccacacctggaaggcggtgataaagtaataatgccaccttctgcccttgatcgtcttgcttccttgcacatcgagtaccctatgctatttgagctgcacaatgatgcaacccagcggatttcacactgtggtgttttggagtttgttgcagaagaaggcatgatcatcatgccctattggatgatgcaaaacatgctgcttcaagagggtgacactgtccatgtaaaaaatgcgactcttcccaagggcacatatgtgaaattgcaacctcacacaactgattttctggatatttcaaacccgaaagccatcttggaaaaaactttaagaaatttctcctgcttaaccacgggagacagcatcatggtagcctacaacaacaaacaatattatattgatattgttgaaacaaagcctgcttctgcggttagcattattgagacagactgtgaagtggactttgcgcctcctcttgattataaagaacctgagaaaccacgacaaccaacagttcctgcaagcaaggcacctgctgaagatggcaacactgcagtggaggatgaaccaaaattcaaaccatttactggttttggaaagcggttggatggaaaagcctcaaaactgcaagcatcagaggttccttccactgcactttctgcaccttcagattcaaacaaaagagcaaatcagcaaatctcagcacccgcagcttcaggagctagcaattacagtcgacagaaaactgggaaacttgtttttggttcaagtgcaagcaacaataaggaaccacaaaaggctcctgctaaagaggagcaacccgcaaagaaggacgacgagctgaggttccaagcgttcagcgggaagagctactcattgaaacgttagctgcttcagttaaccttcaaattcgccgctactctttcgtttcgtgcatggtgggtgttctggcacctggtcaccaccatgtagatatgaattgaagtatgtatatgcttatcttgatggaaacatgacagtctgtttatttaagcccaaaagtttaaaacagcgctattgttccg

SEQ ID NO: 28481 - DNA, 635 bp, Zea mays
  Clone ID: LIB4758-003-G3_FLI
ccgggaccgaaaaaaaaaactctgcggagattgaccgaccaccaccaccgcctgcgttcccgcgccgccaccgccatggctgccgctgccccccatgcatactcctccctcgtgcctgtttcggctgcgcggcctctctccggaagcacagtttctttcggtgcttcgtgccacaagtggaggaaggttccggcatggcgactccactgtgttgctgaagacgaagcagaggaagtcaaagattttggagtcaatatggcactatccatgctaaaattttacaaacgagaaatatcacctttactaccttcaagctgccgatatgtaccaacttgcagtgagtactctatgcaggcgtacaaacgatatggtgttgtaaagggttccatcttgactgcttggcgcctttgccgttgtaatcctcttggtggatatgggtatgatcctccaaaatggtttggcgaggaagatgtacctctgcaatagtaatgcctagtaattgaaagtacaggcattgtaattcttcagatccagacttgcagcagtttttatgtaatttactgaaactaaacccagaaacacaaggataaaattctgcaatatctatgcacctctgaaggagcatgtattttttt

SEQ ID NO: 28482 - DNA, 1182 bp, Zea mays
  Clone ID: LIB4758-003-H5_FLI
ccgggaaggcaatcgccgcgcgcgtgcttcctgccttctcggtcggctccagctcgccgttcattcccgcaatcccgctccgctcgcggtatcgggccgtggtagtgatgccgctggctgagccgccccagtggcgccgcaaagccacggatttcttctccacatctagtgtcaagctgaagcaggcagggcaatcggccggggataatatagctgatgttgctgggaaggttgggtccgcggtgaagagtcggtgggtcatcttccaggaggctaggcagcagcagcagcaacggccaccgcatgagacagtgcaagagcgtatcatcaccgctgctgccaccactggtttgcttttcaggaaaggcatttcagagacaaaggagaaggttgcagtgggaaaggttaaagttgaagaggctgctaaaaaaactgcagatagagcattagtgagctgttgcaaaaagcaaaaaatatcgtctagcatcagtagcatccccctgcagtgctggccacataatggcgaataagtccgctgccgctgctattctgctcgccgccgccgtgctcggctgtcttgtctcggcgtcgctcgccgaccagggcaccgccacctactacaccgtctacactccgtcggcgtgctacgggaaccaggacgagggcacgctgatcgcggcggcgagcgacgcgctctggaacggcggcgccgcgtgcggcaccatgtacacggtcacctgcgtcgggggcaccaacgagaccccgaacccctgcaaccccggcgcctccgtcaccgtcaagatcgtcgaccgctgcccgtcgcccggctgccaggccacgctcgacctctcccagcaggccttcgccaccatcggcaacctcggcgccggcaagatcgtcatcgactacagccaggcgtaagatacatgcatgttgtgggaagaagcacgaactatacgtacatacatgcaaaagattcattcaagcttatatatattattcggggatgagttagtaaatactaagcaataacaaatcatgtcgtattagtctcaagctacgactatacaatcctagtgcaaacaagtgatttgtttgctgaaataatgatctgcaccatacgagtgtgcgtgtataatcgtacctttggagaaataaataaccgggcagtcgggcttatct

SEQ ID NO: 28483 - DNA, 798 bp, Zea mays
  Clone ID: LIB4758-004-E9_FLI
ccgggaagccatcgaggttgacccgaccagcagccgagtgcccgattacaatcagccatcgccaccacctccctccgcggctccgccttccgccgcgaacacgccgctgtctcgaccccttctcctcctccttcagcaagatggcggagattgagataaaaacagcacctgctgacttccgcttccctacaacaaaccaaacaaggcattgttttactcgctatgtcgagtaccacaggtgtttgaatgccaaaggggatgatgctggtgtttgcgaaaaatttgccaagtactacaggtccctttgccctggagaatgggttgagaaatggaacgagcagagggagcatgggacgtttccaggacctctctgaatgtaccgcccgagacctccagttggaccagtcaacgagttggccaggcagtcctactgttccattctgcattcctacttcccgaatcgtaaatgccttttgtcccttgctcttcaaccagtcaccacaaaactgttagtgatgcctctcgtatgcagctctaataatttggctacagttgccccacatgcagccttgttttgtgtgtggactgtggacctcattttgtttgcgaccgcgtcgtcctataccgcttttgtgtcgtcagtaagctggcactgtagtaatggcctatgaatgtgggtgtacctttcccgtttaaattaagggcctccaattctcgagcattggaggggattgaggtaaaaataaactgaattttcccctcattcacctctaataaaggtggcaatttgaatttccg

SEQ ID NO: 28484 - DNA, 1022 bp, Zea mays
  Clone ID: LIB4758-004-G12_FLI
ccgggaagtctcagcttctccgaggaaggggcgcaattgctgaagcagccacttcaccttggggccatacagaaatggcggcttcttgcgcctccacactcccttcactttccttcgtttcctcctccagttcatcccgccgattcagaaggtgtatgcgcccggtgtggcggtgtcggagggcaatggcgggctgccgaaaatcgacctcaaatccccgcacgggagcgaggctgagatttatctgtttggagcgtgtgttacttctttcaaagtccctaatggcaaggacctgctctttgttcgaccagatgctgtgtttaatggacagaaacccatcagcggtggaattccacattgtttcccccagtttggcccaggtcccatgcagcagcatgggtttgcacggaatgtgaattggtctatcacagattcagaagtcacagaaggagatccagctgtaactttggaactgaaagatgacacttatagccgttctatgtgggatttcagcttccatgcactgtacaagggaagaggtgacttttccaggattcgtcgactgcgtctaccttggtgcaccaagtgaactcatcctggacaatggattgggtgacaaaattgccattgcaaattcaaattggtcagatgcagtcttgtggaatcctcacttgcagatggaggcctgctacaaagattttgtctgtgtggaaaacgccaagattgaaatggtacaactggagccaaaacaatcttgggtggcagaacagaaaattgaactagtctgatgataatgtcttgcagcaactgcatcaagtagagtgagacgcaaatggcgctcccccagtgtcattcttcatggcacatgtcatctcaatagctatacatgtgatgttttctgttaaaaagaataaatgatgcaaatcatgaatttttttctagcagtctgatgtgtactgaattgcaaatgtacaatttgaactgcatggatctgttgaaataaagggagtgcccatttgatc

SEQ ID NO: 28485 - DNA, 699 bp, Zea mays
  Clone ID: LIB4758-005-A8_FLI
ccggggatcaaaaacgtacaaaaccatcgctaccccctcaccctcactctccctgctgcaacccaaccaagcccgcacgacacgacaccaagtcgaggagctcgagagggcaccaataatggccggcgtgaactccagcgtcgtcgggctcaagcccgccgcggcagtgccgcaggccgccgccgcctcatcgccggcgaagcgggtgcagctggccgcgcccgagggccgccgcgccgctctgctcggcctggcggccgtcttcgccgtcacggccaccaccgggtcggccaaggccacgatcttcgatgagtacctcgagaagagcaaggccaacaaggagctgaacgacaagaagaggctggccaccagtggagccaactttgcgcgcgcctacaccgtggagttcggcagctgccagttcccctacaacttcactgggtgccaggacctcgccaagcagaagaaagtccccttcatcagcgacgacctcgagattgagtgcgaggggaaggagaagttcaagtgcggctccaacgttttctggaagtggtgaagcagctagcagcagcgtctgatgggaatggaggagatcatcacctgtcttgtcgaccctagatatgtccaaactgcagggaaattaaatcttcatgtgtaattgtgctcattctgtttcaatcatctcaacatccgatcatg

SEQ ID NO: 28486 - DNA, 1036 bp, Zea mays
  Clone ID: LIB4758-005-B4_FLI
ccgggaaaccaaatcagccttagcgtagcaaatacgcccctcttccagccttcccctccctgttcctactacccgccccgcccttccagttccagaagtttctggaagccaacccaagccatggacgccgccagcatagccgccgccgccgccgccgtggccaccccgccccctggcccggccgtgaccgtgcaggtaccgcgcgggcaggtggatctgattgacttcatcgactggactggcgtcgagtgcctaaaccaggactcctcccacagcatcgtcaacgcgctcaagcagagtttgagggacgacgaggggctgtacctcgccagtgattcggacgagcagctgctgatctacatccccttcatgcaagtggtcaaactgcattccgtgctattcaaaggccccgaggaagagggccctaaaacagtaaaactcttttccaacaaagagcatatgggtttcagcaatgtcaatgactatccaccaatggacactcttgagctatcctccgatcatttgatagagaataaacctttgccgctaaagtatgtcaagttccaaaatgttcgcagcttgactgtatttattgaggacaatcaatctggaagtgatgtctcgaaaattcaaaagattgctctttatggcacaactgtggacacgacaaatatgaaggacctgaagaagatagaagagcactgagaccatttaaaggctgagcttaatccagtgggtgtatggcatactaggaacagttagatgttgaattgagcaatttccagttgaccctggcaaactttttcccctatttttatacacgaggaattaaaagagcgccagtcaggtgatgccgaagctattacctcttggcatcttgtaatcctgcaatttatgtcttggggatccgaattcatttcatgaatttaccaaaattagtccatgtgtcgatggtctcgcaaactttgccagcagagcttagttcgttcctggcgctgtgatatgcgtaagattcaatcaagtcgtggctgtaccc

SEQ ID NO: 28487 - DNA, 1081 bp, Zea mays
  Clone ID: LIB4758-006-B8_FLI
ccgggactccttatcccttctctatccgccaaagggaaatacccattgatctcatctcatgccctgttgccgcgcctgctcctccttccccatccgcacccaccgccgcccacccgcaagcctcccgcacggccaccgctgcccggtatcaatcgaaccagtcgtccgtcctcctttccttcaaatcaagtccatttccactccctgtctaccctctccctcgtctctggtgggcggtggcctcgcctccctttccccgtcgccctgatggctccctccgcagctctcgctccggtggccttccgctccgccttctcgactccgctcgcgtcgaaccctacccgtaatagaataaacatagaaggcgctttctgtttgccgtgttccgcaaggaagagagctagttatagatctttccgagtgtacagtttatttggagggaagaaggataaagatgagaatggcgatgaagcgccatcgaaagcagggatttttggaaacatgcaaaatctctatgaaactgttaagaaggcccaaatggttgtccaagttgaggctgtccgggtgcagaaggagcttgcagcgactgagattgatggttattgtgaaggtgaactaatcaaggttatactttctggaaaccagcaacctattagagttgaaatcacagaagctgcaatggagttgggtgctgaaaaactttcggagctggtcaatgatgcttacaaggatgcgcatcaacggagcgtccaggccatgaaagagaggatgtctgacttggcacagagcttaggaatgcctgcgggccttggtgatggtctcaagtgatgctgcgattcgggaagcctttctaataattttttttgttccctcaattttgtatacgagccgtgtgggcaccttctcgtagtcacgtagtaagaagtgtactcgtgaccagctgtttcgttcagcgttagctgtgattttgttttgtacaagcagatatatttgcactaaatcgtggtaacgtcgtcctatggaactcggatatcacatgtggtatgctaatctgcaagatataggggatatgcaccgaaat

SEQ ID NO: 28488 - DNA, 1415 bp, Zea mays
  Clone ID: LIB4758-006-D7_FLI
ccgggacaaaacacaagctctcgggggacagagaagtagcgcagctagatccagcgctcggcgccagagacacccgacatcctcgtcatgtctccggttgcaagcaagggagtagtgatggacggtgctgtggcggtggcggcagtggccgccgccgtggtgctgtgcctccatctgccggcggtggcgcgcggccagctgcaggtggggttctacaacacgagctgccccaacgccgagtccctggtccgccaggcggtggcgagcgccttcgccaacgactccggcatcgccgccggcctcatccgcctccatttccacgactgcttcgtcaggggctgcgacgcatcggtgctgctcacctccgccaacaacacggcggagcgcgacgcgccgcccaacaacccgagcctccacgggttccaggtgatcgacgcggcgaaggcggcggtggagcagagctgcccgcagacggtgtcgtgcgcggacatcgtagccttcgcggcgcgcgacagcatcaacctcacgggcaacctgccgtaccaggtgccctcgggccgccgggacggcaacgtctccctggacacggaggccaacagcaacctgccggcgccaacgttcaacgcgtcccagctggtggccagcttcgcggccaagaacctcaccgacgaggagatggtcatcctctccggcgcccacaccgtcggccgctccttctgcacatcgtttctcgcgcgcatctacaacggatccaccccgatcgttgactctggcctgagcgccgggtacgccacactgctgcgcgcgctgtgcccgtccaacgccaactcgtccacgcccacgaccacggtgatcgaccccagcacgccggcggtgctggacaacaactactacaagctgctgccgctcaacctcggcctcttcttctccgacaaccagctgcgcgtcaactccacgctcaacacctccgtcaacagcttcgccgccaacgagacgctctggaaggagaagttcgtcgccgccatggtcaagatgggaaacatccaggtgctcacggggacccagggccagatcaggctcaactgcagcatcgtcaacaacggctcgtcgtcggtggggatccagcagatgacagtgcccaactcctactctggcgccaccgcgtcccttgatgatgagatcgccacgagctgatctagatcggcgcggtgtgatgtgatgatagatatttgcattgtgtgtccatctttaggctattaattagtacgtttgctcccggtacgcgcgagagtgcgtagttcgtgtgtcattcatatgcgcgtacacgagatttccagtatcaccatgcatgtatcccgtgaatcatcatcagtaaataaaactggtgctctttgcacagtctagagatgaaaaag

SEQ ID NO: 28489 - DNA, 732 bp, Zea mays
  Clone ID: LIB4758-008-G9_FLI
ccgggaatcgcaattcgcaattcccagccccattccccgtcggccgactccagcgagcgacttcgccccggtcggaagcaccaccagccaccagcgatgtctggcgaggaggaggagaacgccgcggagctcaagatcggcgaagagttcctcaaggccaagtgcctgatgaactgcgaggtggcgatcatcctggagcacaagtacgagcagatccagcagcacgcgtcgtcggagtcggacccgtcgtcgcaggtgtcgcaggtgttcgagaagtcgctgcagtacgtgaagcgattcagccgctacaagaaccccgacgccgtgcgccaggtccgcgagacgctgagccgctacggcctcgccgagttcgagctctgcacgctcggcaacctctgccccgacaccagcggcgaggccaccgcgctcgtcccctccctcaagtccggcggcaggttcgtcggcgaccccggggacgagaagatcgagaagatgctcaacgacctctccctcatcaagaagttcgagtagagcgggagccctctcttctcttatcttcttttctcttggagtagcgagcatccagagaggaggggaattcaacatcaagacgatgtactgataaaattttacttgccttacactactatcgttgaggttcacgtctgcgtattgattagaaccttgtttgatcgataatccaatatactagtagtatgtgtgtggttgaac

SEQ ID NO: 28490 - DNA, 1686 bp, Zea mays
  Clone ID: LIB4758-009-C11_FLI
ccgggatctataagtgaaagccagcatgtccaacagacataaattacacaaatagatcaagcttatatacgcaattaagtaggtagccacaatggaggacaaggtgctcatcgccgtgggaacggtggcggtggtcgccgtcctctccaagctcaagtcggccgtgaccaagccgaagctgaaccttcctccagggccatggacgctgccgttgattggcagcatccaccacatcgtcagcaacccgctgccctaccgggcgatgcgcgagctcgcgcacaagcacgggccgctcatgatgctgtggctgggcgaggtgcccacgctggtggtgtcgtcgccggaggccgcgcaggcgatcaccaagacgcacgacgtgtcgttcgccgaccgtcacatcaacagcaccgtcgacatactcaccttcaacggcatggacatggttttcgggtcctacggcgagcagtggcggcagctccgcaagctcagcgtgctggagctgctgagcgccgcgcgggtgcagtcgttccagcgcatccgcgaggaggaggtggcgcggttcatgcggagcctcgccgcgcccgccagcgccggcgccaccgtcgacctgtccaagatgatctcaagcttcatcaacgacaccttcgtcagggagtccatcggcagccggtgcaagtatcaggacgagtacctggctgccctggacactgccattcgggtggccgcggagctaagcgtaggtaacatcttcccgtcgtctaggctgttgcagagtcttagcacggcgcgacgcaaggcgatagcgtcccgcgacgagatggcgcgcatcctcgggcagatcatccgcgaaaccaaggaatccatggatcagggtgacaagacttcaaacgagagcatgatctccgtcctgctcaggcttcagaaagacgccggcttgcccatcgagctcaccgacaacgtcgtcatggcgctcatgtttgacttgtttggcgcgggcagcgacacctcgtcgacaacgctgacctggtgcatgacagagctggtccggtacccggccacgatggccaaagcgcaggccgaggtccgggaggctttcaaggggaagaccacgatcacggaggacgacctgtccagggcaaatcttaggtacctgaagctcgtggtgaaggaagcgctcaggttgcactgcccggtgccgctcctgctcccacgcaaatgccgggaggcgtgccaggtgatgggctacgacatccctaaaggcacatgcgtgttcgtcaatgtctgggcgatctgtagggaccctaggtactgggaagacgccgaggaattcaagccggagcggttcgagaactccaacctagactacaagggaacatactacgagtacctcccgttcgggtctggccgtcgcatgtgcccgggagcaaaccttggagtggccaacttggagcttgcactggccagccttctgtaccatttcgattggaagctaccaagtggacaggagcctaaggatgtcgatgtttgggaggctgcaggactggttgcgaagaaaaacacaggcctggttctgcaccctgtcagccacattgctccggataatgcctaattgacgaaccagtttgctcctgtatttttcatgctttactgatatatgagaaaataaatccaaccagttcgctcctg

SEQ ID NO: 28491 - DNA, 721 bp, Zea mays
  Clone ID: LIB4758-011-B4_FLI
ccgggctagcctccaccccgtccggcagcagccaaaccctacataggcgccgccgcaggcggccccccgcatcgtcgccaaagatgcagatctttgtgaagactctgacggggaagaccatcactttggaggtggagtcctcggacaccatcgacaatgtgaaggccaagatccaggacaaggagggcatccccccggaccagcagcggctcatcttcgccggcaagcagctcgaggacggtcgcacccttgccgactacaacatccagaaggagtccaccctccacctggtgctccgcctccgcggcggcgccaagaagcgtaagaagaagacgtacaccaagcccaagaagatcaagcacaagcacaagaaggtgaagctctccgtgctgcagttctataaggtggacgacaccactagcaaggtgacccgcctccgcaaggagtgccccaactcagagtgcggcgcgggcgtcttcatggccaaccacttcgaccgccactactgcggcaagtgcggcctcacatatgtctacaaccagaaggcgtaattgcttgccccgatttgctttatccgcctaccctatcgaacatccagctgttggttactcgaattgtatctcatgtagatctgtctgaggttgaaacttaaatggagcagtagtatctgtcatattgatacccctgttactgaattgatgtgatgctgagtttaattttg

SEQ ID NO: 28492 - DNA, 568 bp, Zea mays
  Clone ID: LIB4758-011-C1_FLI
ccgggactgacgagctcgccatggcctccctctcctctgccgccgtcaccgccccttccttcgccgcacccgcaccagcccgcgccgtggtcagaaggaggtccttcaccgtgcgcgcctctctccgcaaggccaccggcaccgccgccgtggcaatggctgccagcgccctgcttgccggcggtgccatggcccaggaggtgctgctgggcgcaggcgacggcgggctcgtcttcgagcccagccagttcaccgtcaaggccggcgacaccatcacattcaagaacaacgccggcttcccgcacaacgtcgtcttcgacgaagacgaggtgccgagcggcgtcgacgccaccaagatctcgcaggaggagtacctcaacgcgccaggcgagacctactccgtcaccctcaccgtgccgggaacctacggcttctactgcgagccgcatcaaggagccggaatggtcggcaagatcaccgtcaactaattaagctagctatcgatcgatatccattcatgtattagctgttgcttcctgctttgtactccgccgatctgtccatctct

SEQ ID NO: 28493 - DNA, 758 bp, Zea mays
  Clone ID: LIB4758-011-G9_FLI
ccgggaacccttgctcgctgcgccgccgcctccgacatcgtcccttcgtccccacgagcaaccgataatccgccggcgttgagatgttggtttatcaggatctcctatctggcgacgagctcctgtcggattcattcacctacaaggagctcgagaacggcgtcctgtgggaggtcgagggaaagtgggtcacccaaggtcctgttgatgtggacattggtgccaatccatccgccgagggtggtgaggacgaaagcgttgatgacacagctgtgaaggtggttgatattgttgacacattccgtctacaggagcaacctccttttgacaagaaatcatttgtgtcttacatcaaaaaatacatcaagaatctcactgctgtgttggagccagagaaagcggatgagttcaaaaagggtgtcgagggtgcaaccaagtttctccttagcaagctgaaggacctccaattttttgttggtgagtccatgaaggatgatgcgtctgtggtattcgcctattacaaggatggtgccactaatccgacattcctctatttctctcatggtcttaaggagatcaagtgctaggcgtgcggcgaaattagttacccatgttgggtactatctatgtactattattatatccaaaactatagttgtcctggctgaattgaactcaaaagggtttgtttgagaaaaaattgtcccaagattggattgcttgttaaagctcaatattgttattgaagtgttattgcc

SEQ ID NO: 28494 - DNA, 782 bp, Zea mays
  Clone ID: LIB4758-011-H12_FLI
ccgggagtccatagggaggaagttgagagttctaataagagcaacggccaataccattagcgagttatttttctgcaatatatgtcagcaaccgatcatttggttatggctcgtgtcatacaggatgtattggatccctttacaccaaccattccactaagaataacgtacaacaataggctacttctgccaagtgctgagctaaagccatccgcggttgtaagtaaaccacgagtcgatatcggtggcagtgacatgagggctttctacaccctggtactgattgacccggatgccccaagtccaagccatccatcactaagggagtacttgcactggatggtgacagatattccagaaacaactagtgtcaactttggccaagagctaatattttatgagaggccggacccaagatctggcatccacaggctggtatttgtgctgttccgtcaacttggcagggggacagtttttgcaccagaaatgcgccacaacttcaactgcagaagctttgcacggcaatatcacctcagcattgccaccgctacatatttcaactgtcaaagggaaggtggatccggcggaagaaggtttagggaagagtagaaaccataggccactgcatggtcacactatagaaatatcatcaataatgtgcactatattgaatcaatgcaccacctctatatgctgaatgttatgtatctcaaactatgattgtactgacttgaaaggttgagagcttagtctcttagcagaatatagcacaatattactag

SEQ ID NO: 28495 - DNA, 1055 bp, Zea mays
  Clone ID: LIB4758-012-D5_FLI
ccgggattccgtcgtcgtcatcagcagcttctgcttgctctggggggaaggagagagagagagagcgagagagagatctagtagagaggctagtaggtggtcctcgaacgaagatgttggcggtgttcagcgggcaggtggtggaggtgccggcggagctggtggcggcgggcagccggacgccgtcgcccaagacgaaggcgtcgcagctggtggggcgcttcctggccgcgtccgagccggccgtgtccgtgcagctcggcgaccacggccacctcgcctactcccacaccaaccaggcgctcctccgccccaggtcgttcgcggccaaggacgaggtgttctgcctgttcgagggggtgctggacaacctgggtcgtctgagccagcagcacgggctgtcaagcaagggcgccaacgaggtgctcctcgtcatcgaggcctacaagacgctgcgcgaccgcgcgccctacccggccagcttcatgctcgcccagctcaccggctcctacgccttcgtcctcttcgacaagtccaccaactccctgctagtcgcatctgaccccgagggcagggtgccgctcttctgggggatcaccgccgacggctgcgtcgccttctccgacgacatcgacatgctcaaaggctcatgcggcaagtcgctcgcgccgttcccgcaaggctgcttctactccaacgccctcggagggctcaagtgctacgagaaccccaagcacaaggtcaccgctgtccccgccgacgaagaagagatctgcggtgccactttcaaggtggtggaagggtctactgtcctgacggcgctgcactgatcgatcatcagctggcggaggcgatgcgacgatgatgcagaactttgtacatgcgtggtgggtgtgtaacatagtgtggctggcaacaagccatgctcatgcaaaccgatgaatctatctctgtatcatgcatcgatctcggttgcttgctagtcccgactccagactccagacatggctatatatagctggtgctaataaataggagtataatcgtcatatcag

SEQ ID NO: 28496 - DNA, 709 bp, Zea mays
  Clone ID: LIB4758-012-E4_FLI
ccgggatctcatgcacgccgatcacacattggacttgcactggtgcttgctcataattactagttcatcagcaaacaacaaacaatggcaccgaggcttgcgtgcctcctagctctggccatggcagccatcgtcgtggcgccgtgcacggcccagaactcgccgcaggactacgtggacccgcacaacgcggcgcgcgccgacgtgggcgtcgggccggtgtcctgggacgacaccgtggccagggcgactgcaagctgatccactccggcgggccctacggcgagaacctcttctggggctccgccggcgccgactggtcggcgtccgacgccgtgggctcctgggtgtccgagaagcagtactacgaccacgacaccaacagctgcgcggaggggcaggtgtgcggccactacacgcaggtggtgtggcgcgactccaccgccatcggctgtgcccgcgtcgtctgcgacaacaacgccggcgtcttcatcatctgcagctacaacccgccgggcaacgtcgtcggcgagagcccctactagactgtcatgcatactacaattatatatatatacgcttaatattaacttcagcatgcatgcatattataaatagtgttgtcaactctgtatatcattatattacgatgattatattgttgatgaacataataagtcaataaaaccatgcaggcgatttgtgagat

SEQ ID NO: 28497 - DNA, 712 bp, Zea mays
  Clone ID: LIB4758-012-G5_FLI
ccgggttccacccagctcccagcgcgctgctcgactcgacgacttcctctgcaacgcctgtccggtcagtgtaggctgagagagtgagtgagaggcgagatgaggagcgggcggctggcagtggcggtggcggtggctctggcgtgggcgttcgccgcttgccgcctcgccgtccccgccccgtcccttcccgccgcacgggcgcctaggccccgacgcggcctggtggcggtgcgcgcggaggcgggcggtgggataaacccggccatccggaaggaggaggacaaggtggtcgacaccgtcctcaccggcgagctcgccaagccgctcaccgcgtactgtcggtgttggagatcaggaacattcccactgtgcgatggatcccatgtgaagcacaacaaagcaaccggtgataatgtgggccccctgctcgttaagaagtagatgcagtttctttcgacttttgccctagcgtcatgttgagcgctgagctgaacactatctgtatgtcatgatatatgtttttttagccaagataaactatcatgacgcaacgatccttcattcggaataaagtaagctgctcatgtcaacaagtctcagtttcatgattgtaggaaacgttagtgactggtgatacatgtagtgggatgtatgaaaatcggaaaaatattttgttctctgtgttgaacaatcaagtcatgagcttatg

SEQ ID NO: 28498 - DNA, 2177 bp, Zea mays
  Clone ID: LIB4758-013-E12_FLI
ccaggatcctacattcctagccgcacgctctgggcacacggtcgttgtgaacggatgagtgaggcggagtgagcaacgagaccctctccccacatggcgccaccgccgctgcccctcttctccccgtccctaaaggccccgccgccgccgccatggctccacgggtcctccacccaaagccgcgactccgcacccccggtgcctccactccccgccgaggcaactccttccaggttccgcaccgacagctccaaaccggcaccggcaaggaaaaacaccaaaacaacagccaagcccctcactgccggagtccccggaggccgcacccaccgagcggtcctcggcatcatccggcgcgtccgccccctcgagctctccgatgctccgagtccgaattccgtccacaccagcaacggcggtgccgccgccgccgcattccaccttacgatcgagctgtccccgccgcgggaaccaggccaatatgtggttgagaaggagaagtcacgggctgttccgtgggcggctgctagggacgagggcctcaaggttgcgctgcggcgggagaagaagccgcgggagccgacgcgcgcggagaccgagctggagacccacgagctgcatcgcctgcggcggttggcgcgcgggataggcaggtgggcgcgggccaagaaggccggagtcaccgacgaggtagtcaaggaggtgcgtagggaatgggccagtggtgaggagctcgccgccgtgcgcatagtcgagccactccgccggtccatgggtcgcgccagggaaattcttgaggtgggtgcccgtgcgttgcgacggaaccatatctctactactctataagactctaatagtgcacttgacagtcccttcgattcgactgatagagggttgcgtccgtgggccgtggcgcagacagaggtggccgccgcagtgcttcaacgacccccttccctccttagtcccgccacccacccgacttcgaattatgtcaatacttgcagggaaagattgtttttataccaactgtatttgttcttagtgttactgcagtggttacaataaatattaatgttcttattccaagaatttgttttgacctttttaagttgtatgattactcaattactaatgttaaattcaaaaacttacaattttcgttgatggattaaattttttgtcagattaaaacaggaggcttagttgtgtggacaaaaggagacatgcattttgtctacagaggaagcaaatatcagcaaaacgcaaagcatagtcacacttttctaactaatgttcataaagatgatgcttttcaagaaaatgatcaaagcatttgtggccagaaggatgaagaacctgtcaagggtacactatatgagagagaagtcaatagactattggacactttgggccctcgatttgttgattggtggtgggacacaccattacctgttgatgctgatctcctcccagagtttgttccaggctttaagactccatataggctgtgccctcctggggtgagaccaacactagctgatgaggagctgacatacttgcgcaagcttgcacgccttttgccaacacattttgcccttgaaacacaagattgcagggtttggctgctgctatactgaagctttgggagaaaagccttatagcaaaaattgcggtgaaagtaggtatccagaatacgaacaatgaacaaatggcatggaacctgaagtacagcatcttacgggaggcactgttatattgagaaacaaggattttattattctatatagaggcaaggattttcttcctggtggagttgctcaaactgtcattcaacgagaagctcaggtacatgatgaacaggtgaaggaagaggaagcccgactgaaagcagttgactcacttcagatggttggtgaattatctgaagaaagttctttaggaactttcagggagtaccagggtttccatgctaagtttgtgcatgaaaatactgaaaactctaacgccatgattgaactagaggctgagaagtatagattggaaaaggaactgaaagaccatgaatggaagctttccgttctcaacaagaagattgaaagatctaaccaggcactggcaaagcttcacagttcttggagcccttcagagcagtctgctgatagagaacacttgac

SEQ ID NO: 28499 - DNA, 1126 bp, Zea mays
  Clone ID: LIB4758-013-F8_FLI
ccgggagcacgctcaaaagacaagagcaagcacggaacacccatccccgactgtagtttgcccggcaagcaaacatctccggcagccatggcgtccactgtaacagccgccaatagcagccatggaagcgccctgcgtacccgtaccgcctccccaaggccggtcgcgggctggagctgcagacgcacgctttccacgcctgcacaccaccaccacgggcggtcgtcacccagagctcgggttgtcgccgtccgagccgccggcactcagcgggcgacctggttgcccggactggacccgcccccatacctcgacggcacactaccaggtgacttcggcttcgaccccctgggcctcggcgaggagcccgaagccttgaagtggtacgtttaggccgagctcgtgcactgccggttcgccatggcaggggtcgccggcatccttttcactgacttgctccgcgtatcagggatcagggatctccccgtgtggttcgaagcaggcgcggcgaaattcgacttcgcgaacaccacggcgctcttcttcgtccagctcttcttgatggggttcgctgaaaccaagaggtacatggacttcaaaaatccaggatcgcaagcagaggaagggacattcatagggttagaggctgcactcgcaggtcaacagccaggctaccccgggggcccactgttcaatccactaggactcgcaaaggatatagagaatgctcatgacgagaagctcaaagaaatcaagaacgggaggttggcaatggtagccatgcttggcttcatggtgcaagcatctgtaactcatgccggccccatcgacaatctcttgacacacctttcggacccgttcaacaaaaatatcattcacacattctcctcttcctaagtactcgtcccaatgcccggatgctatggcacaaaaaggtcacaatgtttttgaacacaacagaacaacatgattattgatttacgtccttctccccaccgaataggggaaggaaggttagggaagcgttcaatcaattcaatgagatagtgtaatctatagcaaactcagatacgctatgatgtgagatgaagcgtacttcgtgcaatcaataagttccatttattcg

SEQ ID NO: 28500 - DNA, 706 bp, Zea mays
  Clone ID: LIB4758-013-G12_FLI
ccgggaccatcgtcccttcgtctccttcctcgtctgggtgtggccgtctcgcttcgccccttcctctctccttcggttctcctccagatctctaagaccaggagcccggtgaatccaccgcgcccgcagcgatgtcggcgagcagcacccccgtagacgcctcgggggagccgatcccgacttcgtcggtgctgatggcggcgtcgaagcacatcgcggtccggtgccgcccggagaacgttgccttcctcaactgcaagaagaaggaccctaaccccgagaagtgcctcgagaagggccgccaggtcacacgctgcgtcctcagcctgttgaaagaacttcaccaaaagtgtcccaaggaaatggatgaatatgctggttgcatgtattactacaccaacgaattcgacttctgccgtaaggagcagcaagcttttgaggaagcctgccccatttctgagtagatcttgagagttttacttgcagtggtcttcgcaaataagggaaaaaaaggcagaaaaacagcgttcatgatctcccatgtttgttgtcctcatggaatttgtactggtgaatgaatagcacagcctggagctattcaccccatttgccgcccctcaggattttagagcaggcgaatgctctaaaatggtgatgatggcgttttctctttatggttcacaaattacatttggcggactcaaag

SEQ ID NO: 28501 - DNA, 1033 bp, Zea mays
  Clone ID: LIB4758-014-C2_FLI
ccgggacgccctgttgccttctctcgacttcgagagcaccgccgcacggcataacgctcgcacggccgagccccgacattctaccgcactccctccgctgcacccctttccattctaccgccggcgacgccaaagttcttgggcctcctcatcggcgacttttccgccggcgacaggaaacaacgaaccaaaccacttctctgtcgagaggcgtcgcgctcctctcttcgccctctgctgttgaagatgaggaagctcaagttccatgagcagaagctcctcaagaggcacaatttcttggagtacaagagggagggcggccaccgcgaggcgctcgtcacacagcgctaccgcctcgtggagagggacgactacaagaagtacaatgggatatgcttaatggtgcaaaagctcgttaacatcataaagcagatggacccaagagaccctttcagaatccagatgacagacttgattctcgataagctgtataatatgggtgtaatttcaacaaaagagagcttgttaaagtgtgagaaactttcagtgagcgccttctgcaggcggagacttgcaacagttatggtgaagctcaagtttgcagagcaccttaaggaggctgtgacgtacatcgaacaggggcacgtgcgtgtcggtccagatgcagtcacggacccagcctttcttgtgaccagaaacatggaggacttcatcacctgggtggattcctcaaagatcaagaggaaggtcatggagtacaatgatgcattagatgattatgatgccatgttctgagaaaataattctgcagaaatttatgtgcccgtcagtagtgtaatcttaagcctgccacatatgggtcttttctgaacaaatctgtgggagttgtcttctgcatggctacttgcatttgtattgcacctgcagatgtgatgcaattttgtggttggttgaaggcacattataaattcatatctgatgtagttgtgcaattgtctttgttaaagagcgggtttgcctcggatttccccgc

SEQ ID NO: 28502 - DNA, 908 bp, Zea mays
  Clone ID: LIB4758-015-E6_FLI
ccgagaaaaaaaaacgcgaacgcagaacgccgccggcccgtcgtgcactcgtgtttcccttcctccacttgccttcgtgttcgtgattcgtgatttcgccgccggaaagccgagggagagggagcgatatggggttcgtcggagacacgatggagtcgatccgctccatgcagatccgccaagtgctcatgcagatcatcagcctcggtatgattgttacctctgcattaatcatatggaagggtttgatagttttcacggggagcgagtcaccagttgtagtggtgctctcgggtagcatggagcctggatttaaaaggggtgatatcctgtttttgcatatgagcaaagatcctattcgcacaggagaaatagttgttttcaatatcgatggtcgtgagattccaattgtccaccgagtgattaaggtccatgaacgtcaggacactgcagaagtggacatcctcaccaaaggtgacaataattttggggatgaccgactattatatgcacatggccagctttggctccagcaacaccacattatggggcgtgcggtgggctaccttccatatgttggctgggttacaattatcatgactgagaaaccatttattaagtacctgctgattggcgcactgggctcgctggtcataacgtcgaaagattagtgatgtcaaacttcagggccatgtagattttgctcttatggcgcaacagcagagatcactggctttgtggcgtttgagagatgccgctatgttgcgccatgtatcaaacgagaagatttctttatctactgcgagggcacctgcccattgatcggatagtcggttctaatccagcatccatcttttgtagttgtggcctagctaatgagttgaaccagtcgttgggttctattcgag

SEQ ID NO: 28503 - DNA, 1382 bp, Zea mays
  Clone ID: LIB4758-015-E7_FLI
actgctcgcttcctgcccttccctctgcctctctccctagggtttctacctcgcgcccgcttccgactagcaggttggtgatctccattcctctccagtgcaagctattagtcctctcgatcgatctattacacggggcccgcttttttttctccagcgctagcgtcgcctaactccgaccgaggggacaacgagggttttgggacggacggtgggagatttggaggaggcagcggagggccggagaccagaccatgaggccggtgttctgcggcaacttcgaccacgacacccgccagtacgacctcgagcgcctcttctccaagtacgggcccatcagccggatcgacatgaagctaggctatgctttcatttactttgaagatgagcgtgacgcagaggatgctataaggcgtctcgacaatgtgtcttttggttacaaccggcgcaggctttctgtggaatggtctaggcaagttgaaccggtgccaaagagccgtgataggcctactggggatgtaaagccaacgagaaccctctttgttatcaattttgaccccatacgcactaaggttcaagatattgagaagcatttcgaaccgtatggcaagattgccaacattcgcattcgaaggaactttgcgtttgtacaatatgagacacaagaggaagctagtgccgctgttaagaacactgacaagagcaccatattggacagggtagtgactgttgaatatgccttccgggatgatgacggcgatagagatgaccgatacgacatccccaaacaaggtgcttatgacaggcgtggtggtagcccctacatgcgctcacctagcccaaggtaccgaagggactacggtccagattatggtcggcgtggacgttatcctggctatggtcgccgtgatggagcaatgtatgaaaggcgaagccctgtatatgatcgctacggcgggggcagaagccccgcttatgatcgctatgacaggaggagaagccccggttatgatcaatactagtccggtcgattctgaggaacccagtaaggaagtagtttccaaggaagaggtggcgagcaacaacatgatttttgccacgccaagtatacctggaggagccgtggtgttccaagtatgtctgagtgctgtcatggtaacgcgatgctggttccctggttgttgattggaacgaatcctaagcgtctgaaagagattggtttgcatggattgcttgccgttgccaccttgcctgttttgaagtgtaacctttgctggtgaatgtaatggctgtcgactaacttgtacaccgtacctttgcgtgcccattttttaggcgggtgaacttttactcgttgcctgttttgatgcgcaaactgccag

SEQ ID NO: 28504 - DNA, 786 bp, Zea mays
  Clone ID: LIB4758-015-F12_FLI
tcagcaccgctttccgggccggtgcgccccgcgccccaattgctgcccgctacgccgctactcgaagctacgccgccgccgctccatctggctctgccatcaagcccccggttgccctcttcagcgttgacggaacctacgcgagcgctctgtacaccgcggctgcaaagaccaacgccctcgagcccacggccaagtctctgtcgaacctccagggtgtcttccagaaggatgccaagctcaacgagatcctccatgcgccttctctgtctgtgtcggataagcagcagattgtccaggagctccagaagcacattggcagcgctgacaaggagggcatcgtcaagaacctgctcaacactctcgccgagaacaaccgattgagcgtgttgaagggtgttgttgagaagtttgacgtactcatgggtgcgcaccgtggtgaggtcgaacttaccgttaccagcgctgcgccccttgacaaccggacaatcagccgccttgagactgccatcaagaactcgcaatacgtaaccagcggccagacgcttaaggttgtgcccaaggtcaacccagagatccgtggtggacttattgtcgagattgccgaccgcacgattgacttgtctgtcgccaacaagatggccaagatgaacaagctcctcaccgaggctttgtaagctgataagagtgtgtctgtgcatacgatgaatggacagtgagggaagggagatgtgtactttagatgagtctcggaaaaagagcaatttattaccgtcgaccacctcg

SEQ ID NO: 28505 - DNA, 1449 bp, Zea mays
  Clone ID: LIB4758-015-G4_FLI
ccgggaggcagccagagccagagccagccgggcaagcactgcagcagccattgtactcatcacctccttcccacgcagcgagaggatgacaccacgaggcaaataaacccagacgtagttcagctagccgcttctacctccctctccccccccgcctgcgcgccgccgcgagagctcgttcctgatggggaactgcgccggcgtggaggggaacgccgagatcaacccttccttcagtgcccccaattcctcagggaccgccggttctaagagcgtcagcaagaacgcggccgacaccagcaccttcggcaccaagacgtccggctcgtcgtcgtcagtgccgccaacccctcgtacggaggcggagatcctggagtcgtcgaatgtccgcaagttcagcttcggcgagctcaaaggctccacgaggaacttcaggccggacagcctgctcggggaggggggcttcgggtccgtgttcaaggggtggatggatgagcgcacgctcgcgcccgtcaggccgggcgccgggatcatcgtcgccgtcaagaagctcaagctcgacagcttccaagggcaccgggaatggctggcggaggtcaattacctggggcagttatcccaccctaatctcgtgaaactcatcggctactgcttggaggacgagcagcggcttcttgtgtacgagtatatgccgagagggagcctggagcatcatctcttcaggaggggctcgaacttccagccgctcccatggaacttacgcatgaaggttgctctcgaggctgccagaggtcttgctttcctgcacggcgaccaggccaaagttatctaccgcgatttcaagacctccaatatccttctcgactcggagtacaacgcaaaactgtctgatttcggtttggcaaaggacggtccaagcggtgataagagccatgtttctactagggtcatggggacacaaggatacgctgcccctgaatatcttgcgacaggccatttgacagcgaagagcgatgtgtacagctacggtgtggttcttctggagctgctgtctgggcagcgcgctctggacaagaaccgcccgcccggtcagcacaatctggtggagtgggctagaccttacatcaccaacaagaggagggtcattcatgtcctggactcacggctgggttcccagtattcccttcccgcggctcagaaggtggcaacactggcgctgcaatgcttatcgatggacgcacgatgcaggcctggcatggatcaggttgtgactgcattagaacaacttcaaaggccaagggctcactgaaaaagatgtccatctacatctgtggagtctggagcatcctcctgtaatactttaggggagtaaaaaaacagagaacgggcgagggtttgaagggctaagtggcttgtgaagagaatataatattgccttgctttgtgtat

SEQ ID NO: 28506 - DNA, 1759 bp, Zea mays
  Clone ID: LIB4758-016-H6_FLI
ccgggaaaaagctcatcaacaaagcctgatacgtaactactaggccgatcggccatccacagacccgtcttaactctacctgcctgccactatactatcagcctgtgcgagcgagaaatggacagagccgccaagcctcacttcgcgctcatcccattcacaggaaccatcagccacgtgatccccatggcagacctcggctgcctcctcgcggcccacggagccgaggtcaccatcatcactacgcccgtcaatgcagcgatagcacagagccgtgtcgaccgcgcacagtcacacggtgccacgactacgatcacggttaccgcagtcccgttcccggccgcggacgccggcctgcccgagggctgcgagaggatggacctgccccggtcccaggccgaggtgcctcgcttcttcgtggccaacaaaggcttcggtgaggcagtgtcgcggcactgcctcggcgaagcgctgcgccgtccgagctgcgtcgtctcgggggcgtgccagacgtggacgctgggcctggcgcgccagcttggcgttccctgctacgtcttccacggtttcggcgccttcgctctgctctgcatcgagcacctgtacaggcacaggccgcacgaggctgccgcgttggccgacgacgagctgttcgacgtcccagcgctgccgccgcctttccggctcaggctgtcgcgtaggcagctcccgccgcatttcatgccgaccacttccgtcgccgggaaggcgctgcaggggatccgggatttcgacatggccgcggacggcttcgtggtgcacaccttcgaggagctggagagcggctcgacggcgctactcgcggaggcgacgggcaaaaaggtgatcgccgttgggcccgtctcgctgtgctgcgcgccaagcctggatcctcggctcgtgtcgaacgatgatgcgaggcgatgcatggcgtggctggacgccaaggcgcccaagtccgtggtgtacgtgagcttcggcagtttcgggcgcatgccacccgctcagctcatgcagctcggcatggcgcttgtcgcatgccgctcacctgtgctctggctcgtcaagggcgccgactccctgcccgacgacgtcaaggattggctaagagagaataccgacgcagacggcgtcgcaggcagcaagtgtctggtggtgcgcgggtgggcgccccaggtggccatcctggcccatccggccattggcggcttcgtgacgcactgtggatggggctccattctggaggctgttgcagccggtgtgcccatggcaacctggccctttttcgcagagcaatttatcaacgagcagctcatcgtgcacgtgcttggcgttggggtgtccgtcggtgtgacgaagccaacagaaaatgttttgaatgctactactgacgccgccggtggcagccaaggggaggctgatgccgaggtggggatggaacaggtgaagaaagccatggatacgctgatggatcaagggcctaaaggggaggagaggaggaggaaggcccatgagctgaaactgaaggcgaagagtgctttggagaagggaggatcatcctacactaatctggataatttgatcctgtcttttctttgaatgtcaccatgtcttacttttgcgtcccagcatacatgttttgtttgcctctgagtgtcatactatggagatttatttactctttatttattattactatggtcatttgtttctgtcgagtaaagttattgtattctagacg

SEQ ID NO: 28507 - DNA, 649 bp, Zea mays
  Clone ID: LIB4758-017-B3_FLI
ccgggactgaaaaaatggccgcccgtctctccatcgccctcgccgcccgtcgaatctcttccgtggctgcaaagaggccctcgctaattgtgtgtcagaagtggcagcaggttgctccaaagcaacggctattctcggtatctgccgcactcaaggagaagaggtatactgaggaccatgagtggattgagctgtccgctgatggcaagacatgcactctgggcatctcagaatacgcagccaaagccctcggcgacgttgtctacattgagcttccacaggtcgacatggaagtggccgagggcgacgtcatcggcgctgttgagtctgtaaagtcggcttcggacattctcactcccatcgctggtgttgtttctgaagttaacgaggcattggagtccgcgccaggcagtgtcaacaaggaccccgagggcgatgcctgggtcgcaaagatcgctgtgtcagcggagcccaagggcaagactatgagcaaggaagagtatgccgcctttactgaagagtaaaaactccaaagaaacatagggacaggctagtgtacatgggtggataatacaagatacctgcgcaccatcttcaacagggcgcgccaaatacaacatgaatttcacatcttgatgttcgttgtgcc

SEQ ID NO: 28508 - DNA, 1171 bp, Zea mays
  Clone ID: LIB4758-017-D2_FLI
ccgggacaccaacctcagcacaccaaggagagtacgtggaggagcagccatggcttcatcggtggccgccgcggcgagcacattcctgggcacccgcctggcggacccggcgccacagaacgggcgcatcgtggcccggttcgggttcgggttgggcggcaaggcgaagcctgctccgaagaaggtggcgaagacatcgacctcctctgaccggccgctgtggttccccggcgccgtggcgcccgactacctggacggctcgctggtcggcgactacgggttcgacccgttcggtctcgggaagcccgtggagtacctgcagttcgagttggactcgctggaccagaacctggccaagaatgaggccggcggcatcatcggcacccggttcgagtcctccgaagtcaagtccaccccgttgcagccctacagcgaggtgttcggcctccagcggttccgcgagtgcgagctcatccacggccgctgggccatgctcgccaccctcggcgccctctccgtcgagtggctcaccggcgtcacctggcaggacgccggcaaggtggagctggtggacgggtcctcctacctgggccagccgctgccgttctccatctcgacgctcatctggatcgaggtgctcgtgatcggctacatcgagttccagcgcaacgccgagctcgacccggagaagaggctgtaccccggcggctcctacttcgacccgctcggcctggcggccgaccctgagaagaaggagcggctgcagctggcggagatcaagcacgcgcggctcgccatggtcgccttcctcggcttcgccgtgcaggccgccgccaccggcaaggggccgctcaacaactgggccacccacctgagcgacccgctccacaccaccatcttcgacacgttcggagggtcctcttaagcccgccattgctccgccccgtccatcgaccggccggaacgtgttcttggattaactacgatctctatgagcctggggatggatcaacccgtcgtgcgtggtctcgttttgtgatgagtgggagagagagagagagaggatgacaagatcgatcctttgttaatggagatctcgttaattaggagagctaccgctgggacttggtggtttgtataatatatgatccaaccagtgatgaattaatgc

SEQ ID NO: 28509 - DNA, 1313 bp, Zea mays
  Clone ID: LIB4758-017-H1_FLI
ccggggtctctcttcacttgcctcgcgtgggcaggagcgccagcggcttcgtccgatctctcacctcacttcagccacgcacactccctccttccctccccgatcactactctccctctccagttcacacccaccgccccacctcttccactcaaatccagggccatcgcagatccaccgcctccccgatccggtcgcctacccagccgcccgatcggatcctgcagtgtggatggaacgctgaattgtggatattcaagttttagaggaaaaagggcaagcatggaagatttctatgatataaaatcatctaaaattgatgataaacaaatacatctctttggaatttttgatggtcatggcggttcacgtgctgctgagtatttgaaggagcatttgtttgagaacctcatgaaacatccagggttcatgacaaacacaaaattagcaataaatgaaacatataggaagaccgattcagagttcttggatgctgaaaggaattcccatagagatgatgggtcaacagcatcaacagcagtgctagttggtgaccatctttacgtggcaaatgttggagactcaagggctgttatatcaaaggctggcaaagctattgcgctctctgaagatcacaagccgaacagaagtgatgagaggaaacgaatcgagagtgctggtggaataattatgtgggctggaacttggagggtaggtggtgtacttgcaatgtctcgggcatttggcaaccgtctcttaaaacaatttgttattgcagaccctgagattcaggaacaagaaataaatgatgagttggagtttctaattatagctagtgatgggctgtgggatgtggttccgaatgaggacgctgtttcacttgtgaagatggaggaggatcctgaggcagcagcccggaagctgacagagactgcgttctcccgtgggagcggcgataacatcacctgcatcgttgtgaagttcgagcatgacaagcctggcggcggcggctactcgcctccaggcgacaagagttgattccatttgctgttggttatacgctttgccggtgccccttttaccctgggccggattttgctggccccatccatggtgccccccgcggctggtacttgaggaaggagctggttcatgttcgtcgcctgtcttgtctatatttatgccactaattttggtctccggtcagtggggttaccggcgggcagtgcttgcccattcgcatgtttatcgtgggttcatcgtcctatacggcattgttgtagacttgtagttgctgttgcctgttgtacaat

SEQ ID NO: 28510 - DNA, 729 bp, Zea mays
  Clone ID: LIB4758-018-A5_FLI
ccgggcttcgctgcgccgccgcctccgacatcgtctcttcgtccccacgagcaaccgataatccgccggcgctgagatgttggtttatcaagacctcccatctggcgacgagctcctgtcggattcattcacctacaaggagctcgagaacggcgtcctgtgggaggtcgagggaaagtgggtcacccaaggtcctgttgatgtagacattggtgccaatccatccgccgagggtggtgaggatgaaagcgttgatgacgcagccgtgaaggtggttgatattgttgacacattccgtctacaggagcaacctccttttgacaagaaatcatttgtctcttacataaaaaaatacatcaagaatctcactgctgtgttggagccagagaaagcggatgagttcaaaaagggtgtcgagggtgcaaccaagtttctccttagcaagctgaaggaccttcaattttttgttggtgagagcatgaaggacgaagcgtccgtggtattcgcctattacaaggatggtgccactaatccgacattcctctatttctctcatggtcttaaggagatcaagtgctagattagttacccatgttgggtactatatatgttctattgttatagccacaactatagctgccctgcctgaactgaactcaggttttttttaagaaaaaactgtccaagattggattgcttgttaaagctaaatattgttattgacgtgtt

SEQ ID NO: 28511 - DNA, 1215 bp, Zea mays
  Clone ID: LIB4758-019-B6_FLI
ccggggtccctcccctttgtcggtgtcttccccctctctcttctcttctctacaaatctctcttccgcatccgccgcaaaaccctaacctaagcggctcaaccctacgattaccgccgccgccgccccccgctcgcccacgcaagcttgggcgggcctccctcagctcggccaagagcccgaccccctgctccggcaccagcgccgccaccgccatggatatggaagtgtacgagcgcctcaccgccgaaaccagtcactaccgtggcacgcgtttcgatgcgctgatcgggctcgacgaggtggagcctagtgacgaggaagaggatgaggaggaagaagagcgagcggcgggtgccggggctggagacgagctgctctgcccgttctgcagcgaggagctggacgcggtggggctgtggtgccatatggacgacgagcaccgtgctgaggtcaatgccggggtgtgtccaatttgcacagataaggttgatatgaacttgattgtccacatcagctcacagcatcgaggtttcttgaaggataagtggagaaatcagcaaggttcatctggggtgcgttattcaacacttgccttattgaagaaagatctacatgagaggataagtggatcatctcgtgctgccccagtcagcacggtgcctgatcctctactgtcctcttttgttggtagcttttatgaagtcgatttgccaaaggatgctaaaaaagagtccttggttgagacagaagtgagaagtgataacatagagcagagagcagcggagagctttgatgagcctttgctccctgaggtgaaggaggagaaaaccaggaggagccaatttgtgcaggggcttgtcttgtccctgatgtttgatgacatcttatgaagagcacatcccaaaaggggaagggagaaggcatattttgctaccagcaaacgtttcgccggcacagctgttgtaacgattcgctgatttgccatcggaagatggtgacattgctctgggataatgggggagatgaactgtggatatggatgtttcgtagtactatgcatcatcattgcatgaataatagagtatatgtatgtatagtttgttagcatcatggtactggatattctggggctctgtatgtatattgggaggccgaaatggaccctacctatcataaatcagccatttgataatgtgcatgtggtgtttttctc

SEQ ID NO: 28512 - DNA, 1049 bp, Zea mays
  Clone ID: LIB4758-020-D4_FLI
ccgggcctttttttctctcatccgaattcccaggcaggcaggtcggcgaggagggcaggaagaccgaagaccgagccgtgcgggggctcgggacgggaacgggacaggaccccaaaatctcagatccttcctgcccgcccgcccgtgcccgtcgacgcgtcgttcttgccggccgcgccccacctccgccctctcctcctccagggggatcggatacgccacaggctgcgcgatggtgctgtgggtcttcggctacggctccctcatctggaaccccggcttcgacttcgacgacaaaatcctcggcttcatcaagggctacaagcgcacctttaatctcgcttgcattgaccacagaggcacaccggagcatccggcgaggacctgcacgcttgaaaccgacgacgaggccatatgctggggaattgcatattgtgtcaagggtggtccagaaaaagagctaaaagcaatgcagtacttggagagaagagagtgtgagtacgaccagaaaatatccattgatttctacaaggaaggagatcccttgaaaccagctgtgacgggcgtcttagtgttcgtttccactccagatccaattggcaacaagtactatcttggccctgctcctctgcaggatatggcaaggcaaattgctacagccaatggccctactggctataatagggattacctgttctcaatggagaaggcattagccagcattagccacgaagatgattcgatcatagagcttgcaaacgaggtgaggaaggtgctcaacagaacaaaggagaccaagatcactggtgccaatgcttccctgaaatcacatgcccctcttgtgcacctgtccgcgcttccagaaggcaccgttgtggactcgagatagcgacctctactcggaatttactttcagctcttgcatgtttgtggttgtggccatcatgtactgattttcccttttcaacagttgtcgtgaggctgtatcgtctggagtaaaaaaaaatgctaaaagccggcactaataatgatattaacttgaaaaagac

SEQ ID NO: 28513 - DNA, 776 bp, Zea mays
  Clone ID: LIB4758-020-F2_FLI
ccggaagcaccgaagatggcttgacgcccgaatccagaccctcgtctgttatggcggcggcggaggcggcgccaccgccgatactcgagctggacccgtcgcacgatcgagccgtcagcgttgtcgaggacatcgtgcgtctagagcggaggatctttccgaagcacgaatcgctggcgcggtcactgcacgacgagctaaagcggcggaactccgggctgatctacaagacgtccagcgccgacgggggggaggtcatcgggtatgccatgtacacctgcaacacatccctctgcgccaccatcaccaagctcgccgtgaaggagaactggaggcggcagggccacggcgaggcgctgctgtcgggcgcagtggagcggtgccggcggcggaaggtccagcggctctccctccacgtcgaccccacgaggacggccgccgtggcgctgtactgcaaggccgggttccaggtcgacaccaccgtcgagggctactacgcgcctcacagggacgcctaccggatgttcttggatctgtagaaccgtcgaggacgagaaaaccagcccatgtgttcagggtagctggccgttctgcagctgctgccggcttgtagctggtctggtctggtgatacaatacctcgtgagtgaggatacagccaacaaccgagcagggtggatgattcgaagctgtaagaacgatctgctagaaagatttcgtacgaccaaagtaatttcccgctggattctgaaaatagtgttgccgtattatatgagc

SEQ ID NO: 28514 - DNA, 1090 bp, Zea mays
  Clone ID: LIB4758-024-H1_FLI
ccgggctgactcctccagtcctcacccctgcttgccgcgaacaaagcacagctccttgcctccgtcaccgctctccgtggccggcgaacatgatgtccggcggtgggtactccgccctcgacgaccccatcaggtttgccgactccaacctccagaccttcccgccgtccgaggccaggggcaagatcgctggcgcctaccgcccgcccaccgacgccgacgataccttctcgtccaagggcggaggagccggaagcggtggcagaggcggcagcgcagggtcggatgatgccgcgcagggcggctggttccgcatgttctccgtggcggcgtacaagccctacttcgacgtcgacacgtctgacgttgtcgagaggatctgggagtccgtcttccccttccgcggcacatttaccgagaagacctccgagaaccccgacctgtatgggccattttggacatgcaccaccctgattttcgttgctgcatctattgctacttttgtcacctacctatcccacaaatggcacaagaaggaatggaactatgatatcaacttggttacctggtctgctgggttattctatggctacgtgacatttgttcctcttcttttatatgttattctcaagtacttgtcagcacctgctggtttggtgcaattgtggtgcctatatggatattctctgttcatattcattccagcatcgcttctgtctattgtgccaatagaaatattcagatgggtgattgctggtgttgctggtttcatgtctgctactttcgttgctgtaaatctccgcgcacacattgtaaattccggcgagcgatggttcctgatcgttgcagggatattcttgttgcagttggggcttgctgttttgctgaaactatatttcttcacgataactgtatagggttatttacatctaatgatcgtactagtcaagaatacacacaattttccatgtggaatcacttccatgttcattgaacattgatgtaatttttccatgtatacatctttcttacacgtagaattgagaagcccctgaaattgaattacagcagccaaacaagtacacatgtg

SEQ ID NO: 28515 - DNA, 564 bp, Zea mays
  Clone ID: LIB4758-025-F6_FLI
ccgggaccgacgacaaataccgcaaaaatggttgccgcaaagaagcatgtcccgatcgtcaagaagcgcactgcgcagttcaagcgtcaccagagtgaccgcttcgaccgcgttggcgagagctggaggaagcccaagggtatcgacaactgcgtgaggagacgcttcaagggccaggctgttatgcccaagattggctacggttccaacaagaagacccgccacatgatgccctccggccacaaggctttcctcgtcaacaacacccgcgacctcgacctcctcctcatgcacaacaagacctacgccgccgagattgctcacgccgtctccgccaagaacaggatctccatcgtctcccgcgcgaaggagctcggtgtcaaggtcaccaacggcaaggccaagctctccactgaggcataagcgtgaagcgtgtgttatttgcggtaggcgaacggctgggatgaaattttgggcgtttgcatcggctttagacgagtgtgcattgccagcacctagctagccgaaatgaaagaggccgaacaaaaaagccatgaacccact

SEQ ID NO: 28516 - DNA, 747 bp, Zea mays
  Clone ID: LIB4758-027-G3_FLI
ccgggagagcattagtgagctgttgcaaaaagcaaaaaatatcgtctagcatcagtagcatccccctgcagtgctggccacataatggcgaataagtccgctgccgctgctattctgctcgccgccgccgtgctcggctgtcttgtctcggcgtcgctcgccgaccagggcaccgccacctactacaccgtctacactccgtcggcgtgctacgggaaccaggacgagggcacgctgatcgcggcggcgagcgacgcgctctggaacggcggcgccgcgtgcggcgccatgtacacggtcacctgcgtcgggggcaccaacgagaccccgaacccctgcaaccccggcgcctccgtcaccgtcaagatcgtcgaccgctgcccgtcgcccggctgccaggccacgctcgacctctcccagcaggccttcgccaccatcggcaacctcggcgccggcaagatcgtcatcgactacagccaggcgtaagatacatgcatgttgtgggaagaagcacgaactatacgtacatacatgcaaaagattcattcaagcttatatatattattcggggatgagttagtaaatactaagcaataacaaatcatgtcgtattagtctcaagctacgactatacaatcctagtgcaaacaagtgatttgtttgctgaaataatgatctgcaccatacgagtgtgcgtgtataatcgtacctttggagaaataaataaccgggcagtcgggcttatct

SEQ ID NO: 28517 - DNA, 739 bp, Zea mays
  Clone ID: LIB4758-029-H2_FLI
ccgggatggttccctagccaactatagctgctaatagctgtagctgtacgtgtgtagccgagagactccattatattatattgctcgatctctccatctgaacgtacacacagtccaacacagatggccgccgccaccgccctggtgagcagcagcagcctccgcgccccggcggccttctccgtcgtcgtccgcgcggcctcccggccggcgcctgtcgtcgcagtagtgacgccgctgcccgcggccaaggcagctgccgcccgcggcgccaggctgcgcgcgcaggccacccacaacgtcaagctcatcacgccggacggggaggtacagctcaagatgcccggcgacgtctacatcctggactatgccgaggaacaagggttggacctgccctactcctgccgcgccggcgcctgctcctcctgcgtcggcaaggtcgtctccggctccgtcaaccagttcgaccagagcttcctcgacgacgaccaggtcgccgagggctttgtgctcacctgcatcgcctaccccacctcggacctcgtcatccagacgcacaaggaggatgcactcgtcgagtcgtactagtatagtcagcaattaatgcaccacgtacgcacgctctccttgcattgttgcatgcatgtaataataataataacgacgccgccatgtaataataactaactatacatggtcctcatgcgtatgcataccagatgtatgagagcagtatagc

SEQ ID NO: 28518 - DNA, 942 bp, Zea mays
  Clone ID: LIB4758-031-B6_FLI
ccgggatttcgaagcccaccgaattccctgcgattcctctcccctcgcctcctcgtctccccctaggggatcgtcggagaggaatcgcaaagagggccgtctcatccgagttaaggaagccatggagcacaaggaggctgggtgccaggcccccgagggacccatcctctgcatcaataactgtggcttcttcggcagcgcggcgaccatgaacatgtgctctaagtgccacaaggagatgataacgaagcaggatcaggccaagctggctgcctcctctatcgacagcatcgtgaacggcagcgacgccgtcatggagccggttgttgctggcagcaacacggtagtagctgttgcccaagtcgagttgcaaacaatgaacgtgcagcagcccgctgatgttgccggacccagcgagggggtggcggcgatctccaaaggggggaaggtagggccgaaccggtgcagcgcctgcaggaagagggttgggctcacgggattcaactgccggtgtgggaacttgtactgcgcgctccaccgctactccgacaagcacgactgcaagttcgactaccggactgctgccagggacgccattgccaaggctaatccggtggtgaaggcagacaagctcgacaagatctagggggggttccctacggttggtgtcaggaagattgtaaaccgcggtaactcgtcatgcggaactgctgccttgccccccgcgcctttctcttccatgtttgctgctacaatcttgttgttgggcattgcagtgcacggtgcacacttgtgtagcccgcctccgagaattctcctgcctctgcatctggtcagttcaaaaatgatttgcatgttggctatgttgtgtaagctctatttatggtggtctcgctgagacgggtatttggcttcgcagttatctagctatgtgatgtaaat

SEQ ID NO: 28519 - DNA, 1023 bp, Zea mays
  Clone ID: LIB4758-031-E7_FLI
aaggcgaagccctagccccctccctgccgcggacgccgatggacccacctcgcgccgtcgcctttcttctcatactcctgcccgtgctcgccccggtggcctccggtgtacctttcgtcgtcctacacgggattggcgacgagtgcgggaacgatgggctgtcatccttcaccaagatgcttggggagtggtcaggctccaagggttactgcattgaaattggaagaggagcatgggactcttggttaatgccacttcaagagcaggcaaatacggtttgtaagaaggtcaagaaaatgaaagagctcagtgaaggttacaatatagttggcctgtctcaggggaacttaattggcagggctgtaatcgagtactgtgattgtggacctccggtcaagaatttcatatcaattgggggtcttcatgctggtacagcttcagtgccactttgtggtgatatggaagattatttgaagggttgcaaatttcttccaaaacttaacaatgagatcccaagtgcaagaaatactacctataaagaaagattcagcagcttggaaaacttggtactgatcatgacgaagctgtatacagaagattggattggcttgaagaccctggacgaggctgggcgtgttaaattcgtgtctgtgccaggaggtcacctgcgtatcaccagaagcgacatgaagaagtacattgtgccttacttgacgccggaggcgtcatccaagaagaacatacacatacaccggatgctgtcgctttgagcgagtatctaacaaggtttgtatcggtggccattgtgccctgacacgtgggccatgtgttgacgccttgtaaatacgctgaacacgaagggaggaaatgatagctccttggaagagtggatccgaacttgtgaagtgaagcgtgtttggtcctttccgtttcctatctgacaaacaaatatgtccatgccgtggccacaacacgcataaatcattatgcacatttcctattgagtaaaatacaattccggtc

SEQ ID NO: 28520 - DNA, 722 bp, Zea mays
  Clone ID: LIB4758-031-G10_FLI
ccgggacctggttctccgtccggtcagaccaatcaacaaagtgacgcgagcacgagcatccatcgtttccccttcttccccatcgcgtgccctcgccgcagccatcttccatggcggaccagctcacggacgagcagatcgcggagttcaaggaggccttcagcctcttcgataaggatggcgacggctgcatcactaccaaggagcttggaactgtgatgcgctcccttggccagaaccccactgaaggacaccgactccgaggaggagcttaaggaggcctttcgcgtcttcgacaaggaccagaatggtttcatctcggctgctgagctccgccatgtcatgaccaacctcggcgagaagctgactgacgaggaggtcgacgagatgatccgtgaggccgatgttgacggcgacggccagatcaactacgaggagttcgtcaaggtcatgatggccaagtgaggagcgatccccgttatctatgaatgaattgaagtgaaatatcaggcacacaagctgtactttgccatgtcccttttgagtacacatcagtatcatgcaggaggtaatgtctagtagtggtcggtttaggtggtgtagtcatgggaactcgacatcagatacctggtctcttttgattgtgatgttatcttgcattattgctcctgctggagcttttaggatttgttgtaagctcatattttcagggggttttggat

SEQ ID NO: 28521 - DNA, 961 bp, Zea mays
  Clone ID: LIB4758-032-B6_FLI
acgcgacgacaccggagggttttctgcggggatttgtttgtcgccaactcgccggcagccaagatgaggccggtcttcgtggggaacctggactatgacacccgccactcggagctcgaccgcctcttctaccgctacggcagggtcgagcgcatcgacatcaagtcaggctatgcttttgtctactttgaggatgaacgtgatggcaatgatgctatacgggctcttgatggttatccatttggccctggcagacgcaggctttcagtagagtggtcacggggtgagcaagctggtagacgtgatggcaacaaaccagaagcaaatactaagccaactaggacactgtttgtcattaactttgatccaatgaacacaagagtcagtgacatcgaaaggcacttcacaccatttgggaacatatcaagtgttcggataaggaagaactttgcttttgttcagtttgaaactatggaagaagcaagaaaggctcttgaagctactcatgctaccacccttttggacagggtgatttctgtcgagtacgccttcagggatgatagtgaagtgagtgataggtacggcagcccaagaagaggtggtggctatggtaggcggggtgatagcccagtgtaccggtcacgtcctagtccagactatggtcgcccagcaagtcctgtatatggttcatatgacggtcctggtcctgttcgtgatcgctatcggagatctcttgcttatcgatcaaggtccccacctgcgaaacgaagagcatatgactaatcgagaaccctctctgttatgccatatatggcctaggaacaccctgtagcaagaacttactgtacctgtaccggagcgtcaccttaatgtccttaaattcccgtgtttaatggtctgtacatggttatgctatgcgactgtcaggtttcactgcatgcaatattgtcatttggctgct

SEQ ID NO: 28522 - DNA, 713 bp, Zea mays
  Clone ID: LIB4758-032-F6_FLI
ccgggcttgcgacaaaagttttagttccagagacaaaactgaagaaagaactgggagagctagcatggcaagttcgcgctgctttgagaacccgccggcgctggagccggccagcggaggaggcgaggtcgttgacgacttcggcgggcagaaggcctacgtcagcggctccgccgggtccaaggccgccgtcgtcctcatctccgacgccttcgggttcgaagcgccaaacctgaggaagatagccgacaaagttgcttcgctcggttacttcgttgtggtgcccgatttcctgcatggggatccatatgaccccagcaataatgcccatagcaatcctggaacgtggatacagtcgcacaatccgcaaacggcattcgaagaggcaaaaccggtaattgcggctataaaggagaagggtgtgtcgagcatcggagctgcaggttactgttggggcgcaaaggtggttgtggaactggcgaaagttcacgagatccaggctgctgtgttggcacacccttctttactaagtgtcgatgatatcaaagaggtcaagtgccccatttccatacttggagctgaaatcgacaggtcagccccgcctgaattgctaaagcagtttcagcaagttctttcagcgaaccccgaggtcgatcactttgtcaaggtttttcctggcgtagcgcatggatgggctgtgaggtacagcgacg

SEQ ID NO: 28523 - DNA, 1559 bp, Zea mays
  Clone ID: LIB4758-033-F2_FLI
ccggacctcgacgcgcctccaaaagttcggagccgccggcccgtccgcctccctctccgcctcccgtccccaaggccaatagttttcaagtggcaatggcggaccaggctaaccaacccactgtccttcataagctcggtggccagttccacctgcgctcgatcatctctgaaggtgtacgggcccgtaacatatgcccatctgtctcatcttatgaaaggagatttgccacaaggaactacatgacccagagccttttgggcccttcgatgtctgttagcggtggcatcaatgtcccagtgatgcggaccccgctctgtgctaatgctcctgctgagaaaggaggcaagaacttcatgatcgatttcatgatgggcggtgtttcagctgctgtttcgaagactgctgctgctcccatcgagcgtgtgaagctgcttattcagaaccaagatgagatgattaagtctggtaggctatcagagccgtacaaggatattgttgactgcttcaaacgtaccattaaggatgagggtttctcttccttgtggaggggtaacactgctaatgttattcgttacttccctactcaggctttgaactttgcatttaaggactacttcaagaggttgtttaacttcaagaaggatagggatggttattggaagtggtttgctggcaacctggcctctggtggtgctgctggtgcttcctctttgttttttgtgtactccttggactacgcgagaacaaggttggccaatgatgcgaaggctgccaagggaggaggtgaaaggcagttcaatgggcttgtggatgtctaccgcaagacactcaagtctgatggtattgctgggctttaccgtggatttaacatctcctgtgttggaatcattgtttatcgtggtctgtactttgggctctatgattccatcaagccagttgtccttactggcaacctccaggacaatttctttgccagtttcgctctgggttggctgatcactaatggtgctggtcttgcatcttaccccattgataccgtccgcagaaggatgatgatgacatctggtgaggctgtcaagtacaagagctccttggatgcgttccagcagattcttaagaaggaagggcccaagtccctgttcaagggtgctggtgctaacattcttcgtgccattgctggtgctggtgtgctttctggctatgaccagctccagatcctcttcttcggaaagaagtacggttccggcggtgcttaaatggagaaatatgatgacgaacaagagcagtgtgtgttcccggtcctttccaatcaggatctggtgaagtttttgcctttcatatcgaagaaattaataattcatgtagagggaggattcttccaacaatttgttttggatggagacttagatctccaaacactcgtaactatcctactaggtggtgacatcagtccccaaaaacatttatggtcatagagtctgcccttcgtttgtcagtcgggcaatttttcttgcatacaatgccttcgtttaagtatcggatgagttgctgcgact

SEQ ID NO: 28524 - DNA, 776 bp, Zea mays
  Clone ID: LIB4758-034-E9_FLI
ccgggccatttcgaagcccaccgaattccctgcgattcctctcccctcgcctcctcgtctccccctaggggatcgtcggagaggaatcgcaaagagggccgtctcatccgagttaaggaagccatggagcacaaggaggctgggtgccaggcccccgagggacccatcctctgcatcaataactgtggcttcttcggcagcgcggcgaccatgaacatgtgctctaagtgccacaaggagatgataacgaagcaggatcaggccaagctggctgcctcctctatcgacagcatcgtgaacggcagcgacgccgtcatggagccggttgttgctggcagcaacacggtagtagctgttgcccaagtcgagttgcaaacaatgaacgtgcagcagcccgctgatgttgccggacccagcgagggggtggcggcgatctccaaaggggggaaggtagggccgaaccggtgcagcgcctgcaggaagagggttgggctcacgggattcaactgccggtgtgggaacttgtactgcgcgctccaccgctactccgacaagcacgactgcaagttcgactaccggactgctgccagggacgccattgccaaggctaatccggtggtgaaggcagacaagctcgacaagatctagggggggttccctacggttggtgtcaggaagattgtaaaccgcggtaactcgtcatgcggaactgctgccttgccccccgcgcctttctcttccatgtttgctgctacaatcttgttgttgggcattgc

SEQ ID NO: 28525 - DNA, 591 bp, Zea mays
  Clone ID: LIB4758-034-G3_FLI
ccgggactactgacgagctcgccatggcctccctctcctctgccgccgtcaccgccccttccttcgccgcacccgcaccagcccgcgccgtggtcagaaggaggtccttcaccgtgcgcgcctctctccgcaaggccaccggcaccgccgccgtggcaatggctgccagcgccctgcttgccggcggtgccatggcccaggaggtgctgctgggcgcaggcgacggcgggctcgtcttcgagcccagccagttcaccgtcaaggccggcgacaccatcacattcaagaacaacgccggcttcccgcacaacgtcgtcttcgacgaagacgaggtgccgagcggcgtcgacgccaccaagatctcgcaggaggagtacctcaacgcgccaggcgagacctactccgtcaccctcaccgtgccgggaacctacggcttctactgcgagccgcatcaaggagccggaatggtcggcaagatcaccgtcaactaattaagctagctatcgatcgatatccattcatgtattagctgttgcttcctgctttgtactccgccgatctgtccatctctacatgttttcgtcttcacac

SEQ ID NO: 28526 - DNA, 772 bp, Zea mays
  Clone ID: LIB4758-044-A7_FLI
ccgggaagaaaagcctccattcccgagtctccagccaactgcatccagtccacccccatccccctcgaccccgacaaccccgacccgatggcgcccaaggccgagaagaagccagcggagaagaagccggcggccgaggagaaggcggagaagacgaccgcaggtaagaagcccaagtccgagaagcgcctgccggcctcgaagtcctccggtaaggagggcggcgagaagaaggggaagaagaaggccaagaagagcgtggagacctacaaaatctacatcttcaaggtcctgaagcaggtgcaccccgacatcggcatctcctccaaggccatgtccatcatgaactccttcatcaacgacatcttcgagaagctcgccggcgaggccgccaagctcgcgcggtacaacaagaagcccaccatcacctcccgcgagatccagacctccgtgcgcctcgtcctcccaggagagctcgccaaacacgccgtctccgagggaaccaaggccgtcaccaagttcaccagcaattgagcagcctgcagcgtccacggatttgttaggtctccccttcttacaagggttcttcgtcgtgtcctctacccctccccctccccctccccgcctatgtatgtgctgtgaaatcgttgatgttctcgtcgggtgaacaaaggccagtagctagcttgcctgcttcataaatcgtgccggattgtaatgggcctcgtagatttgacgcccctattttggaatatagttgtatcggtgcctc

SEQ ID NO: 28527 - DNA, 1009 bp, Zea mays
  Clone ID: LIB4758-044-C12_FLI
ccggggttcaagcccacagaatccaccaagccacggcgtcaccgccagcgctactgccatctcggggaaggaaccgaaccgacccctgaaaagaattcggtgcgtcggaaggaagagcaaccctgcggtggtggagcgaggacccgggttgagggatgtggtgggagtgggagggcgacggtggtgaggcgccgcgggaggagactcctgtggacttcgatttcatcgccctcctcgccaagcccaaggattactacaagatactggaagtagattactatgcgtctgaggagacgatcaggtccagctatatccgccttgcactgaaatggcaccctgacaagaagcaggggcagggcgaagagaattcaacctccaaatttcaggaaattaacgaggcataccaagttctgagtaatccagcaaaaaggcaagagtatgacaaaaaaggcattctatacgttcaagatcagaatgtagtggattacctgaaccggcacaaggggctaatacttacgtgcaatggtcttggtataaggtactcagtatggtgaacacgctcaagggcccacagtttgcactcatctgcagtcttggagaatctgtaatgtatgccatcaaaatttattttcatcccttgtgtgccatagaatggcatatatggatttttgtgtgtatgacaggtggggccagtggggatgaaaataatttctgatgacatacagggaagcctttgatctgaaaatggtatagtgcagcagtgccatgtttgaaagccaaatattgaccacttgagttcatcctacaaggctacaacagagttgatttttatttgtcgatcagctgttgttgaatgaaagaggcagatatgttcctgctgctccttgtatgtaacatactgttcctaaccatgcaatgtaagcgtttgtttctgtcttggcgctttgtattgacgttatgtggacctgaatgtctgtggaaaaacagagtggtatcatgctccttcccc

SEQ ID NO: 28528 - DNA, 1646 bp, Zea mays
  Clone ID: LIB4758-044-E12_FLI
ccgggacttgctcctcatctacttttctcctccgccttccactcatccttgctcctgcctgccgtcgtgcatcatcatctccggccagggccagggcattcgtctccgcctccggtccggcctcctccactccgcgcccccccagacgcgtcgctgcgtagctgctggccgccatggccaccgtcatggccgcggccgtctagtccttcccgtcctcctcggccgtcgtcgccaaggcgtcgccggcgtccccctgtgccgccccgcacttccgcccgagggccgtgcgggccgctatccgggcgcaggcgtccgccgtcgaggcgcccgccacggccaaggccaagaaggagtccaagaagcaggaggagggcgtcgtcaccaacctatacaagcccaaggagccgtacgtcggcaggtgcctcctcaacaccaagatcaccggcgacgacgcgccgggggagacgtggcacatggtcttcagcaccgaaggcccttctttgcctgcgcgaggtctaagaatccggggggaaaagaaaagagaagaaaagatgatgactgtctctacctcttgctacatgtgccgctccctcgtcccggctcctccgctcaaatccaggagtgcagtgcgctgtccaagcgccgcaccgccaggtgctagcggtgccacctccaccttcaagcttgtcctagaggtgaaagaacggctagcaagggagcacccaggcctccccacgggcaggaacgggagggacgatgacgacatggtcctctggttcctaaaggaccgcaagttctccgtcgatgaagccgtctccaagctcaccaaggcgattaaatggcgtcaggactttggtgttgcagagttatcagaggaatcagtgaaaagcctgtaccaaactggcaaggcatatgtacatgattccttggacatttatggtcgacctgtgctgattgtagtggcagccaaacattttccttcgacacaggatccagttgaaaaccagaagctatgtgcctatttggttgagaaggcagtcaacagacttccgccaggagcagaggatatacttgggatctttgatctgcgaggctttcgggttgaaaatggtgatctccagttcctaaagtttttgatggacgttttttactattactacccgaagcggcttggccaagttctttttgtcgatgctccatttgtttttcaaccaatgtggcaggttgttaaacctctattgaaatcatatgcctccctggtaagattttgtgatgccgagactgtgaggaaggaatacttcaaagaagaaactgtgcctcctgatttccgcgattagaaatgtgcaggtggtctcggaaacatgacctttaattgattcagaatcgattggcacccaggggggctggcgccttcctataccttttgattaacttctcaaaagttgctcagacggcagcaaacgattggagagtccagtaaaaaatgaccctgtacttgtataacttctgcgaagtagaatgctgagtttaggctggtgtctggagtgctcctgtaccatatttttctggttttggatgaagctatatggaccaaattcatctctgttgaacaattgccaattacataacttgtgtttgcccaattc

SEQ ID NO: 28529 - DNA, 1297 bp, Zea mays
  Clone ID: LIB4758-044-G10_FLI
ccgggtctctttttgtccttgttcttctccgtcgccggtgcgctcgcctcctgcctccctccccctttgcgagcgatcgtgaggggatcgagatggcctcagcctcacaccaatccgagcccctcgactccgctgccaccagcgacaccgacgccccctcagataacatcccagaattaccatgccccccctgtcatatcgttaccaaacctggtcaactcccagtcgagtttcttgaaccctcagctgcccagaagttggtaattggatttgactgtgaaggtgttgatctctgtcgcaatggtgctctctgtattatgcagcttgcattccctgacgctgtttacctagttgatgctattgagggtggaaaagaacttattcaagcttgtaagcccgcacttgagtctgatcatatcaccaaagttattcatgattgtaaaagggacagcgaggctttgtattttcagtttggcatcaaacagcacaatgtgatggatacacagatcgcttattctctgatacaagagcaggagcagaaaggaaaaaagaagacatctgatgattacaattacatatcttttgtcagtcttcttgctgataaacgatactgtggcataccatatcctgaaaaggaagaagttcgtatccttctaaggcaggaccctaacttttggacaattaggccattgtctgatatgatggttcgagctgccacagacgatgtccgcttccttctcaatatctacgagaaaatgatggaaaagttaaacaaagtatctttatggcgtctggcagttcgcagtgagctgtactgtaggtgcttttgcttaaatgacaaccagtttgcagattggtcacctcttcctcctgttcctgatggcattgaagctgatgtttatgttcctgaaattgatatcctatcagtcttagatgttcctcatgggaaaatgggacgagttattggcagaaaggggtcaacgataatggttgtgaaagaatcttgcaatgttgaaatccatattggtggtgctaaggggcctccagacagggttttcatcattggatcagtgaatgaagtcaggaaagccgaggccatcttcagaggccgaatgctggagttctagagatgttaccctttgcgccccatgtttcgactgctttatatcttttgaacgcaagaagggggaaatacacaaaaggcgtatgcggtgccgtggatctcttgcccatccgtgaatcatgtgaagaaagtataaatgatttcaacttggcttaaaaaagaaaaaaaaaaagc

SEQ ID NO: 28530 - DNA, 924 bp, Zea mays
  Clone ID: LIB4758-044-G4_FLI
gccgggagttgaggagttgagttccgctccgccacaccaaaaagaaacaaaagcctacggcgatcgatcgagaagctggtcatcgtcaggatgtcatcgccgcagtcagcagcgccgcccgtgaagctgatcacggcgttcggcagcccgttcgcccaccgcgtggaggtggcgctcgctctcaagggggtgccgtacgagctggtcgtggaggacctagccaacaagagcgagctgctgctcacgcacaacccagtccaccagtcggtccctgtcctcctccacggtgaccgcgctgtctgcgagtccctcgtcatcgtcgagtacgtcgacgagaccttccaccatggcgcggcgccggggatcctcccggccgacccctacgaccgcgccaccgcccgcttctgggctgacttcatcgacaacaagtgcttgaagccgatgtggctgtcgatgtggacggacggcgaggcgcaggcgcggttcgtcagggagacgaaggagagcctgggggtgctggacgcgcaactccaggggaagaggttcttcgccggcgacgcgctcggcttcgtcgacctcgccgcctgcacgctggctcactggctaggcgtgctggaggaagtggccggagtgcacctgatagcggcggacggcgagtaccccgctctgcgccgctgggccaaggagtacgtctccgatgaggtcgtgagccggtcgctgccggacagggacgagctcgtcgccttcttcaccgccagcaaggagaggtacaagtcgtgggtcagggcagaggtggagcgacattgatcgctaaaaatgacgctggttgttgaactctgtacgttctcttgtagtcgaataatgtgtggatcgttatgtacgtatttcatcgtgttatatacatctaataagacatgcaagcct

SEQ ID NO: 28531 - DNA, 1433 bp, Zea mays
  Clone ID: LIB4758-045-F3_FLI
ccgggagtctcctctcctcaccttgccaggaacccaggaggaggagggatacagcctgaataacctaggtgcaaaggcatggtgtggaatgtgcaaatctcttaaaagaatcccttcagtccgcagagactatagggaaaaatattggcattagcacgactccaaccaggttgtctgccatagttttgctggagggacaaaaacagaagcgttcctgactctacctcaaggatgagagctgcgtcctccacggtttaccctgtctaccttagcctccaccgccaccccaacagccaccaagcctcttttcgtccctcgagagcaaaccatgacaacacccataaatgtaccaagccacccaaagttcttagacggtctctcttctccctgcctgcctcatttcttctcctccacacatcctcctcccttgccgtagatgacgcaaacatgccatctacctcaacaattgacaccacgatcacagatcgcatcttcatggacttcagcgtctgtccaagctactttcgctcagacagacctctaggagctgagctttcctcgtgccctgattccgagcctcttggtcgtgtcgtctttggtctctatggccggcttctccccgtcactactgccaatttcaaagctacgtgtactgcagctgcatataggggcacccttgtccacaagctccttcagggacagttttttgctgctggtcgacaaggtcctcggcatgacaagggtgaggtccagcctccctctggcctcgttaggaattctgagactgttaaccctaaagcgttcgagctaaggcatgcaaggcctggcacgctttcgttatgccttggacagaatgacgatgatgacgacatcaagctcaaccccaattatcacaatcttgaattcttggttactacagggccaggaccctgtcctgagcttgatggccagaacatcgtctttgggactgtattggaaggaatggatgtcatcaccagcatcgcaaccatacctacctacaaaccagctgaaaggatccgcctcttcaacggctttgcgcagttgattggtgatggaagggctcaaactgcccgggctatgtgggaccgcccgcttaagaccgtgtatatcagcgactgcggggagctgacagtaaccaaaccatctctttcccctccaggcttgccatgactgccagtgtaatgacactacccacatagccagttttctgtctctgttgcttgggtcctctttctgtactctatatatgcagtgtatatattacctgtgttattaaacttatgcatgttccatgagctgtatatatatcgcttccgttgttaatttatgcatgttccctttgacaatgactgtacttgatgagtacatggatgttaattatatggtcaaggcctaatcaattatagagtcct

SEQ ID NO: 28532 - DNA, 744 bp, Zea mays
  Clone ID: LIB4758-045-F6_FLI
ccgtgataaggtacgtgccgacgcccgttgccttctcaccacaaatcctccaatttcttgtcttctccgcgaaatgttcctctgtctgtcgtgtatttgttctggtcgtttcccgattcggtagttggcttggggatttcactgcaagtctagggattttctgtagggaagttgatcgagaagtcttggtagacatggagcagatccagtactccgagaagtactacgacgacacctatgaatacaggtagatgtgaaaccctcgccttcacgatcttcacccttccacatcttttccgtcatcggtggttggcaaaaccctatcgggatcccctttatccgcgcaggcacgtcgtcctcccgcccgaggtcgccaagctcctccccaggaacatccttctctccgagaagcagtggcggttggtgggtgtgcagcagagccgcgggtgggtgcactacgcgatccaccggccggagccgcacatcatgctgttccgccgcccgatcaactaccagcagcaggaggaggaagcggctgccgcgcatgtgctgcccaagtgaagcctctgctggcgaccaggaatgttaaaaacccctagccctcttttcatctctaaaaggggcgtcgctgttgtgttgattaatccctctggctgttgattggaaacttgggatctagttgggtcgacttggtgtgtgcgtggcgctctgtttgtgctgacatttaatctgtgcgatttgatc

SEQ ID NO: 28533 - DNA, 885 bp, Zea mays
  Clone ID: LIB4758-046-G3_FLI
ccgggcttgctagaaccttgcgagttccgactccctcgtgccatcgttttgtgtcggattgcaaccagaatcgttccactaatcaaagtttatataaattagagaagcaaatcgttccgaccaaccaatcggacggaaacgaacaaggcctcactcatctccgtccgtccgccgcaccgtcgccgagcgccgctccgcgccggagacgtcctgtttttttgccgcctacgagcgctgtccctcttttctttccgcggttctgccccaacttctgcatccgaatctcccacgaagttgtcacggcgatggcagcgaccggcggcgtttcaactgacgatatcccgatcctgcaggcagagaacctcaccagcaacgtcaagtccgtccactacagtcgaacattcttgtcgatcattggtggagttgttgctggaatctggggattcacaggcttgacgggatttgtcttctactttctgataatgatggttgcatctatcgggctcttagcaaagtcaaagttttcagtgcagacatacttcgatagttggaccaggatttcaattgaaggagtttttggtggccttatgtcattcgtgctgttctggacatttgcttatgacattgttcatatcttctgatggacgtagaaagagctaccctccaaagaaaatatggaatttcatctgatgtcgaacattcccaatgggctctttgtacactcagtttttattttggtaattgttgatataatattttgtgatactatatcgttggacctaagcagagctcataaactgatgtagcaactccttcgcttggatgatctgtagcagttgtgatttgtcatttccagtaatgaatgtaaactttgattgatggacg

SEQ ID NO: 28534 - DNA, 856 bp, Zea mays
  Clone ID: LIB4758-047-A11_FLI
ccgggactccaaaccaaagccatcggaggagcagctggacgaccatggcctcgccgctgctcaagtcgcactctcagctcgccgccgccgccgccctgcactccgtgaggagagccgaccgctgccctgcgacaatacacctgggcaagttccatgaccacgggctcaggtccggtcgttctaagagatccggtttagcgaaggtgggcgccttcccgtcgctggacgtggtgccgctgatggtgacgatggtggagcacgtggacatgtcgcgggactacgtcgtgaccaagtccatctggcatctcagcgacgtagccctcaagagcgtctataccttctacgccatgttcaccgtctggggagtctgcttcttcgcgtccatgaaggatcccttctacgacagcgagacgtacaggagccagggtggcgacgggaccgtgcactggtactacgacaggcaagaggacctggaggcgtctgcgagggaggagctgctgcgggaggagctgctcgaggagattgagcagagggttgggggcctcagggagctggaggaagcgagcaaggaggagcagctcacaaagtgatcacgcgggcgaataccgaatgggatggatacgggctactcatcagctctctatctcagcttcgttagcaaataagttcaggcttctttactgccctgctcaagtctgtatatggccaaaaccaaaaaacgattgatcaactgcgctactgcagtgcaatagcaggatacgtatagttttttttttcaagggaaacaggaggggagtgcagtgcacccccgcccatactgcatgttattaataaaagaaagttatttacagaatct

SEQ ID NO: 28535 - DNA, 725 bp, Zea mays
  Clone ID: LIB4758-047-B2_FLI
ccgggagctcagtctatcattccattgtctggtcatttgtccccggccggcacgtaataatcaccactatggccagcggacggagaaagagcggcattccagctctggggtggtggctcatggcagtcggcaccatccgctccgccatcgtctggtcctgcctcttcagttctgcatcgctctgcttggccgtctaccccgagatgaccggcgtgcaggagcgagctatggctgcgtggactctgctatcctgcactctcagcttcctgtgcgcgttcaacatggagagcaagccgctctacgtagctaccttcatgtccttcgtctacgtcgccggctacctgctcgtggagtgcttcttctaccacagcgtccgtgcagccagtatcgccccttactgcttcatcgcagggacatccatggtttggatgctgcttcaatggaactcccatggccgtggccgccgtccccgtgaggctagcaagcagccctgatccaatcatccaagctggttcttttgctatcgataattggcgtctgctactataccgacgatgaataaacatttatttacaaaaaatgtattatatatataagatgcacaccgagttccgttgttgctgttgacttgttgaacgtaagaagtgacgactagaatgggtgtcgtctaagttgagttgtattgtaccgtagcatcttgatataaccctataatctgttgttgc

SEQ ID NO: 28536 - DNA, 815 bp, Zea mays
  Clone ID: LIB4758-047-G12_FLI
ccgggattcattaccggaagagaaaaaaaataactcggaaaaggagacgccgaaaattcgaaaggggaggggaaagcaaagctgatggcggaggaccaggggaacgcaaagcaaatggcggaggaccaggggaacgcaaagcaaatggcggaggccccgagcaagatcgaatccatgaggaagtgggtcgtcgagcacaagctccgagccgtaggttgcctctggctaggtgggatcagcagttcgatcgcctacaactggtcgcggcccaatatgaagcctagcgtcaagatcatccacgcaaggttgcatgctcaagctctaaccctggctgcattagttggttctgcatgcgtggagtactatgaccagaagtatggttcttctgggccaaaggtggacaaatacacaagccaatacctggcccattcgcataaagattaaaggtcgccatgttggttcctgcatgccggattaattttgggctcatctcgggttgctcatgacccgcccatggatgctggatgtttattctttttttgtcttcataattacaaaatggtggtgtacttgccaggcaaatgttaatgagggtataatgcagatattgtcgtcataatttggcctcatgttgcattatctaacctcactttgttgactgtcagcgactcagcgtctctgattttttttatattttttgagagaaggaaaagaaatcccggtttgtgcctaaaatttgagttctatgtgccccgtgtaacttctgttctgtgttcctgtgcttgtatgaatacaagggaaatgcaaaaatgttt

SEQ ID NO: 28537 - DNA, 644 bp, Zea mays
  Clone ID: LIB4758-049-B12_FLI
ccgggatctcttctcccgtcctcccttagctcggagtcggacacccacccgccacgaccaccagaccactcgcttccccgaagcttcagctccgcgcttctctgttcgagctagccagcctccagcaagagcgagcgagcgagcgagcgagggcaacgggcatggcggcggctgtgtccttctcccgggtgcgagctctcccgacgtggtccagctccgtgtccggcgacgacgaccaccgctcctactccgcggcgctggccatgtcggtgtcggtgcggccccggtgtcgcgcgcggtcgccggcgcggatgatgggcaacgtgaacgccggcaaggggctgttcgcgccgctcgtggtggtggcgcgcaacatcatcggccgcaagcgcttcaaccagctcagggggaaggcaatcgcgctgcactcgcaggtcatcaccgagttctgcaagaccatcggcgccgactccaagcagcggcagggcctcatccgcctcgccaagaagaacggagagaagctcggattccttgcctgagacgaccatgttctacgcacatatataagtatataatctataagtactacatcatcaagtagtggccgacaatgataattatattaatatcttcttccttgctct

SEQ ID NO: 28538 - DNA, 759 bp, Zea mays
  Clone ID: LIB4758-049-E2_FLI
ccgggacgttccgtcccgacatagagtcgccagtcctcccacaatctccagccgccactacgcctccctctagctccagccgccactacgccggtcgcagagtcgccagctgccgagacgtcggccgcgtgcggcgtgcctctcgcggtctcgcctcgcgcccggaggccggagcaccgccgcggcgccgcggcgctccctcctgggctgctggcctccttcacattattggagccagaggagcgggcggcggcttgcacgcaccgccacgtctaggcgccaggcggaggcgttattaccacaacattaaaggagatgccttcactccagaaagcattgcctccagaacttgctgataatgtgctcaggttatatcgtgaatgcttacggagggcgaagtatattggccatcagaaacacaatacagaacttttagtcgccatggtgagacaacaattcaagaaaaacatgcatgaaactgatccagagaagatacagaaaatgaaggacgatgctgcaaggggccttatcaatcatattctatatgagtccgagaagattacaggacgcaagttttcaggttaaaaacagaagttgaaactggacttacagtgtgtcgtgctgtatgaataatagtaaaaataatttactttcttgcctttgaatgattccggttctattgtacaaggacctgcaaatgttttttttccttcggattgctgagtagtcgagctattgcagcaatgattttcagtaacc

SEQ ID NO: 28539 - DNA, 1300 bp, Zea mays
  Clone ID: LIB4758-049-H7_FLI
ccggggtgttctctgcgcggtcggcccggcgaacttcctctggttcctgatgatggatgtatcgcaagttgccgcagccgtggcgctgatggcgttcgcggtcgcgtttccggcgtcggccttcccgtccggcttcccgcctgggacaccatcagcgttcccgaatccgtgggcggcattccagaacctgtctggctgtcacatgggggaggagcggcagggcctggccgggctcaaggactacctcagccacttcggctacctcccgccggcgccgccgtcgtcccccttcagcgacgcgttcgaccagaacctggaggcggccatcgcgacgtaccagcgcaacttcggtctcaacgccaccggcgctctggacccgtccaccgtctcgcagatggtcgcgcctcgctgcggcgtggccgacgtcatcaacggcacgtccaccatggcgaggagctcctccgccgacgcccacgcccacggcaggcacctgtacgcctacttccccggcgggccgacgtggccgccgttccggcgggacctcaagtacgcgatcaccgcgacctcggccgcgtccatcgaccggtccacgctgagcgacgtcttcgcgcgcgccttctcccggtgggccgccgccaccaacctgcggttcgcggagaccgcgtcggagtccgacgccgacatcaccatcggcttctactcgggctcgcacggcgacggcgagccgttcgacgggcccctgggcaccctcgcgcacgccttctcgcccacggacggccggttccacctggacgccgcggaggcgtgggtggccggcagcgacgtgtcacgctcgtcggcgaccggggcggtggacctagagtccgtggcggtgcacgagatcggccacctcctggggctcggccactccccggtgccggacgccatcatgtacccgacgatccggacggggacgaggaaggtggagctggaggccgacgacgtccaggggatacagagcctgtacgggagcaaccccaacttcaagggcgcgaccccgacttcgccggcgacgagcagccgcgagatggacagtagcgccggcgcgggatgccgaccagatagagtcttcgtcggagtagttgcggcagttggcctgctcctcctagtcctctagtgccgtagacctctagtgtttgccattttttttcggccacgtccttccttgtatcgatttgttgctcgattagctgattcttggatatattcttgtgtacataatatggttatcactattacagaataatataatatctgatac

SEQ ID NO: 28540 - DNA, 863 bp, Zea mays
  Clone ID: LIB4758-050-D10_FLI
ccggcccatttcgaagcccaccgaattccctgcgattcctctcccctcgcctcctcgtctccccctaggggatcgtcggagaggaatcgcaaagagggccgtctcatccgagttaaggaagccatggagcacaaggaggctgggtgccaggcccccgagggacccatcctctgcatcaataactgtggcttcttcggcagcgcggcgaccatgaacatgtgctctaagtgccacaaggagatgataacgaagcaggatcaggctaagctggctgcctcctctatcgacagcatcgtgaacggcagcgacgccgtcatggagccggttgttgctggcagcaacacggtagtagctgttgcccaagtcgagttgcaaacaatgaacgtgcagcagcccgctgatgttgccggacccagcgagggggtggcggcgatctccaaaggggggaaggtagggccgaaccggtgcagcgcctgcaggaagagggttgggctcacgggattcaactgccggtgtgggaacttgtactgcgcgctccaccgctactccgacaagcacgactgcaagttcgactaccggactgctgccagggacgccattgccaaggctaatccggtggtgaaggcagacaagctcgacaagatctagggggggttccctacggttggtgtcaggaagattgtaaaccgcggtaactcgtcatgcggaactgctgccttgccccccgcgcctttctcttccatgtttgctgctacaatcttgttgttgggcattgcagtgcacggtgcacacttgtgtagcccgcctccgagaattctcctgcctctgcatctggtcagttcaaaaatgatttgcatgttggc

SEQ ID NO: 28541 - DNA, 1385 bp, Zea mays
  Clone ID: LIB4758-050-G5_FLI
aaaaaaaaaaaaacaacagacaatctaccccaccacacgcacatacacacatcctcctctcaactcaaggtctcaagcagactcggaccaccccacctcatcgcgcgcttagcctttctccctttgtctccactcccgaccgcgatcgcgcgcgcggcgttcgtggccacagacccagcaagccttgcactcgttgcaccaccagccggcggcgaccgcgcgatgagggccaggaaggcgaagacggcgacgtcgtcgttctggaggtcgctcctgggcggctgcctgggcggcggcggcggcggagggcgggcggcgggggacaggcagcggaaggtgcggccgggcggcgggggcgggcggctgtcgttcacggacctgagcggcgccgcggaccaggacctgtcggcgtcgctggtgggctccaacctgcacgtgttcagcgtggcggagctgcgcgaggccacgcgcggcttcgtctccggcaacttcctcggcgagggcggcttcggccccgtctacaggggcttcgtcgccgacggcgtcaagaaggggctcaaggcgcaggccatcgccgtcaagctctgggaccccgagggcgcccagggccacaaggagtggctggcggaggtgatcttcctggggcagctgcggcatcccaacctggtgaagctggtgggctactgctgcgaggacgagcaccgcctgctcgtctacgagtacatggagcacggcagcctggagaaccacctcttcaaacagattcctgccgtgctgccctggtcgacccgactaaacattgcagtaggcgccgccaagggtttggcgttcctccacgacgccgagaagccggtcatctaccgtgacttcaaggcctccaacatcttgctcgactcggactacaaggccaagctgtcagacttcgggctggccaaggacgggccggagggcgacgacacgcacgtgtcgacgcgcgtgatggggacgcacggctacgcggcgccggagtacatcatgacgggccacctcacggccaagagcgacgtgtacagcttcggcgtggtgctgctggagatcctcacgggccgccggtccgtcgacaagacccgccccagccgggagcagaacctggtggactacgcgcgcccgtgcctcaaggacccgctcaggctgggccggatcatggacccggccatggagggccagtactcgccgcgggcggcccagagcgcggcgctggtcgcgtaccgctgcctcagcggtagccccaagaaccggccggacatgtccgccgtcgtccgggcgctggagccgctgctcgacctccacgacgacgtgcccgtcgcgcccctgggccacgccggccccgtcgtgctgttcgtagc

SEQ ID NO: 28542 - DNA, 841 bp, Zea mays
  Clone ID: LIB4758-051-D5_FLI
ccacagcgcaccataaaatctaatccgtctccttcctcttgttcaccaaagcaaaccgaagccgcactctaccgcgctcctcccgaaccacagctatgctcgcccaccgcctcctcctcctcctcgccgtcgccgcggcgagcggcaccgccttcgctaagccgacggcgtacgaagccctcgctgactacgacttcccgccggggatcctccccaagggcgtggtcgcctacacgctcgacaacgccacgggcgccttcacggccacgctcgacgcctccgcgtccggcagcgggtcctccgtctgcgagttctccatccagggctcctactcgctccgctaccagaccaagatcaccggaaagatcgcccccgaccacctcaccgacctcgagggcgtctccgtcaaggtcctcttcttctggctcaacatcgtcgaggtcacccggcgcggcgacaacctcgagttctccgtcggcatcgtctccgcggacttcgggattgaaaacttcctcgagtgccccacctgtggctgcgggttcgactgcaacgacctgctcatgctgcagaagcccggcgccgccaccgccaagctgcgcctgcggggtgccttctagaactccacttctgcagatttggtgactgctgctgtaagctgcctcgactagtagtgctgtatgtctagtagatgtgggttaataaagagggcaaacttgaaagatcccagcttttagatgtgggatggggtaaccaagttcaggactcgatgtcatgtttcaccaactgtttcagacagttctaggaacagccagagaagcaattaagacctttcaaatatttg

SEQ ID NO: 28543 - DNA, 1160 bp, Zea mays
  Clone ID: LIB4758-052-A2_FLI
ccgggtcacaagcaccagaccaattaactagcttcttctagctctagctaggctcgtttgctgcaagaaggtaacagcgcaggcatggaggggaaggaggaggacgtccgcctgggcgccaacaagttctcggagcgccagcccatcggcacggcggcgcagggcacggacgacaaggactacaaggagcccccgccggcgccgctcttcgagcccggggagctcaagtcctggtccttctaccgcgccggcatcgccgagttcgtcgccaccttcctcttcctctacatctccatcctcaccgtcatgggcgtctccaagtccacctccaagtgcgccaccgtcggcatccagggcatcgcctggtccttcggcggcatgatcttcgccctcgtctactgcaccgccggcatctccggcgggcacatcaacccggcggtgaccttcgggctgttcctggcgaggaagttgtccctcaccagggcggtgttttacatcatcatgcagtgcctgggcgccatctgcggcgcgggcgtcgtcaaggggttccagcaggggctgtacatgggcaacggcggcggcgccaacgtcgtggcgcccggctacaccaagggcgacggcctcggcgccgagatcgtcggcaccttcatcctcgtctacaccgtcttctccgccaccgacgccaagaggaacgccagggactcccatgtgccgatcctcgcccctcttccaatcgggtttgccgtgttcctcgtccacctggccaccatccctatcaccggcaccggcatcaaccccgcgcggagccttggcgccgccgtaatttacaaccagcaccatgcctgggctgaccactggatcttctgggtcggccccttcatcggcgctgcgctggctgccatctaccaccaggtgatcatcagggcgatcccgttcaagagtaggtcttaaaggagccgatgctgctgcttcgagatgctgccggtcttgaaaggatggattcgtggctgtttcaaatgatctcctactatgttacgtgcagttccattccattcctctttcaaagttcggagctgcttttatccgaacccagacttgtaattcatctgtaccaattgtgtaatatgccgcgcctctgttatgtgcaattcaaaattact

SEQ ID NO: 28544 - DNA, 719 bp, Zea mays
  Clone ID: LIB4758-054-A6_FLI
ccgggagctagtcatcactggtcacgttcgtccaccagagacaacaatggccatggagacgtgcttcagagcgtgggcgctgcacgcccccgctggcagcgaggacaggctcctcgtcggcaacctggtgctgccgtcgaagcgggcgctcgcgccgctgtccgtgggccgcgtcgccacgcgccggccgcggcacgtctgccagtccaagaacgcagtggacggagttgtggtggcggacgagaagaactgggacgggttggtgatggcgtgcgagacgccggtgctggtggagttctgggcgccgtggtgcgggccgtgccggatgatcgcgccggtgatcgacgagctggccaaggactacgccggcaagatcacgtgctgcaaggtgaacacggacgacagccccaacgtggcgtctacctacggcatccgcagcatccccaccgtgctcatcttcaagggcggcgagaagaaggagagcgtcatcggcgccgtcccgaagtccacgctcaccaccctcatcgacaagtacatcggtagttcatgagcatgccatgccatgccatgcatacatgcatcgacgactaaacacatatgtgtatctctagtagcctttgcatacgggatatgatcaattcaagcagccagccgtctgctactgctgtgttatatataccatacctccatgtcgaatccagagtacattaattagttac

SEQ ID NO: 28545 - DNA, 587 bp, Zea mays
  Clone ID: LIB4758-054-F10_FLI
ccgggactgacgagctcgccatggcctccctctcctctgccgccgtcaccgccccttccttcgccgcacccgcaccagcccgcgccgtggtcagaaggaggtccttcaccgtgcgcgcctctctccgcaaggccaccggcaccgccgccgtggcaatggctgccagcgccctgcttgccggcggtgccatggcccaggaggtgctgctgggcgcaggcgacggcgggctcgtcttcgagcccagccagttcaccgtcaaggccggcgacaccatcacattcaagaacaacgccggcttcccgcacaacgtcgtcttcgacgaagacgaggtgccgagcggcgtcgacgccaccaagatctcgcaggaggagtacctcaacgcgccaggcgagacctactccgtcaccctcaccgtgccgggaacctacggcttctactgcgagccgcatcaaggagccggaatggtcggcaagatcaccgtcaactaattaagctagctatcgatcgatatccattcatgtattagctgttgcttcctgctttgtactccgccgatctgtccatctctacatgttttcgtcttcacg

SEQ ID NO: 28546 - DNA, 654 bp, Zea mays
  Clone ID: LIB4758-056-C8_FLI
ccgggttctcttccccactcgcctccgctcaccttgcctcgatcgttccaggagtaataaaacactaaaatggcgatggcggcggcgaggagagcgctcctggcccacctccgcgtgccggtggtccaccctgcagcggcggcagcgaccatccccgcggcagggcggctcctgtcgtcgacgacggagacaaaggggtcgttcctcgacaagggcgaggtcgctgaccgtgtcgtctccgtcgtcaagaacttccagaaggttgaaccctcaaaggtgacacctagtgctcattttcagaaggaccttggacttgatagcttggacactgtggagatcgtgatggcgtttgaggaagaattttcctttgagattcctgacaacgatgcagagaagattgactccatcaagacagcggttgatttcattgcttcgcatcctcaagcaaaataagaggatttctttttttttcgtatttcaaagtgtgttttgcacttttgcatccagaactttatgcgacacgggactagttttatctagcttgccgcagtagataggaagtcatttctttacctttctgaatccgcgtgtaccaaacgattgttgtgttcttgtgacctcattggtacgctaatccataaatccatttgactc

SEQ ID NO: 28547 - DNA, 964 bp, Zea mays
  Clone ID: LIB4758-056-G4_FLI
ccgggagaggaaacccatttacgtatatgcccttgtcccggttcctttccccatccccaactccattatttgcttgattcttgagaagagagagggagagagagagagagagaggaagacgagagctagaagcgaaggagaaacagcagttcttcagctaggcaggagggcacaggaaggaggagatggcgtcaaagaggattcagaaggagctcaaggatctgcagaaggaccctcccacctcgtgcagtgcaggtcctgttggtgaagacatgttccactggcaggcaacaataatgggtccatctgatagcccatattctggtggagttttcctagttacaatccattttcctcctgattatcctttcaaaccaccaaaggtggcatttcgcactaaggtgttccatccaaacatcaacagcaacgggagtatttgcctcgacatcttgaaggaccagtggagtccggcactaacaatctccaaggtgctgctgtccatctgttccctgctgactgatccgaaccccgacgaccctttggtccccgagatagctcacatgtacaagacggaccggcacaagtacgagaacaccgcgaggacctggacccagaggtatgccatgtagtattttctctacctggcctttggggtcgctgctgccgggacctggacgtgcctccatgtattcgttctatccttcctgtataatgatgaaccgaattgggtttgcagtacagtgccgcgtgtggtgctgaatgctgctgtattgtgtcacttggaagctgtaattctcagtgtcaaaaaaaaactggtgcttggaaccattttgcgtcggatggcgctgcaggccagtccatgcttgcgtccgtcttcccttcaccactcaccagtcatcatgttggaagaaacataacgatctgtctcttgagtaactggtacaaaacataatgatcgttgggg

SEQ ID NO: 28548 - DNA, 1553 bp, Zea mays
  Clone ID: LIB4758-057-H11_FLI
ccggggttcagtggctggcggcgcatagatagatagccatggcgaagaagctagtggaggaagcgctcctcgcagcggcggacgagcacgaggaggagaacctgagcgtgcgcgaggagctgaagaagcagctatggctggctgggcccatgatcgccggcgcgctcctgcagaacgtgatccagatgatctccgtcatgtacgtgggacaccttggagagctgcccctcgctggcgcctccatggccaactccttcgccaccgtcaccggcctcagcctgctgctaggcatggcaagcgctctggacacactgtgcggccaagcgttcggcgcgaggcagtactatctcctgggcatctacaagcagcgcgccatgttcctgctgaccctgtgccacgtccggttcctccagacgcagaacatcgtggtgcccgtgatggcgagcgccggcgccgccgcggcctgccacgtcgtcgtctgctgggcgctggtgtacgcgctcgggatgggcagcaagggcgcggcgctcagcaacgccatctcctactgggtcaacgtggccgtgctgtccgtgtacgtgagggtgtccagcgcctgcaaggagacgtggacgggcttctccacggaggccttccgcgacgcgctcggcttcttcaggcttgcggtcccgtccgctctcatggtctgcttggagatgtggtcgtttgaactcattgtgctcctctcgggccttcttcccaacccaaaactggagacctccgtgctgtcgatcagccttaacactgctgcgttcgtgtggatgatcccctttgggcttagctcagctatcagcactcgcgtgtcgaatgagctgggtgccgggcgtcctcgagccgcccgccttgcggtgcgtgtcgttgtgttgctgtctgtcgccgaagggctaggcgtgggcctcatcctggtgtgcgtgcgctacgtctggggccatgcctacagcaacgtcgaggaggtggtgacgtacgtggccaacatgatgctggtcattgcagtgtccaacttcttcgatggtatccagtgcgtgctttcaggtgtggctagaggctgcggatggcagaagatcggtgcctgcatcaaccttggcgcctactacatcgtcggcatcccctctgcttacctcacagcgttcgtcctgcgtgtcggtgggacgggactctggttgggcatcatatgtgggctcatcgtacagctccttctgctcgcgatcatcactctctgcaccaactgggatagcgaggcaacgaaggcaaagaacagagtgttcaattcttcctctccagcatccggaacgtgaacgcattggcggtgaagtaaacggcgagcaaacacggaaactataggcctgtagttttggaagcttcagcacctctgatcctctccgattttctggctcccacattaactctaatggttagcattgacacttgcagtctggattttgaaacataaatgcgttccttgaacagagtaggaagggaccaatggaaaacttatacaatagtgttagatcatg

SEQ ID NO: 28549 - DNA, 817 bp, Zea mays
  Clone ID: LIB4758-059-C1_FLI
ccgggacacggcaccctccctatgggtcacggccatcttcgcgcctgcgagtgcgagacggccacccacacaaatcccaaatcctcagcacgatacgatccgccgaattaagttcctgcacgtacgcacgcaccgggacaccagcaacccccaacagcgccactgtccagtgcgcgcgtcaagcttgcttagctagccgccatggcctccctcgccgccgtctccgtgaagcccgtggccatcaagggtctcgccggcagctccatctccggcaggaagctcgccgtcgccaggccgtcggcccgctccatccgcaggccccgcgcagccgccgtggtggccaagtacggcgacaagagcgtctactttgacctcgacgacatcggcaacaccaccggacagtgggacctctacggctctgacgcgccgtcgccctacaacccgctacagagcaagttcttcgagacgttcgcggctccgttcaccaagagaggtctgctgctcaagttcctgctgctgggcggcggctcacttctggcctacgtcagcgcgtcggcgtcaccggacctcctgccgatcaagaagggacctcaggagccgccgcagccgggcccgcgcggcaagatctaagctcagcttctccatttgcatggtctagtagcttgctttgtactgctagcgccggtcgcgtcgcaatcgtcatggatcatctctctatcttgttgttacgctgttcataatttggtatatttgccattccgctattgtgtactctttggcatacatacaataattaaaatggcgttgcgtggctctc

SEQ ID NO: 28550 - DNA, 636 bp, Zea mays
  Clone ID: LIB4758-061-F3_FLI
ccgggatttgctgcgtctccttgcccgcgccgccgctcgccgtttgcccctcgtctccgcaccgcgcgctgttgtccatccttgtgcagcaaaaatgacggctggctacattgttggctcactggtcggatcctttgccattgcatacctgtgtgacacatttatctctgacaagaaggcatttggaggtagcacccccaagactgtttctgagaaggagtggtggcaagccacagacaccaagttccaggcctggcctcgcactgctgggccaccggttgtcatgaaccccatcagccgccagaacttcatcgtcaagtccactgagtaggtttgggctggagaagctggttctgcgacttggtgccgccatgaagccagagttccttttctaaggtcttaatcaattgtaataaaacgaaatacagtcaggatttttttgtgatttttacttgatctgtgagcgaacactgggtctttcaccttgtcatccaatgggttctgctccttggtgaaatctcccaccagccagtaaagaactgggttgttttcataacatatgcttttgctacgcagcctctgctgttgtaaggaattgcattgttatcttatatcactgtatggtgatgtttaacg

SEQ ID NO: 28551 - DNA, 636 bp, Zea mays
  Clone ID: LIB4758-062-F1_FLI
acgcaactgaaccgatcgatggacgccacgccgacgcggctcttccttggcgcgctcctcctcctcgtccccgccgcgctcctcctcctgctccgcgcgcggggcaggcgccgcctccccccgggcccgccgtccctgccgctgctcggcagcgtggtgtggctcaccaactcgcccgccgagatcgagcccctgctgcggcgcctcttcgagcgttacggccccgtcgtggcgctccgcgtcggggcgcgcttgtccgtcttcgtcgcggaccgccgcatcgcgcacgaggcgctcgttgaccgcggcgcgacgctggcggaccgcccggcgctcgcgtcggtcaagttcctcgacgagagcgacaacaccatcacccgcgccttgtgcctaggaggtctcacttgaactagaaatactttacgtaccattttctatcctacgttttcctcgttttgtgatgtatataaacatctcatagctataaaaaaaattacggttctacaataattaatcggcagaaactgtaacgttcattcggtagtttcatcttcctgtcgatcgtggatggcttgtgaatatggaaaaatgattagcaaaacgatgctaattataaataacagtgctgctcttcag

SEQ ID NO: 28552 - DNA, 886 bp, Zea mays
  Clone ID: LIB4758-062-G10_FLI
ccgggaatcactgctactcctacatcgatcagtgctgtgtagacaagaaaagcgggcagcttcgttcaaccccgagaaagcttggagccagagcagggggggcgaagagacgatggtcgggatcttctccaggttctccgccggcgcccaccgccgctccaagagcgtggccgaggctgtcgagacgctggcccccaacataagtacaggagaatctgacccagcggcagctgttcctgcggagagcccccatggcatcgaggttggtgttgagttcaagccagtggagcgccccgtggaacctatcaatcttgatgagccagtgaaatgcccgcttcctgagccgtctatactgcacgacgggaggatatggaaggagaaaatgtcttcagtcagcacgagggtgagaacagacttgccggtcgtgaaggaagggtcgcagctggagcctgacggtagcagcgctaggtcacgatctgcagttccaaggcgcgccatactgccctccgtaagcgcgcccgagcacaacatcctagcgctgcttgacgagtgcgacgtctccgggagccgtggctctgctgaatgagctcgagttgggcgtcgccggcacattgtaactaaactgcgtttgccacgagctgatctgagcacagcaaaccttacagtatgtctgaaaagaattggaactacgcaacagatcttttgtctggattgtatctataaatacgagtgaaagcgttttggggaaattgtctcgcacttgtcggaggcagttatggttactgaaactgaaacacttggttttgtgttgtaacttttgcactgttgagtgcgagcatgcagctctgaatgtgacgccaagttgtcaagtgcaaaatgaaaaacg

SEQ ID NO: 28553 - DNA, 1891 bp, Zea mays
  Clone ID: LIB4758-063-A5_FLI
ccgggattccataatgacgagctattacattggagttgacgttggcagtggcagcgcacgagctgctctcgtgtcggatcaaggcgatatcgtcgccgagtcgacgcacgagactctgactcgcagggacgaccatgactcaaacattttcgagcaatcaactggtcagatctgggattgcatctcaaaagcctgcaaagccgttctcaagagctctggtattacgaaagagcaagtgaaaggtattggattcgatgcgacgtgctcattggccgttgccaacatggagacgggcaagccagtgtcggtctcacccaaatcttggcagcagggcgcagatggcagcgctcagaccgaaggcggacacgtctgggacgtgattctctgggccgatcatcgtgctttcaaagaagcgaaattaatcaactccactggatcgatggttctcaaatacgtgggcggcaccatgtcactcgagatggaagcgcccaaaatgctctggctcaagaacaacatgccggccgacgtgttctcgtcgagcatgttcttcgacttgccagatttcttgacttacaaggccaccggtgacctcgctcggtccaactgttctttggcgtgcaagtgctcttacgtgcctccgggtgtcgagggtagcaagggatggaatgacgacttcttcactcagattggactcggggagtttgtcaagaccgagtacaagcaagtcggagggacccctggaaaatctggcctgatcttgacagctggtcagccagtcggaaagggaatttctgctgaagcggccgaggagcttggcttgctcgagggtacgccagtcgggtcaggcgtgattgacgcctatgctggctgggtcggtacggtcgctgcccccatggaaggacaagagaccacctcactcgaggactcgaagcaccgacttgctgccatcgctggaacttcgacctgtcacatcgtccagtctcccgaagccgttttcgttccgggcgtttggggtccgtacaagcacgccatcttccccggatattggatgaatgaaggtggtcagtcttcgacgggccagcttctggacttcatgatcgatacacatcctgcgtccaagcgactcaaggaactcgccaaggagaagggcacgaaccatttctcgctcttgaccgagatcttgcagaacatggtccaggagaaaggcgtgcccttcatgtcgtacttgaccaaggacattcagctctaccctgatctgcacggtaaccgctcgcccttggctgacaacgacatgcgaggcatcatgattggcatgcgcctcgacaagaacttgtctgacctggcgctgcgctactatgctaccggggaggctatcgcactgcagacacgccaaatcattgatgagatgaatcgttgcggtcatgacgtcaggtccattttcatgagcggaggtcttgtcaagaacggtttcctcatgagcttgatcgccgacatctgcaacgttcctgttcagttgccctactctcattcggcatcggtcgtactcggtgctgccatgcttggagctgcagctgcagccgaagctcagaatggcgtaatcgacagtcaggagaaggccgagaagggctcacacgacatgaaagagcgtctgtgggacattatggtcaagatgtcgcgtccgggcacgactgtccgtccttcagcgtcagagaaggagttgaagctgctcaaagtcaagtatgagactttcttagagtgcatcgagttgcagcgcaagtggcgcaagaaggtcagcgacgctctcgacgagtagacagcttcccatgagttgccacctcctcccaggcagtagaatgtttataagcgtgcaagtcaacacctttatagaagc

SEQ ID NO: 28554 - DNA, 949 bp, Zea mays
  Clone ID: LIB4758-063-B8_FLI
agtgagtgaacaccagccgtattgtcccgaccccgaccgatcctcgcctgctgcagccatggcgacctccgcggcgctctctaccgccgccaatcccacccagctctgccggtcccgcgcttcgctgggcaagccggtgaaggggcttggcctgagcatgggccgcgagcgcgcccagcggagcattgtgtgccaggcggcgagcagcatctccgccgaccgcgtccccgacatggagaagcggaagctgatgaacctcctcctcctcggcgccatctcgttgcccaccgtcggcatggtcgtcccctacggcgccttcttcgtccctgccggctccgggaacgccggcggcgggacctacgcgaaggacaagctgggcaacgacatcacggtggaggcgtggctcaacacgcacggtcccaacgaccgcacgctcgcgcaggggctcaagggtgaccccacgtacctggtggtggagcaggacaagacgctggccacctacgggatcaacgccgtgtgcactcacctcggctgcgtcgtgccgtggaacggcgccgagaacaagttcatctgcccatgccacggatcccagtacaacaaccagggcaaggtggtccgtggaccggcgcctctgtcgctggccctggttcacgccgacgtcgacgacggcaaggtcctcttcgtcccgtgggtggagaccgacttcaggaccggcgaggacccgtggtggaaggcatgaggatgatccgaaaccagcggtgctcagtgctcacacatgagacctacgtatgcctccgttccttgtgatgaggaaatatgcttgcgttcgttctccgtgggcgttgttcctacaaattcacttgctttctgtctctctctctatatacacactgtataaaacaagaacagctgtttatcatctcttcttatataaccttttgaacactct

SEQ ID NO: 28555 - DNA, 693 bp, Zea mays
  Clone ID: LIB4758-064-G7_FLI
ccgggcagcgacccaggcgtcagcggcgtgatgcagttcctccgaggcagcggcggcgggggcggtgggttcccggtggtggcgtgggaggtgttgcggcggcacttctctaagaagcggtccgtggacgtgaggcggatcaaccccaaggtgcccaaggaggaggccgtcgccatttccggccgactcctccagatcctctccgaccatgggcccctcaccgtcgccaacacctggaaccacgccaaggatgctggcatcgctggcctgaacagcaagacgcacatgaagatcctgctgaaatggatgacagggagaaatgtcgtgaagctgacctgcgtgcacgtgggcaacgcgaagaagttcctctactccccgtccactgaaagcagcagcagcagcgccggcgcatcaccgtcatccacatcggcctcgcagtgacggtcagtcgctgttaagccttggtgtggttcttgatgttgctttgtggatcgatggaggttgcctctggtcattcggatcccatgtttaaccttgatgacgaacattggaaaaagcattttgttttatggactggaatagtctgcaaacatcacgatagcaatattgttctgctgctcctcagctgaggatgctgccctgtcctgaactcctgattttgcttttgatctactatgtgatgatttgctctcc

SEQ ID NO: 28556 - DNA, 886 bp, Zea mays
  Clone ID: LIB4758-065-B10_FLI
acgatcctgccgccgccgctcgcacctccacgatcctgcccagcgccgtgcgcctccacccccgccccgtccgccgccttagctactgcttactacgttgcattttttcccctgttttgtggactgtggtaattgactgtgtatcgagcaggcataccctgttaaaaatcctggttccactactagtcaggccatggctgcagcagaggcatgggtgcggcaggagaaagttaggaagtttgaggagttcgtggaccaacggttgaaacccgacctcgccaatgccatcgcacagcgtaacaaggtgtttgagcagcagaagaccttcttggatttgaagaggaacattgaaaatttggagaggaatggtgttaccagcatgcggtccatggtcaatcttggctcagaggtgtacatgcaagcagaagtaccagatacaaggcatatttttgtggatatcggtctaggttttcatgtggaatttacttggcaagaagctttacagttcatatctgtaagagaggcaaggttgactaggcaaatagacgaatacacacatctcatcgcaagcataaaagcacagatcaagttggtatgtgaaggtatccgcgaagtgctgcagctgcctgcggagaaagagttatcgcccaggaatacgtggtagaatttggttctcaatggagcagggggtggtgttctgtaaacgtggttccgtttcaactcttgcagttgaaattattgtggtgccgacagtattttagagcagagaatgaggttccccttcgtataacaatctcttcgacgacaccacgtacaactcatactgatttctatgttttcattatgttttcatactgagttgcagtatccaatgatttcacgatcg

SEQ ID NO: 28557 - DNA, 1290 bp, Zea mays
  Clone ID: LIB4758-066-C3_FLI
ccggggtcagtctctcctctctcgtcctcatgccgtcgccgctgggtggacgaatccaattcgggcctggcaaggctggcatgccgtcggcctccctagctcgccgcctcctctctactatatcatctccagcgatctcttcacgcagtaccagcagcagcaacagcaacagctgtggtttcagcacaagggcgaggaagaagcgcagctgcgtttcttggatggtgagcgcggctactccggcggacatggcgaccaacaggtgcaccaccgaggcccgcgtgctctcttgttcgccaccggaaacacgggacaccgctcatctgctccgctcttgccttctgaactccgaaagcggcagtgctctggcgaagctggcgccgctggaagccatcctgttcgacatcgacggcaccctctgcgactccgaccccatccacttctgcgccttccgagagctcctgcagcaggccggcttcaacggcggtgtccccatcacggaggagttctacagcgccaacatcagcgggggccacaacgacgacctcgccaggtcgctgttcccgggcatggatcaccagaaggcgatgcggttcatggatgacaaagaagctatgttcagaaagttggcgcctgggcagctgaagcccgtggatgggctgcaggagctgtgcggatggatggaaggccgcgacatgaagcgcgcggcggtgacgaacgccccgagggcgaacgccgagctgatgctgtcgctgctggggctcaccgacttcttcccggtgctcgtcatcgggagcgagtgcgaccgggccaagccgttccctgacccgtacctcaaggcgctccagctcatcgacgcatcgcctcaacacaccttcatatttgaagactctgcatcgggggtccgggccggtgtggctgccggagtgcccgtggttggcctgacgacgaggaaccccgggaaggtgctgaaagacgcaggggccagcttgctggtcaaggattttcaggacccggagctgctgtccgtgcttcaacaggtggaggtcgaacccgcagcggagaatgcacaaggctgatgggtcgggcattgcggaaaatgtcatgctggacagactagccatcagcgattctttcacggagtggaatagctgtgtaactgcatcgtggaataaactaactccggtcggttcctcggcaggaacctggagccggtgcgcatggatgtgcgctgtgtgcaaaacctggcgcctactacactggttcttaacatgcaacaggcattttggt

SEQ ID NO: 28558 - DNA, 775 bp, Zea mays
  Clone ID: LIB4758-067-D6_FLI
ccgggctgagccagacaatcaaaagctaccccctatccgatccaaccctctggctgctcctccgtccggccggcatcggcagtgcaggatggctctgaggatgtgggcgagctcagccgccaatgcgctcaagctctcggcgggcggcgccggagcccgggctgctgccttctctatctccaggttcttctccactgttcacgatgggttgaagtacactcagtctcacgaatgggtcaagacgacgggcgacgtcgccaccgttggcatcacggaccatgctcagggccacctgggagaggtggtgttcgtggagctgccggaacccggcacgaaggtggccgcgggaggatccttcggcaacgtggagagtgtcaaggccaccagcgacgtcaactccccgatctccggcgaggtcgtcgaggtcaatgccaaactgtcagagacgcccggcctgatcaacacgagcccgtacgaggacgggtggatgatcaaggtgaagccgagcagcccgggggaggcggacgccctgctggacgccgccaagtacaccaagcattgcgaggaggaagacgctcactagacccaggcccgcccagccagcaagcgtggatgcttaccacgacagtgcgcgttggtggtgttgatccgctcagtctttctttattgttgcaaaaactccaccaagcagtccgccaatgccggcgtacctgatgccttccgttttctttgtgctggtaccttatttttttttataaagaaaagaagtggtgct

SEQ ID NO: 28559 - DNA, 935 bp, Zea mays
  Clone ID: LIB4758-067-G8_FLI
ccgggacaacatcaacaaagcaaacatactgtacacagtagtgccaacattaaatggctgcgtcctcgtacttccttcttgctgcttttctagctgtaacagcttctcatgccaccgcttccgatcctagcccgctccaggatttctgtgttgctgatattcactctcctgtgaaggtgaatggatttgtttgtaaggatcctatggcggtgaccccagatgacttcttcaaagcagccaatcttgataaagctagagacaccatgaagagtaaggtggggtccaatgtcactttgatcaacgtcatccagctccctggcctcaacactcttggcatctccctggcacgtatcgactacgcgccattgggcgagaacccgccgcacacccacccacgtgccacggagatcctcacggttctcgaggggacactgtacgtcgggtttgtcacctccaacccaaacaagctatttgccaaggtgctcaacaagggcgatgtgttcgtgttcccccaaggtctcatccattttcaattcaacccggtctatgacaagccggccgttgctatcgcggctctcagcagccagaaccctggggttattaccatcgccaatgcggtctttggatcaaagccaccgatttcggatgatgtcttggccaaggcttttcaggtggagaaggggacgattgattggctccaggctcaattctgggagaacaaccactactaaataaatcacatatcgcttatcgtataaaagaatgctttttacatatgcactttgagtaataatacaactacatgtttttaggtttcatagtaaaataggccctaaaattaaaaaagtagaggttccagtgttttgggtgctattttgtatcgcatggttcttggtgcaatgacctctatggaagttctaaataataatcttcag

SEQ ID NO: 28560 - DNA, 928 bp, Zea mays
  Clone ID: LIB4758-068-E9_FLI
ccgggagctatgtatatatatataccaataagaagaattaaggtagaaaatgtcattaatgataatggagagaggagacgaggagctgaagctgctgggcatgtgggcgagcccgttcgtgctacgggtgcaactcgcgcttagcctcaagggcctgagctacgagtacgtggaggtggacatcagcaacaagagcgagctcctcctccactccaaccccgtccacaacaaggtccccgtgctcatccacaacgggaaccccgtctgtgagtcgcagctcatcctgcagtacatcgacgaggccttcgccgccaccggcccgtgcctcctcccggccgacccctacgaacgcgccgtcgctcgcttctgggccgcctacatcgacgacaaggtgctggcgtcttggatgcaggcctcgaggggcaagacagaggaggacagagccgagggaagaaatcagtggctcgtcgtggttgagacgctggagggagcgctgagggactgcgccgccggcaaggggatgatgatgcccttcttcggcggcgacagcgtcggctatgtggacgtggtgctcggcagcctgcttgggtgggtcagcgcaaaccaggaggtttggggcatagagtgcttccatccccgacgggctccgctgaccgcttcgccgcactgcaaaccgtccagacggtggtgccccaagtcagcaggctggttgagctcggcatgatgttgagggcccgtcaatcggacggggccgctgctgcaagcaactgaaaccactcgctatttaggtcctaaaacttgttcatcgaacttatttagcgcactactggaaacagatactttgccgagtacaatttatggagcactcacgaaaataatcttggtcgagtgccactctttgcaaataatgacactcgatatagttgtc

SEQ ID NO: 28561 - DNA, 596 bp, Zea mays
  Clone ID: LIB4758-069-C1_FLI
ggccagtcgagtgagtccatcctccatcgccatccaatggccgccaccgccctgagcatgagcatcctccgcgcgccgccgccctgcttctcgtccccactcaggctcagggtcgcggttgccaagccgctggcggcccccatgcggcgccagctgctgcgcgcgcaggccacctacaacgtgaagctgatcacgccggagggggaggtggagctgcaggtgcccgacgacgtctacatcctggacttcgccgaggaggaaggcatcgacctgcccttctcctgccgtgcggggtcctgctcctcctgcgccggcaaggtcgtctctggctccgtcgaccagtccgaccagagcttcctcaacgacaaccaggtcgccgacggttgggtgctcacctgcgctgcgtaccccacctccgacgtcgtcatcgagacgcacaaggaggatgacctcctataattctagctagctatacaccgccagggcccgtcgtcttgtgccaccacatgcagtaccgcccgcgcaggagatgagacgtgtcgtctcaataattctagctatatatatatatatgcatgcatgcatgtacttttccc

SEQ ID NO: 28562 - DNA, 780 bp, Zea mays
  Clone ID: LIB4758-069-H10_FLI
ccgggagtctcactccaaaccaaagccatcggaggagcagctggacgaccatggcctcgccgctgctcaagtcgcactctcagctcgccgccgccgccgccctgcactccgtgaggagagccgaccgctgccctgcgacaatacacctgggcaagttccatgaccacgggctcaggtccggccgttctaagagatccggtttagcgaaggtgggcgccttcccgtcgctggacgtggtgccgctgatggtgacgatggtggagcacgtggacatgtcgcgggactacgtcgtgaccaagtccatctggcatctcagcgacgtagccctcaagagcgtctataccttctacgccatgttcaccgtctggggagtctgcttcttcgcgtccatgaaggatcccttctacgacagcgagacgtacaggagccagggtggcgacgggaccgtgcactggtactacgacaggcaagaggacctggaggcgtctgcgagggaggagctgctgcgggaggagctgctcgaggagattgagcagagggttgggggcctcagggagctggaggaagcgagcaaggaggagcagctcacaaagtgatcacgcgggcgaataccgaatgggatggatacgggctactcatcagctctctatctcagcttcgttagcaaataagttcagacttctttactgccctgctcaagtctgtatatggccaaaaccaaaaaacgattgatcaactgcgctactgcagtgcaatagcaggatacgtatagtttttttt

SEQ ID NO: 28563 - DNA, 1004 bp, Zea mays
  Clone ID: LIB4758-070-B12_FLI
ccgggaagcctccgcctcgtctcgacgccttacacccagtgccaaccgccgtgccctcaccctctctatctgcgccgtctctcactctctaccgccgccgccgccgccctacgccacgcaaaaagcgccacaagattcgcccctgctgaaaacgcactcgatggcgtccgcgacgggggtttcctcctcggagatggcggtggaccacgcgacggggccgggcgccgtggacaagccgcggttcgatgctctgacgccgaatgagatgagcggcgggaggccccagttccggaaagtgcccgtcccgcagcaccggttcgcgccgctcaagcgatgctggatggaaatctacacacccgtatacgagcatatgaagatcgatatacgcatgaatctcaaggcaaggagggtggagctaaagacaaggcaagacacaccggacgtgagcaaccttcagaaatgtgcggactttgtgcatgcttttatgcttgggttcgacattgctgatgccgtcgccttgctgcgtcttgatgacctgtatgtggactccttcgaaatcaaggacgtgaagaccctgcgaggggagcatctgtcgcgtgctattggccgcctatcagggaaaggaggcaagaccaagtacgccattgagaactctaccaggacccgcatcgttatcgctgatacaaagatccatatacttggatcctttgttaacatcaaggtcgcgcgggattcgctttgcagtctcatcttgggttcacctgctggcaaagtgtattctaagctaagggctgtatcagctaggttggcggaaaggtattaaattagattggttttgcttgtaccatgtaacggttgcagttttgctcacagtatgttttactagcggatttgtgtgctcggggatgctgggagatttaaattggtgtgtacatgtgctcttgtgccaccacaatctatgtggtggggttgattttgatgaaaattagttattttcttatccg

SEQ ID NO: 28564 - DNA, 592 bp, Zea mays
  Clone ID: LIB4758-070-C3_FLI
ccgggacctactgacgagctcgccatggcctccctctcctctgccgccgtcaccgccccttccttcgccgcacccgcaccagcccgcgccgtggtcagaaggaggtccttcaccgtgcgcgcctctctccgcaaggccaccggcaccgccgccgtggcaatggctgccagcgccctgcttgccggcggtgccatggcccaggaggtgctgctgggcgcaggcgacggcgggctcgtcttcgagcccagccagttcaccgtcaaggccggcgacaccatcacattcaagaacaacgccggcttcccgcacaacgtcgtcttcgacgaagacgaggtgccgagcggcgtcgacgccaccaagatctcgcaggaggagtacctcaacgcgccaggcgagacctactccgtcaccctcaccgtgccgggaacctacggcttctactgcgagccgcatcaaggagccggaatggtcggcaagatcaccgtcaactaattaagctagctatcgatcgatatccattcatgtattagctgttgcttcctgctttgtactccgccgatctgtccatctctacatgttttcgtcttcacac

SEQ ID NO: 28565 - DNA, 1513 bp, Zea mays
  Clone ID: LIB4758-070-E12_FLI
ccggggctactatgtgttacatttggcaggaaatttctctaattcagcgctcccagttgatggcctgttcgatgtgtctgccacgttttgaattaagagaataagctacccagcacagcagtcagcagtgtatacaattacattcatgcacacgatggcactcagcactcaggacttgctcgaagctcacgtcgagctctggcaccagtccctgtgctacgccaaatcgctcgcgctcgcagtggcactggacctccgcatccccgacgcgatccaccaccatggcggcagcgccacccttccccagatcctcgccgagactgcggcccacccaagtaagcttcgcgctctacgccgcctcatgcgcgtgctcaccgtctcgggcaccttcagcgtcgagcaacaaccgccagctggtggtgatgattcgaccgtcgacgcgccggacgaagctgtctacaggctcacggcagcctcccgcttcctcgtcagcgacgaggtgagctcggcgaccttggctccctttgtgagcctggcgctccatcctatcgctgtctctccgcacaccatgggcatctgcgcgtggttccggcaggagcagcgtgaaccgtccccgtatggcctggctttccaacaaacattcccaacgatctgggaacacgctgacgacgtaaacgccttactgaacaaaggcatggtcgcggacagccgcttcctgatgccaatcatgctcagggagtgcggcgaggtgttccgtgggattgaatcgttggtcgacgtaggcggtgggcatggtggcgccaccgccgccatcgccgctgccttcccgcacctcaagtgcagcgtgcttgacctcccgcacgttgtcgccggcgctccgtccgatgtcaacgtgcagttcgtcgcaggcaatatgtttcagagtattccaccggcaaccgctgttttcctcaagaccactttacatgactggggtgacgacgagtgtgtcaagatattgaaaaattgcaggcaagctatatctccacgtgatgcaggagggaaggtaataatcttggacatggtagttggatacgggcagccaaacataacgcatctagagacacaagttatgtttgatttgtatattatgacggttaatggagctgagcgcgacgagcaagagtggaagaagattttcatagaagcaggattcaaagactacaaaatcctaccaatccttggtgcactatcagtcatcgaggtctatccatgaatgcttgctgagcaaaggcctccacaataaattgaagaatctgaaagtgctgatagtaatccatgaattgttctttttactatatacactttgaagcacatcgtcgtgtgtgcttccacatgtgatacgatatgtaaacgatgtgctatatatattacccatgctctcgttcgatgtagatgctgggatcataggtaaatctactatatatgccagatcttaataagataatatggaagcgttttgcttgtttgtgcc

SEQ ID NO: 28566 - DNA, 882 bp, Zea mays
  Clone ID: LIB4758-071-A6_FLI
ccgagaaacaccccactatttaacgttctcttgtagcaccagagagaggccgagggagagaggcagaggggcgaaggaaggctaggtaggctagacatggccgccaaagctcacgtgctggtgctgccgatgccatgccagggccatgtgacgccgctgatggagctctcccacctcctggtcgaccaaggcttcgaggtcaccttcgtcaacaccgacgtggaccgcgcggccgtggtagccgcgctggaggcctccggcggcggcggcggcgtggcggcgctgggcggcggcatccacctggcgtccatcccggacgggctggccgacgacgaggaccgcaaggacatcagcaagctcgtcgacgcctacacgcgccacatgcctggctacctggagcgcctcctcgccgacatggaagctgccgggcggcccagggccaagtggctcgttgccgacaccaacatgggctggtcgttcgaggtcgccaagaagctcggcatccgggtcgtgtccttctggccggcggccaccgcgtgcttagccttcatgctcaagatccccaagctcatacaggacgggctcctcgacgacaagggtaacccccgtctttttacctgctcgttaaatctctagctagtatatattatatcgataagagatccacgtgacctttaattggtcagtagttacataaaacgcgcatatcaagctaaccccaccagtgtaaggtttctttattttgagacctctactgtatagtatagtcactaatcaacagcaaccagtggcagacttgcaacatctactgtatagtttattgggtgtgacgctttttctaataagtaagtaaataaatacatacatatctactattatccg

SEQ ID NO: 28567 - DNA, 1514 bp, Zea mays
  Clone ID: LIB4758-071-E7_FLI
ccgggacctgatttcttccgccttgtcagcgatccagacccacccgagccaacaacccatggccgccgcggcgccgcgtctcctgctcgcggtcgcgggcctcctcaccctcgccgtcctcgccgccgcggtctcgccgtctctggcggcggggccgccggtgctgcaggacccggcggagctcctgcgccttgccaaggagccggccttcgcggactggatggtcggggtgcggcggcggatccacgagaacccggagctgggatacgaggagttccagaccagcgagctcgtgcgccgggagctcgacgccatggggatcccctacaagcaccccttcgccgtcaccggcgtggtagcaacagtcggcaccggcggtccgcccttcgttgctctgcgcgcggacatggacgcgctgcccttgcaggaaagtgtggagtgggaacacaagagcaaagtccctgggaagatgcatggatgtggacatgatgcacatgttgctatgctgttgggatctgctaagattcttcaggagcatcgtgatgagttgaagggtacagtagttcttgtcttccaaccagctgaggaaggtggcggtggggccaagaaaacgatagaagacagagctgtggaaaacatagatgccatttttgggcttcatatagctgactctgtgcctattggtgtgctggcatccaggccagggcctattatggctgggagtggattctttgaggccgtaataagtggaaagggagggcatgccgcacttcctcatcacactatagatccgatattggctgcctcaaatgttattgtgagccttcagcaacttgtttctcgagaagctgatcccttggactcacaggttgtgacagttggaaagtttcaaggaggtggagccttcaatgtgatccctgattcggtaactataggtggcaccttccgagcctttctgaaagagagttttaatcaattgaagcagcggattgaagaggtgattgtgtctcaagctagcgtgcagcgctgcagcgctgccgtggacttcctcagcaaggaccgtcctttcttcccgccgaccatcaacagccccgagctccacgacttcttcgtgaacgtggccggcgagatggtcggctcgaggaacgtgagggacaggcagccgctgatgggcgccgaggacttcgcgttctacgccgaggcggtcccttccacctactactacttcgtgggcatgtacaacgagacgcgcgggccgcaggcgccccaccactccccctacttcaccatcaacgaagacgcccttccctacggcgcggccgggcaggcggcgctggcagctcgctacctactcgagcgtcagcagcctgctgccgccaccgctgataaggcagaaacccatgatgagctgtagatagtacatgatgtttgcgtccctgtccctgtgttgatggaattagattgagcaataatttcttcgccaagtttattcagcggctgtacatattcctgac

SEQ ID NO: 28568 - DNA, 579 bp, Zea mays
  Clone ID: LIB4758-073-H11_FLI
gtcgagccgccgccgccgcagttgtcttcggtcttccgtgctcaccttcgagagatcaagttgctgctgcggtagtcccccaaccatcatcatgcagaacgaggagggtaagacggtggacctctacgtccccaggaagtgctcggccacgaacaggatcatcactgccaaggatcatgcctctgtccagatcaacattggccacttggatgcgaatggcctgtacgatggtcacttcaccacgtttgctctctctgggtttgtccgtgctcagggtgatgctgacagctcgttggacaggctgtggcagaagaagaaggctgagatcaagcagtagatcttgcacgtagttccaccagtaatgcactctcgagggatactgctctagctatgctttagctagggggggatgattctgatgtttggctgttcgtttgttggatgaccaggttttagtttgtctggccatgcttgggtcgcagcaatctgtggcaccatgaatatcattttgtcaacttattcttctcacatatttggttgcttagtatttactatttacatcaactgtgcacccagtct

SEQ ID NO: 28569 - DNA, 697 bp, Zea mays
  Clone ID: LIB4758-073-H4_FLI
ccggggccgcaccccacgacttccgccgagtccgagctcatctccgcgcgccgccgccgccgctcgacgcccaacgcgcagccatggcggaacagactgagaaggctttcctcaagcagcctaaggtgttcctcagctcaaagaaatctggcaagggtaagaagccaggcaagggtggcaatcgattttggaagagcattggccttggtttcaagactcccagggaagcaattgaagggacatacattgacaagaaatgtccattcactggaaccgtttctatcagaggcagaattattgctgggacatgccacagtgctaagatgaacagaaccatcattgttcgcaggaactatctccactttgttaagaaataccagaggtatgaaaagaggcactccaacattccagctcacatctccccatgcttccgtgtgaaggaaggcgaccatgtcatcattggccagtgcaggcccctatcaaaaactgtgaggttcaatgtcgtcaaagtcattccagctggatctgctgctgctggcaagaaggctttcaccgcagcctgagtttaaaactatgttccatgagtagtttatagagtgatgtcttttttttgttaaaaaaactgccttctaggcttgtgcctttcgactatggtttggagattgttcccatcttaatgaagtccaatcatctgaat

SEQ ID NO: 28570 - DNA, 870 bp, Zea mays
  Clone ID: LIB4758-075-A5_FLI
ccgggggtgcttcatcggttccgcctcccgcgaaccgtgatgcttcttctcctcacagctgcaaagcatattcgctttccgccaccgcccgatccccacaccgccacccgccgcctctaaccccgctgtcccgtcttgtgctctgacctcaccgctggtcagtgtcagaccgcatggaccccaccgaccagtcgccggaggaggtgtactccgtgtgggcccttccgccggagcccgtccgtgatcgtttccgccgcatcatggagggcctccgcgctgcatacggcggccccgcctttgagccgcacgttaccgtcgtcggtgacttccgcggacgccgctcggaagctgtcaaggtgctccgcgccgccgccgccagcgtccaaccctacactgcccgtgtcacgggggttgcccgtggcagcttcttctaccagtgcgtctacatccttctcgaccccaccgccgaggtggtgggagctagcgatcactgctgcgccaacttcggttacaatagaaaaactccatacatgccgcatgtcagcctcttatatggagaccttacagatgaggagaaggaggaggcaaggaagaaggcagaggagctggacaaggatatctatgtattagagtttgagatatctgagcttgcgctctatagaacagataccacagataaaaccttggagtcatgggaattggtggaggtgtgccatcttggctcttgagaagaagttattagtttcctctccatggtgattctgctgtaagttaactcttggaatttataatgctctactttctaagaaactggtacgtaccactggcataatactttcaatgggaataaggaatgatgtgttgtgctct

SEQ ID NO: 28571 - DNA, 1175 bp, Zea mays
  Clone ID: LIB4758-075-B12_FLI
ccgggtttcgtagtcaatgtatatctgtttacagctctaagtttgctagtgcctattggttttgaagtcatgtttctattaggtgggagatccatcgatacttcctcttaggatgtaatcggatcgaaaacaaaacagacggatatttcttgaaaaaaaaaaaaatgacggatgcaaacaatgcgatccggaagctgtacgacgtctgcagagcctcactgtccgagaaggggcctctatctcctcgtgactctctcgacaacgtccgtgctgcgttagacatggttaccccgtccgacgtcggccttgaacgcgaggctggagctgtgcgtgcttggagcccacgggcggccctgggtcggaagaggattttccattccagcccagccatcagatatcgccatatatacgagtgcgcaagcttctcgattgggatgttttgcatgccggcatcatccatcatcccgctccacaaccatcctggaatgaccgtgctcggcaaggttttgtacggcgcggcgcgcgtcagatcgtaccgctggattgaatcagccggatcgtccattaacctgtcgaaagcgaggccagccaaggttgtaagggacggcgagatgtccgcgccgtgcggagcgatggttcttcgcccggaggaaggcggcgacgtccacgccttgagagccatcactccctgcgccgtcctccacatcctgacgcccccgtactcctcgcaggacgggaggcactgctcctacttccggagacgcccaagatcacacccatcgggcgttttattgaaccgaacaggggggtctgagttcgtgtggctggaagaataccagccacgtcacaacttcatcattagaagggacctgtacacaggacccgctttaaagttatgatgacatcatgacaaacaggggggataattatatatatacgcttcccctttggcttcttattaagttatatcgatggacaagcacttagctatatgtgcttggcacttttttatttatatggtagtattaaaaagacagttgattatcctacgtacagggccgcctgctgtatgtattattctaagataatgttattgtacatctgatgatgtcacccactgacagaatgttatttatataataattatatgaaaagcgaaaggtgtttttgagccc

SEQ ID NO: 28572 - DNA, 863 bp, Zea mays
  Clone ID: LIB4758-075-G4_FLI
acctttcggggtcaccggcttctgctttcttgctacgccaccgcccctctcgtctatttatggagtcccccgatccatgaagccggggcaggccgagagttgtcaacgacgacgtctgccggcagtgctcctgctcctcctcctcctccttcccggccgccgcgcgagcttggtgggttagtgtctcttcttcgcggagacctgtgagaggagccatcatcatggccgccgttgagactgttgtcctcaaggttgctatgtcatgcgagggttgcgcgggggcggtcagaagagtgctctccaagatggaaggagttgaaaccttcgacatagacctcaaggagcagaaggtgacagtcaaaggcaatgtcaagcctgaggacgtcttccagacggtttccaagtcggggaagaggacctcctactgggagggcgaagccacggccccggacgctgcggcggctccagaagccgaagcagctcccggcaccgcggcagaagcgcctcctgctgctgctccggcggcgccagagatcaccccagccaaagctgacgcctgatcgtcacgctattattcactcacatgtgatgctgcggctgcgactcctaaaccttaaatctagaaatagctggggattgggtttgcattgcatcgtgttcttgccggtctagcaagtgactataagaataatggaataaacgatgacccagtgtgtgtatgatttccgttctgaagaacaacacatcccttgcaggattgttgttcagtagattctacttgtaccgcggctttggagttctgcaaaggactttacttgttcaagaacttcttctctgacaggaaataacatgtgagtgcagac

SEQ ID NO: 28573 - DNA, 1641 bp, Zea mays
  Clone ID: LIB4758-078-D1_FLI
ccgggaaaaatggaaggggcatgcagaggagtctgcctctgcctctgcccccccagactaccccctgcctgcaggctcctgcaactgcaatgtcggcgctcgggacgctctccggcggcgccgccggtgtctccggcctcctccgcctccgccgtcgggtcgcccccgcgctcgcggcgccgtcgcaccacgccgctgggacgttgaactgcgccgccttgcccgatgccgccccgctcgtctggggacgccagctccgcccgtcgctcctcctccccgccacactgctcccgtcgtcgtcgcagggcgccaggaggcacacgccacggcggcccgccgcagccgcaggggaggccaagtctgtgggtttcctggagaagtacccggccctggtcactggcttcttcttcttcatgtggcacttcctcaacgtcatattcaacatcctcaacaagaagatctacaactacttcccctatccatactttgtgtccttgatccatctagtagtgggtgtcgtatactgcctcatcagctggagtgtcggtctccccaagcgagcgcctatcaatggcacgcccctgaagcttctctttccagtcgccctgtgccatggtattggtcacatcactagcaatgtgtccttcgctgctgttgcagtctcatttgcccacactatcaaagctctggagcccttcttcagcgcagctgctactcagtttatccttggacagcaagttcccttctctctgtggctttctcttgcccctgttgtcatcggtgtttcaatggcatcccttactgagctctcattcaactggactggcttcatcaatgccatgatatcaaacatctcattcacctacaggagcatttattccaagaaagccatgactgacatggatagcaccaacgtgtatgcttacatttcaataattgctctcattgtttgcattccgcctgcagtgatctttgaagggccccggctaatgcagcatggattcagtgatgccattgcaaaagtaggcttgacaaagtttgttagtgacctattcttggttggactgttctaccatctgtacaaccagattgctacgaacaccttggagcgagtggctcctctgacacatgctgtgggcaatgtgttgaagcgtgtgtttgtcattggcttctcaatcgttgtttttggcaacaaaattagcacacaaactggaattggcacgtccattgccatagctggtgttgctatgtactcttacattaaggctaagattgaagaggagaaaaggaaaaagagcgcatgatgagctgactgctgtgaatattttaccttctgcgtctgggacacaacaacaacatcgtcgacaatcaagattatgccttgttttgtagtattcgtcttgagtcgctttgtttattaccaatctattatctggtgttgaacagcagcacattgcagaacagatgatcgtcgagtgaccttcatatacgcctgtaactctctctctctccctctctctcagctcagcagtttagatcgactatactcattggacatggacctatctatatatcttctttgtaaacaggacagagtcggactcctgctgcagtattatcaactcatctattttaaactct

SEQ ID NO: 28574 - DNA, 819 bp, Zea mays
  Clone ID: LIB4758-079-A9_FLI
ccgggagatccacattccatagacccaaaattgcaatcagctcatccgtcagcgccacaggtgaccggaaaaccacggcgttcctgcttctctagccggtccgaattgctgaccggatcaacccgagaccttgcaggattatcgatctgattgcggcatgatccgcttcatcctgctgcagaaccggcaggggaagactcgactggccaagtattacgtgccgctcgaggactcggaaaagcacaaggttgaatacgaggtacaccggctcgtggtcaatcgggaccctaagttcaccaacttcgtcgagtttcgcacacacaaagttatctacaggagatatgctggactgtttttttcaatatgtgtggacataactgataatgaattggcatacttggaatgcattcacttgtttgtcgagatattggaccatttctttagcaatgtttgtgagctcgatttagtgtttaattttcacaaggtttacctgatactagatgaatttattcttgctggggagctgcaagaaacaagcaaaaaggcaataattgagcgaatgggtgaactggagaagctggaatgatgaagaccaggaagatgctgccgcgtgtgttgtattccaatttgtattattcgtttcaggtgttttacatttgctctcctggttgttcgttccggttgacagcgtgatgcccatgctgtcactcgaaagcatggtagtagtagttagcatgagtttggtgcccagttacattataacttatcgtaccttcgagaacataataatttcccagcaattgtttcgttcccctctgc

SEQ ID NO: 28575 - DNA, 613 bp, Zea mays
  Clone ID: LIB4758-080-C7_FLI
ccgggagccaaccatctaccagcgactcagcgagcgagagcagcacacacgcagctagctaggagcagcagcagcagcggcgatggcggcctccatgatctcctcgtcagctctggcggtggcgcctcagggcctgccgcccctcggccgccgcgcctcctccttcgccgtcgtctgctccaagaagaagatcaagaccgacaagccctacgggattgggggtggcctgaccgtcgacgtcgacgccaacgggagaaagggcaagggcaagggcgtgtaccagttcgtcgacaagtacggcgcgaacgtcgacggatacagcccaatctacaacgaggatgactggtctcccaccggcgacgtctacgtcggtggaaccactgggcttctgatctgggccgtcaccctcgctgggatcctcggcggcggcgccctcctcgtctacaacaccagcgccctctccggctaaggatatccaatgcatgcgcttcttgcgattcgtcatgtaaaatcagggtgtctgtctataatctagccaccatggatgatgctcaaccttcgtcatgtaacaataatcagtgctactcttcattacataattttgatgctatgc

SEQ ID NO: 28576 - DNA, 1677 bp, Zea mays
  Clone ID: LIB4758-082-A11_FLI
ccgggtgccacacatccatccccgttcgcctcttctcctccctcctgccgggtccttaataaagagcagcagcgcaagaggttggtagagcgagcgagaagaaggcaatggcggcggagagcttcctgttcacctcggagtccgtgaacgaggggcacccagacaagctgtgcgaccaggtgtcggacgcggtgctggacgcctgcctggcgcaggaccccgacagcaaggtggcctgcgagacctgcaccaagacgaacatggtgatggtgttcggcgagatcaccaccaaggcgagcgtggactacgagaagatcgtgcgcgacacctgccgcgagatcgggttcacctccgacgacgtggggctcgacgccgaccgctgcaaggtgctggtgaacatcgagcagcagtcccccgacatcgcgcagggcgtgcacgggcacttcacgaagcggcccgaggagatcggcgccggcgaccagggccacatgttcgggtacgccaccgacgagacccccgagctgatgccgctgagccacgtgctggccaccaagctcggcgcgcgcctgacggaggtccgcaaggacggcacctgcgcctggctcaggcccgacggcaagacccaggtgacggtggagtacgtgaacgagggcggcgccatggtgcccgtccgcgtgcacaccgtgctcatctccacccagcacgacgagaccgtcaccaacgacgagatcgccgccgacctcaaggagcacgtcatcaagcccgtcatcccggagaggtacctggacgagaagaccatcttccacctcaacccgtcggggcgcttcgtcatcggcgggccccacggggacgccggcctcaccggccgcaagatcatcatcgacacctacggcggctggggagcccacggcgggggcgccttctccggcaaggaccccaccaaggtggaccgcagcggggcctacgtcgccaggcaggccgccaagagcatcgtggccagcggcctcgcccgccgctgcctcgtgcaggtgtcctacgccatcggcgtgccggagcccctgtcagtgttcgtcgactcctacggcaccgggaccatccccgacaaggagatcctcaagatcgtcaaggagaacttcgacttcaggcccgggatgatcaccatcaacctcgacctcaagaagggcggcaacaggttcatcaagaccgccgcatacggccactttggccgtgacgacgccgacttcacctgggaggtggtcaagcccctaaagaaggcatccgcttaagaatgtattgggaagttcactggacatgaggttcatcttcgtctggctctgctgatacctgcaaggattgctgctgctgctgcccctggatgtgtgtttgatcagtgactggctgctctgctccatagaagacgaatgaagagagacagatggtgaagaaggctgcggcaattggcaattgccgcagcaagccatgtcggcgccaccgaccgccttagtgattggtataatttggtgtggcagcagccaggattaatgcgctggtcttttatctttactactagtttggtctcgtccggtatcttatttttctttccccttttcgagtctgtactgaaactgctgagagatttgcagttttgatctatcataccctttggtaatactgtac

SEQ ID NO: 28577 - DNA, 646 bp, Zea mays
  Clone ID: LIB4758-082-B5_FLI
ccgggagccacgctccccggaacgaacgacgcagcccaacccgttcccaccaaaccagcggcaccacccatggcttcggcggcggcgagatccggtctccggtcgctggcggcgcgcgccgccccgttgaggcgccgcatgtcctcctccgtccacgacgacgcctatgagacggccaagtgggagaagatcacctacgccgggatcgtgacctgcaccctcctggcggcgtacaacctgtccaagggccacccccacttcgatgagccgccggcgtacccatatctgcacatccgcaacaaggagttcccatggggccctgatggcttgtttgagacgaaggaccaccactgagccctgattagcacacattcaggagctggtgcatgcttaaaagagttatatggttgtttcagttattttcctttccccttgagacctatttgctgcaacaagaaataagaatgaccaaactcttgtattgacagtgaggttttaactgtgctagctgttaccggcttgtctatttttctttgccgtccacgtcatatatggtcacctgtaagttggtcttgcccggtgtcaggaaacggcatcacaattatcaaaaactgttatcatattctgatggcttaagattgcacac

SEQ ID NO: 28578 - DNA, 1442 bp, Zea mays
  Clone ID: LIB4758-083-D10_FLI
ccggggccttaaccattcctcccaacaccacctcgcctgcgatctccgtagcctccgtcgcgtcgagcatcgatcatgtcggcctactgcggaaagtacaaggatgagctcatcaagaatgctgcctacattggcacccctggcaagggtatccttgctgctgatgagtccactggcaccattggcaagcgcctttccagcatcaatgtcgagaacgttgaggagaaccgccgtgccctccgtgagctcctattctgctgccctggtgctctccagtacatcagcggtgtgatcctcttcgaggagaccctgtaccagaagaccaaggatggcaagccttttgttgatgtcctcaaggagggaggcgtcctccctggcatcaaggttgacaagggcaccattgaggttgttggcactgataaggagaccaccacccaaggccatgacgaccttggcaagcgctgcgccaagtactacgaggccggtgcccgctttgccaagtggcgcgctgttctcaagattggccccaatgagccatcacagcttgccatcgacctgaacgctcagggtctggctcgctatgccatcatctgccaggagaatggtctggtgccaattgttgagcctgagatccttgttgatggccctcatgacattgatcgctgcgcttacgtcactgagaccgtccttgctgcctgctacaaggcgctcaacgagcaccatgtcctcctggagggtaccctcctgaagcccaacatggtgactccaggctccgactccaagaaggtgactcctgaggtgattgctgagtacaccgtccgtaccctccagaggaccgtccctgctgctgtgcctgctgttgtcttcctctctggtggacagagcgaggaggaggccacccgcaacctcaatgccatgaacaagctcagcaccaagaagccgtggtccctgtctttctccttcggccgtgccctccaggcgagcaccctcaaggcctgggctggcaaggtggagaacttggagaaggctagagctgccttcctcgccaggtgcaaggccaactctgaggctaccctcggcacctacaagggtgatgctgccgccgacaccgagagcctccacgtcaaggactacaagtactgagttgcttctctttgcgtgcccgttttggaactcctgcctacgagctaggttgcggagtgtggtttgctcgttagagcttattttcggacatccaaaaaacatgcttcctatgtgggatgatggttatctttatatttgtatgttaattagtctctttgctgttaaatttcgtgtaagttggtcctgccgatggagaatcgagcagccccctttttttgttctatcaactatgctgtaatgctggctatgtatcggcaaaaacaattctatatgctgagttggagtcggcaaaaattcgt

SEQ ID NO: 28579 - DNA, 764 bp, Zea mays
  Clone ID: LIB4758-083-F10_FLI
ccggggattagcaggccgcctgcgctccttgcccctaagcctcgtttccggtgtacgactccaacgacgacgagatggcctccccgctccgtcggagcttcccctccctcggccgcgcgcttctcacgccggcgccggcgcggatgctctccgcggaggcctccgatgccctcgttgagatcaagcccagggagattgggatggtctccggcatccccgaggagcacctccgccgtaaggttgtaatttattcaccagctaggactgcatctcagcaaggttcaggcaaagttgggaggtggaaaattaactttttgtcaacccaaaagtgggagaacccattgatgggatggacatctactggggatccatatgctaatgtcggtgaagcaggacttacattcaacagtgcggagtcagcaaaagcatttgctgaaaaacatggatggaattatgtggtacggaaacggcatacacctcttctgaagcctaaggcctacgctgagaacttcaagtggaaaggccccccgaaggcggagcaagcatgagctcaaggcctccaccagcatgtgaccctgacactggaatgatgttattttcctcctgagctctagagtctagacctcttgtccgtgagccttttctttcaacagtgtccgtcgtgaaagtacgagctagaatacgcatctatcaaacttgtaataagcatgatctgtaatcaaacaaaaatccttccaaaacgtttgttccttgatgacattgtg

SEQ ID NO: 28580 - DNA, 1031 bp, Zea mays
  Clone ID: LIB4758-083-H5_FLI
ccgggaaaataaaacacagcctcacgatccccggctccccgcactgcccggtgccccgcgagctgctcctctacacacgccagcgagaaccagccaaccccaacctgctcgatcggcgcaccgtcccgaaggccgcagggccgtcgtcagccatgatccagctcctgttctcgctgctggccgcggaggcggcgctggtgctggcgctgctcttccccacgcccgtgcgccgcctggctctgctcgccatcgatcgcgccaagagggggcgcggacccgtcatggccaagaccatcgcgggcaccatgctcctcgtactagtctctgctttctacagcgtcgctaagatccgccgccgcgagggggagctcggacagctcacgcccaccgaccaggtgctcgccagtcgccacctcctcgaggcgtcgctcatgggatactctctgtttcttggattaattattgaccgactacatcactatattagagagttgagaatgttgaggaaagacatggaggctgtaacagggcagggccggacactagaagcagcaaaatctggaagcactgatgagattcaaggataccagaaagaggttgcgagtttgaaggaacaagtgcaagggctccagaaccaatcacaaaagaaaacagagcgactaaaaaccgccgaagcaaattctgtagctttacagaaacaatcggaaggtttactcgctgaatatgaccgtctcattgcggagaacagggatttgagggaccaactgcagtcaattgacctccgcctgtcccattctggcggaaagaagaactcgtgaagcaagttctgcaattttgaagagcataatcttctgtagattttcttccaataggttaactgtactcggttttctctattatcataatcgcccatgtaattcagtagatggatttgcctatgtaattcagtagatgcgtgcgtgtatgtatgagtggaccatttaatgctttatgtcttggtttagtgagatcaaataagaacctgcatctac

SEQ ID NO: 28581 - DNA, 990 bp, Zea mays
  Clone ID: LIB4758-084-G9_FLI
ccggggccatttcaccaccgcctcgccccatcctctccccctcccgtcgcgccagtcaacagcctgtctgcctcttccctcgccacccatggccaccgtagcgcgcaccctcgtcgccgcatgcccggcacggtctctcctccgcctccggtctcggcgcctcccgtcctcctcttccatctgtcccgcgcggcaacgtgccggcgtcgggtctgtccgctgcatggctcggcgaccggattcctcctattccccgctgcgttcggggcagggcggtgaccgtgcaccgactgaaatggcgccgctgttccctggttgcgattacgagcactggctcatcgtcatggacaagcccgggggcgagggcgccaccaagcagcaaatgattgattgctacatccagacccttgcccaggtgctagggagtgaagaggaggcgaagaagaagatatacaatgtgtcctgcgagcgctattttggattcggatgcgaaattgatgaagagacctccaacaaactcgaaggtcttccaggggttctttttgtgcttcctgactcttatgttgatgctgagaacaaggattatggtgctgagttattcgtgaacggtgaaatcgttcagcggtcgccagaaaggcagagaagggtggagccagtgcctcagagagctcaggatcggccacggtacagtgaccggacccgctatgtgaagcggagggagaaccaatcttaccagagatgatgtctccgtttctggagatggaaaatgccagggtttccacaggtgtgccatacttttgatgcagatgcaggagcaacccccactacccacatgagaatgacatccgttgtgtttgctgcgctttctaagcttgacaagttgacatgcttatgcgtttgggcttgtacctctagttgatatgacggtgtatccttttaactccgcataatattgtgtttgaagtcttctttagtcagaaattattgacg

SEQ ID NO: 28582 - DNA, 1084 bp, Zea mays
  Clone ID: LIB4759-001-H5_FLI
agtcgtcgtcggcggcccacgggttgcaggagctcctggaggagctcatgcagtgcatggcccagcctaacgtctccgacctcttcccgttcctcagcgcgctcgacctccaggggtgtcgtcgccgggtggccgtgcaactgggccaggtcctacaggtcttggacgacatcactgaccgccgtttggcctcctcctcctcctcctccacgtctagcaagggcggggacaggcgcgacgacttcctcgacatcctcctagacctccagtccacgggcaagatcacgcgcgacaacgtgacgctgacgctcttcgacatcttcgcggcagggagcgacaccatggcgctgaccgtggtgtgggcgatggccgagctgctccgcaacccgggcgtgatggccaggctgcgcgcggaggtcagggacgcgctgggcggcaaggacgccgtcgaggaggccgacgcggcgggcctgccgttcctgcaggccgtcgtgagggaggccatgcggctgcacccggcggcgcccgtgctgctgccgcacaaggccgtggaggacggggtacagataggcggctacgcggtgcccaggggttgcaccgtgatcttcaactcgtgggcgatcatgcgcgacccggcggcgtgggagaggcccgacgagttcctgccggagcggttcctggccagggacctggacttccgcgggaagcagctggagttcgtcccgttcggctccggccgtaggctgtgcccaggcgtgcccatggcggagcgggtggtgccgctggttctagcgtcgctggtgcacgcgttccagtggcagctgccggccggcatgtcggcggaccaggtcgacgtcagcgacaagttcaccaccaccagtgttttagccttccctcctatcaaagctgtgcctctgctctgatcaccacctagcaacccagcttgagtgtccagtcgattttggccagcaaaatcggaaaagaaatccctgcagccggctgcacacaagcaccacgcaggcttcgttcgtgacacgtatccacgcccaacaattttaaagcaatataacatcaatcttaaagc

SEQ ID NO: 28583 - DNA, 1566 bp, Zea mays
  Clone ID: LIB4759-002-C6_FLI
ccgggctctcacctcgacgcgcctccaaaagttcggagccgccggcccgtccgcctccctctccgcctcccgtccccaaggccaatagttttcaagtggcaatggcggaccaggctaaccaacccactgtccttcataagctcggtggccagttccacctgcgctcgatcatctctgaaggtgtacgggcccgtaacatatgcccatctgtctcatcttatgaaaggagatttgccacaaggaactacatgacccagagccttttgggcccttcgatgtctgttagcggtggcatcaatgtcccagtgatgcggaccccgctctgtgctaatgctcctgctgagaaaggaggcaagaactccatgatcgatttcatgatgggcggtgtttcagctgctgtttcgaagactgctgctgctcccatcgagcgtgtgaagctgcttattcagaaccaagatgagatgattaagtctggtgggctatcagagccgtacaagggtattgttgactgcttcaaacgtaccattaaggatgagggtttctcttccttgtggaggggtaacactgctaatgttattcgttacttccctactcaggctttgaactttgcatttaaggactacttcaagaggttgtttaacttcaagaaggatagggatggttattggaagtggtttgctggcaacctggcctctggtggtgctgctggtgcttcctctttgttttttgtgtactccttggactacgcgagaacaaggttggccaatgatgcgaaggctgccaagggaggaggtgaaaggcagttcaatgggcttgtggatgtctaccgcaagacactcaagtctgatggtattgctgggctttaccgtggatttaacatctcctgtgttggaatcattgtttatcgtggtctgtactttgggctctatgattccatcaagccagttgtccttactggcaacctccaggacaatttctttgccagtttcgctctgggttggctgatcactaatggtgctggtcttgcatcttaccccattgataccgtccgcagaaggatgatgatgacatctggtgaggctgtcaagtacaagagctccttggatgcgttccagcagattcttaagaaggaagggcccaagtccctgttcaagggtgctggtgctaacattcttcgtgccattgctggtgctggtgtgctttctggctatgaccagctccagatcctcttcttcggaaagaagtacggttccggcggtgcttaaatggagaaatatgatgacgaacaagagcagtgtgtgttcccggtcctttccaatcaggatctggtgaagtttttgcctttcatatcgaagaaattaataattcatgtagagggaggattcttccaacaatttgttttggatggagacttagatctccaaacactcgtaactatcctactaggtggtgacatcagtccccaaaaacatttatggtcatagagtctgcccttcgtttgtcagtcgggcaatttttcttgcatacaatgccttcgtttaagtatcggatgagttgctgcgaccg

SEQ ID NO: 28584 - DNA, 1765 bp, Zea mays
  Clone ID: LIB4759-004-A2_FLI
ccgggctctccctccccgtgcgccgcctacagcctaaacgcaccgcaccagacaagaaacaaggggagggagaaccgagagcggcggcgaccggcgagagagagggagggagggacgagatagattcataggtactagcggaggaagcgagtcaagggaaagatgcggactcccgcgatgcgcgttgcctaaaagttccatttcattccttccggcggaggccgggcaatacgctatctctggcgagagagatgccggcgacaggagaaatccacggcctttattagagagaagagatcctattcctacggttctcctcgcatcctgttgcttctgcgtgcggccagacgcgggcacgatatgcaggccgccgccgccgccgccccgtggacgacgaagaccctgccggtgtttgggaaccacctcggcaaccccacgcgcttcacaggcgcctcctcgtccttccacagtacgcccgcctccttcgccaagtggaggaacaaatgggactgccacaagagcgaaaaaggagcacgaaaggcatccaggaattatgagaggtatgtggttcggcaaaaacgagcagaaggaaagaaggccctaaaggattatcttctctatggaaagtcattgcctcatttacaggatggaagcacaggtagctttgctaactcacatgcaattccgaggttcaaaacgtttaggaaaggacctcaaactcactggtcatcgaattcatggcaaggcgtacacaatcacagaaagaataaaaaggacaaggaaaggttctgcaacttcttccatgatgaccatcatgtgcaccctgatgacatctttgaagctgtcttcggggcacattatggttttacttggtctcaaatatcgtgggaagggtttcacttcagggacaaatcgttcagatttagatggagcggccgtgaatcacgcagagagagaattccatgtgacagcgaagatgaagaaagcgcggatgagagcagagaaacagccagcgttggttcacatgctcacagggtcatccttggattacaaccatgtggtccactaactctagaagatgttaaaactgctttccgggcatctgctctgcggtggcaccctgacaggcacccggggtcatcacaggccatggctgaggagaagtttaagctgtgcgtgaatgcgtacaattcactctgcagtgtcctcaaggctgcttaggttgtgtttgctgtcactggaggatgttagcttgttatggtatatcagttttgaagggctcagggcctgaacaatttggcggggaaaccactggcgaccatggatgcagtgcagtgggttgttttgtttcacttttcgtttcgattgaaatagcaagggccaagctccgacgtcagggttgatttggtgattgagggggaaatggactaatttccccccaatcctctcgtgatttctggtcaccaaatcagccctgggaaacttaaacccccgggatccctgcctttaaaccctctgggatctctgcattttctcagggtgagcaatccatcggggtaccatttgaattaaacatttatttccttatgtgaggttttcctccctgtatttggcctcccttgcttccaaactagtcccaaaagggataggagcgccactgtttgttgttgtactaacttgtacactagtgtgaattgtaacatttgattcataaaagtggaacaaataaaaatacaaaggggcatgtgaggcatgagaatcctgc

SEQ ID NO: 28585 - DNA, 998 bp, Zea mays
  Clone ID: LIB4759-005-E7_FLI
ccgaaaaccacgggaaggagacgagacggggggaaaaacactgcgcaggcacaggcagggagagacgtaaagctgccgcttcgtgcgcgtcgacgtcacctcgccgccgggggccgtatcgccgcggggtcccctagggctcccttccgtcgccggactgggcggtcgccggacggatcgggaagcgacgacctgaggggactgcctgagatggccgggaagaagcgcaaggcggaggcggcacgcctggaggagacggaccgggtgctctacggggccttccggggcgccgccaactcgctctcgcagctctacacgctcggcatgggcgcgcagaaggcctccttccacgccggcgaacgccacgccatggaaaaactttatgaatggatcctgaggcagcacgaaaatggtttgaggctaacagttgctgatgtagcctcccatatccagcatgagattcagtatggaggtgacaatgcatcagcctctccaaggtcacaataccctagccaaagcactgcaccgacaatgcacattcccaacacaagcaaccagcaaccatcgccaagcttatttgctccaggaaaccctggggttgacacagtccaagaattccatggtcttttcaagcgcattatccagccccatccggcggagcctgcaaccttaccacctagagcaggacggggatgcagggtacttcgcgaacggtgcaagccgcgatgtgaaccccacggcttcgaatgattcgtccatggacatgcactcggacagcccagctcatgactcctactgagcagctcccaccatggaaccagcctcaagaacagcacttcaagtggaagaagtctgctgtcacagccttcccaggcctagtagtaatattcaatttaacaccttccatagcctctcttacactaagcgtgtgatgtcttgtgttgttactactacttaccacttgttgctttgcgagaattatgtaatttgcatgtact

SEQ ID NO: 28586 - DNA, 1607 bp, Zea mays
  Clone ID: LIB4759-006-E4_FLI
ccggggtcggctccaaagcaagaccctgttcagccacacgctctgtcttggtcggtctaagtgttgtcctcacggattcgcgatgccgcacttcgtgctggtgcctatgctggccgcgggccacgctggtccgatgctcgacatggcccgcgctctggcaggccgaggcgcgctggtcacgttcgttaccacgccgctgaacctgctccgcctcggccgcgctcgcggtgatggcgagctccccatccgcttcctcccgctccgcttcccgtgtgccgaggccggtctacccgagggctacgggagtgccgacgcgctgccgggcatcgacttcctaaggaacttccacgacgcgtgcgccatgctccgcgcgccgctcgttgcgcaccttagggaggccgacccgccggtgagcggcctcgtttctgatacctgccacccgtggactggcgcggtggcgcgggagctcggcgtgccgcggcttgcgttggagacattctgcgctttctcctcgttctgcatgcgccagatgagcatccacagcgtcttcgagggaatcagtgaccacaagcgccccgtgcgcgtccctggcttccccatacacgtcgagatgtcgagggcgctgtcgccggaaaacttctcgggtttcggcaaggtgttcgcggacgaggtcatggctgaaaacgcgagagccgatggcctggttgtcaatagcttcgcagagctcgagcccctcttcgttgatgcctatgaggcggcgctcggcaagaagatatgggccgtggggcctctctccctccagcacaacatcaacatgccgctgtctgcgacgtctggctctgatgacgcgaccgccgtccgctgcgggagctggctcgagcagaagaagccccggtccgtggtgctcgtgagcttcggcagcctggcccgctcgtcgcagccgcagctcgtggagatcgcccacgggctggaggcgagcaaccgcccgttcatctgggttgtgaagcccgccagcctcgccgagttcgagcggtggctgtccgacgacggcttcgagcgccgcgttggggacagggggctcgtggtcacgggctgggcgccgcagaaggcaatcctgtcgcacccggccacgggcgccttcgtgacgcactgcggctggaactccgtgctggagtgcgtcgcggcggggctgccgatgacgacgtggccgcacttcggggatcagttcatgaacgagaagctcgtggtggacgtgctgcgggtgggggtgcccgttggcgtgaaagacgcgacgcagtggggcgtggagatggagggcgtggtggcgacacgggaggatgtagagagggctttggaggcggtgatggacggcggggtggtgggggcagcgcggcaggcgagggccgccgagctcggcaggaaagcgcgggacgccgtggcgcgtggcggctcgtcggatcggaacatggcgcttctggtggacttcgttgagcagatgaaggccaccgtgtgacaatgtgaggaggataagaatatttgaaataatacataatgtttttatcaattgggtaatacagttattaatgtggtactcgcgttagtgcaac

SEQ ID NO: 28587 - DNA, 1451 bp, Zea mays
  Clone ID: LIB4759-006-F1_FLI
ccgggacaccgcacacgcacgcacgaacgcgctcccaccccctcccgccgccaccgtcgccaaaaccccggcccgactcggcgtcctccgccaacctcctcctgggcagcgccggcggggggatatggcatcggaggacgtggtgggcaagagcaggggcgacacggccgtcaccaccatcgtcaacctggcggaggaggccaagctcgcgcgcgagggggtcaaggcgcccggccaccagatcctcaccatctgcaagtcgctcgtcgccggcggcgtagcaggcggagtgtctcgtactgctgttgctccacttgaacgattgaaaatattgcttcaggttcaaaatccgcacagcatcaagtacaatggtactgttcagggtctcaagtatatctggagaacagagggcctccgtggacttttcaagggcaatggtaccaattgtgcaaggattgttccaaattctgccgtgaagttttttagctacgagcaggcgtcaaaaggatgctcagcttactccgctcttgcgccttggagctggagcatgtgctggtatcatagctatgtctgctacttacccgatggatatggttaggggaaggatcactgttcagacagacaaatctccctaccagtaccgtggtatgtttcatgcactgggtacagtctaccgtgaagaaggctttcgtgctctatacaaagggtggcttccatctgtaatcggagttgttccatatgttggtctcaacttcgctgtatatgagtccctcaaagactggctactccagacaaattcatttggccttgcaaatgacaacgagctgcacgtagttacaaggcttgggtgtggagctgtggcgggaaccattggccagactgttgcatacccgcttgatgtcatcaggagaagaatgcagatggttggttggagccatgctgactctattgttactgggcaaggcaaagaagcactccagtacaatggcatgatcgatgcattcaggaagactgttcgttatgaaggcgttggtgctctctacaagggtcttgtgccgaactcagtcaaggtggtgccctcaattgccattgcatttgtgacttacgaggttgtgaaggatgtgctaggagtagagatgaggatatcagactgaggatggtcgttttcaactgctatttttgtaggctttgggaagttgtgttttttttgtaggcagggcgggtagaaggatatgaccgcggctccattcagcatcaggccctctctggcttcaggtcctagaattgtttgctgggtcgtgcaaaaagtaataagtcggctgtaaagcttattaagcatctgcctaactcatcaaaagaaatctattccttattgatgatgtaccgagatttttgaacttaaagcggtactacgtgctgctaacagttgattaatgatttttctttgcctc

SEQ ID NO: 28588 - DNA, 1481 bp, Zea mays
  Clone ID: LIB4759-008-C11_FLI
ccggggtcgtcgtccgcatcccccgcctgccttaaccattcctcccaacaccacctcgcctgcgatcttcgtagcctccgtcgcgtcgagcatcgatcatgtcggcctactgcggaaagtacaaggatgagctcatcaagaatgctgcctacattggcacccccggcaagggtatccttgctgctgatgagtccactggcaccattggcaagcgcctttccagcatcaatgtcgagaacgttgaggagaaccgccgtgccctccgtgagctcctattctgctgccctggtgctctccagtacatcagcggtgtgatcctcttcgaggagaccctgtaccagaagaccaaggatggcaagccttttgttgatgtcctcaaggagggaggcgtcctccctggcatcaaggttgacaagggcaccattgaggttgttggcactgataaggagaccaccacccaaggccatgacgaccttggcaagcgttgcgccaagtactacgaggcaggtgcccgctttgccaagtggcgcgctgttctcaagattggccctaatgagccatcacagcttgccatcgacctgaacgctcagggtctggctcgctatgccatcatctgccaggagaatggtctggtgccaattgttgagcctgagatccttgttgatggccctcatgacattgatcgctgcgcttacgtcactgagaccgtccttgctgcctgctacaaggcgctcaacgagcaccatgtcctcctggagggtaccctcctgaagcccaacatggtgactccaggctccgactccaagaaggtgacccctgaggtgattgctgagtacaccgtccgtaccctccagaggaccgtccctgctgctgtgcctgctgttgtcttcctctctggtggacagagcgaggaggaggccacccgcaacctcaatgccatgaacaagctcagcaccaagaagccgtggtccctgtctttctccttcggccgtgccctccaggcgagcaccctcaaggcctgggctggcaaggtggagaacctggagaaggctagagctgccttcctcgccaggtgcaaggccaactctgaggctaccctcggcacctacaagggtgatgctgccgccgacaccgagagcctccacgtcaaggactacaagtactgagttgcttctctttgcgtgcccgttttggaactcctgcctacgagctaggttgcggagtgtggtttgctcgttagagcttattttcggacatccaaaaaacatgcttcctatgtgggatgatggttatctttatatttgtatgttaattagtctctttgctgttaaatttcgtgtaagttggtcctgccgatggagaatcgagcagctccctttttttgttctatcaactatgctgtaattctggctatgtatcggcaaaaataattctatatgctgagttggagtcggcaaaaattcatatatgctgagttggag

SEQ ID NO: 28589 - DNA, 1850 bp, Zea mays
  Clone ID: LIB4759-008-F1_FLI
ccggggtgtgtgtatttaaacgcctccggccgtatcaatcatcctgactggtcactgtgccattgccgccgtccgtactagctagcaagctccgccgacggtcgatcgagcccatccactagactacaccgccgcggcaagcaatggcgtgcggctctgctacagccgctcgaccagcagcccgcctcccgctgctggcggcggtggtggtggcgtcctccttcctcgccgtcgcggcgccgccgggcgcgctgttgacgagcgtcccggggttcggcaacaagcagcagctgccgtcgaagcactacgccgggtacgtgacggtggacgagcggcacggcaggcggctgttctactacctggtggagtcggagcgcgacccggcccgggaccccgtcgtgctctggctcaacggcgggcccggctgctccagcttcgacggcttcgtctacgagcacgggccattcagctttgagtcatcaggagggacagctgggagcctgccaaagcttcatctcaacccttatagctggtctaaggtgtcgagtgtgatatacttggactcccctgccggcgtcgggctttcctactcaaacaacgtttcggactacgagactggcgacttcaagaccgccgccgattcgcacactttcctgctcaagtggttccagctctaccctgagttcttggcaaatccgttctacatagccggagagtcgtacgctggcgtttatgtccctaccctttcaagcgaagtcgtcaaaggaatccacaaaggagtgaagccagttataaactttaagggctacatggtcggcaatggtgtgtgcgacaccgtctttgatggtaatgctcttgtgccgtttgcgcacgggatggctctcatttcagagagtatatacaaggaagccagcactgcatgccaagggaattactggaactctagcagtgcaaaatgcgacgaggcgctgtcaaaagtcgagacggaaatcgacggattaaatatctacgacatccttgagccatgttaccacgccccagctgataccaaacaagcagcagtgaccccacaggcacagagtactagcgagctgcctcagagtttcaaagacctcggcgtgaccagcaacaagcctctccctgtaaggacaagaatgcacggacgggcgtggcctttgagagctccggtaagagacggccgcgttccgtcgtggcaggagctggcggctgatgtagcttcgacttccagtggagttccgtgtatgagcgatgaggttgcgacagcgtggctaaacaacaatagcgtcagatccgctatccatgccgaaccagtcagttcaatcggaccctgggaattatgcacggataaactggattttgatcatgacgccggcagcatgatcatctatcacaagaacctcacgagtcagggctaccgtgctttcatctacagcggcgaccatgacatgtgtgtaccttacaccgggactgaagcatggactgcgtctttaggctacgccgtcgttgatccgtggcgacagtggattgtcgacgaacaagttgccgggtacacccaaggatatgaaaagggccttacttttgccactattaagggtgctgggcacacagttcctgagtacaaaccacaggaagcactagctttctacagccgttggcttgccggtgctaaactgtgaggaggcctattttgtgtgcaaaggtcatgcagtactgaatcaaacagaagttggataaagcatgcagcaataaggcagtcgaaggatcaaagtatccaacgcgccaactacaatgttgcattcattttcacatgttataccaatgcagttgct

SEQ ID NO: 28590 - DNA, 1694 bp, Zea mays
  Clone ID: LIB4759-010-A9_FLI
ccggggaagccaagagccgtatcgacatggaactctccctgacctcatctgctgctctgcagttcgtcctgctcctccccctgttctctgtgctctgcatactctacctgcgccaggatcccaagaagcagcctcgcgctcatggcctcaaggtctacccgctcgtcggtaccctcccgcacttcgtcaagaaccagcgccgcttcctccactggtccaccgacgtcctcaagcgcgacccctcgcacaccctgtcgttcaaggcgctcggcctcaccggcggcgtcatcacggctaacccggccaacgtcgagcacatcctcaagaccaacttcgccaactaccccaagggcgagctgacggtgtctatgatcgaggacttcctcgggcacggcatcttcaactccgacggggagcagtggctgtggcagcgcaaggccgccagctacgagttcagcaagcgctcgctcaggagcttcgtggtcgacgccgtccggttcgaggtcgtggagcggctgctgccgctgctcgaccgggcgcagcgcgacgggcggacgctggacgtgcaggacgtgctggagcgcttcgcgctcgacaacatctgccgcgtggcgttcggtgacgacccggcgtgcctcgccgaggaggagggcatgggcatggcgatggcggcgcagcagaggcagagcgccgagttcatgcgcgccttcaacgacgcgcagagcgccatcatggcccggttcatgtcgcccgtgaagtcgctgtggcgcctcaagaggctgctgaacgtggagcccgagcggcggatgcgcgaggcggtccgcaccgtccacggctacgccgacaggatcatccgcgagcgccgggcgaggggcgaggcggccgggcccgcgcgcgacgacgacttcctgtcgcgcttcgccgcgagcggcgagcacagcgacgagagcctccgggacgtggtcaccaacttcctcctcgccgggcgggacacgacgtcgtcggcgctgacgtggttcttctggctggtctccacgcggcccgacgtggaggagaagatcgtgcgcgaggtccgcgcggtgcggcgtctgggaagcgcgggcgcggcggcgccggcgttcagcttcgacgagctgcgggacatgcagtacctccacgcggccatcaccgagtccatgcggctgtacccgccggtggccatggacacgcacagctgcaaggaggacgacttcctccccgacggcacgttcgtcggcaaagggtggctgacgacctactccgcgttcgtgatgggccgcgtagaggacatatggggcgcggactgcgaggagttcaggccggagcggtgggtcggcgaggacggcgcgttccgcccggagagcccgttcaagtacccagtcttccacgccgggccacggatgtgcctcggcaaggagatggcgtacatccagatgaagtccattgctgcatgcgtgctcgagaggttcagcttccagttcgtcggcggcggggagcggccggggctcgtgctctcgctcacgctgcggatgcagggcggtctgcccatgaaagtggtcaccaggacgaactcggctctaggctagactttccacaccagacagtatccatctcaatacacatacgattggacggtttagggagattggggtgtaatttcacttagttttcgagcc

SEQ ID NO: 28591 - DNA, 1641 bp, Zea mays
  Clone ID: LIB4759-011-A11_FLI
ccgggagtcgagctcctccggtctctgccatgaacagcaaatgagcagagctcccaagccgttcaatctccagatcatttccctctcgtcctgctccaatccactcgccggccatctccacaggctcgcctcggctgctgcagctgggttttgctccctgagccgccggatttcgacaggggtcgggtcggccgtccgatggggagcagggtgaaggaggacgagaggaacgagaagatcatccggggtctgctcaagctccctggcaaccgccggtgcatcaactgcaacagcctggggccacaatatgtatgcacaagcttctctactttcatctgtactaattgcagcgggatacaccgagagttcagtcatcgtgtaaaatcagtatcgatggctaaattcacttcccaagaagtttcggcacttcaggaagggggcaatgagcgtgctaaggaaatctatttcaagcattgggacttgcaaggccctgttattgacagtagtgatgtacatagactcagaaatttcatcaagaatgtatatgttgaacggagatattcagaccaaagaattggcgaacatttagcgcaagcaaagaaaccatcatcttcgaggaccgacgatcccagccctgcaacattcaaagatgctaaattatatatgtcaaaaaatctgattgacttcgattcagatctggaacctcctcaaggtgttgctcagactgatattcagaagggctcttcacctcaaacagatgttggttgggcaacttttgatgatgctacatccaaaaaaactacaaccatgccttcaacttccagtactaattttttggagggtccaatgctacagatcgccgatttgacatcagcaccacaaattagattttcaaatgccaagtccttgtcttttgccccgtcaaatcgtggaaaccaactgaaccaacagaatttctctcctgtgaatactacacagtacagcaatactctgttgaacagagctactagtgctccagtgcatagccaggatatttttgcaatgagctatcgtccagtatcttcagcctggaactggcaaccaaatcccagtgtaaacatgcagtacggacaacatcgcacgcattatcctgttgggattgtaaatacaactcaacttgcccatccatatccagtgaatcctgttagcttggcaggagggcctgcatcggctcatgcctccaccaggtttccttctttaacttctatgcaagaagcattaccaaatctgggcagtaccgcagtgctgtcgcgtgctccagttcatcagtacatggttcagcaacatacagttcaagtaccgaattatactttcccctccggatatgaaggaaccagagggatcgccgcaactgccagcacatacggattacctccaatggatcagcgtttggctgcgcagaatctgcaggtcatgaaccacggttctttaccccgagttggtgggaacccgtttgcttagtgttgttacttcggtcacctcagttcggtcgtttgtgtatagttttagcatttgatgatacggttttgtcgtgagaagatgcgagtggaataatgtagctgatcaagcagagtggcaacaagtgcctgacaggttttgtgc

SEQ ID NO: 28592 - DNA, 1089 bp, Zea mays
  Clone ID: LIB4759-012-A11_FLI
ccggggtcattaatgataatggagagaggagacgaggagctgaagctgctgggcatgtgggcgagcccgttcgtgctacgggtgcaactcgcgcttagcctcaagggcctgagctacgagtacgtggaggtggacatcagcaacaagagcgagctcctcctccactccaaccccgtccacaacaaggtccccgtgctcatccacaacgggaaccccgtctgtgagtcgcagctcatcctgcagtacatcgacgaggccttcgccgccaccggcccgtgcctcctcccggccgacccctacgaacgcgccgtcgctcgcttctgggccgcctacatcgacgacaaggtgctggcgtcttggatgcaggcctcgaggggcaagacagaggaggacagagccgagggaagaaatcagtggctcgtcgtggttgagacgctggagggagcgctgagggactgcgccgccggcaaggggatgatgatgcccttcttcggcggcgacagcgtcggctatgtggacgtggtgctcggcagcctgcttgggtgggtcagcgcaaaccaggaggtttggggcatagagtgcttccatccccgacgggctccgctgaccgcttcgccgcactgcaaaccgtccagacggtggtgccccaagtcagcaggctggttgagctcggcatgatgttgagggcccgtcaatcggacggggccgctgctgcaagcaactgaaaccactcgctatttaggtcctaaaacttgttcatcgaacttatttagcgcactactggaaacagatactttgccgagtacaatttatggagcactcacgaaaataatcttggtcgagtgccactctttgcaaataatgacactcgatatagttgtcatttgccgactatcgggatctcagctaaatatgatgcatgacaaaaggtcattagcagctatctatacatgatggccgttatctataccgagtgtccacctttaagcactagataaattaaggctaggtttctacacatagtgtgtgacagttttctcgaagttgctcttatgtgcgaataatataacaatctagtgtgtttgaaat

SEQ ID NO: 28593 - DNA, 1178 bp, Zea mays
  Clone ID: LIB4759-013-F8_FLI
ccgggctccccaactcggcaactccgcctcccaagtcacacccgcactccctcgctcaccagaggaactagcggaccaggcaaagccgagccgcaaccgcgaagatcttgcgtggcctccttttcccagctcgtcactgtgccgctcgtgccctccactcccggtccgcccaaccaataatccatccatccatccaccaccaccaccccgctgcggcgatgtgcggcggcgccatcctctcgggtttcatcccgccgtccggggtggcggcggcggcggcggcggccaagaagaagcagcagcagcggtgccgtgtgactgcggacctgctatggccggggcccggcagtaaggaagctccccaggaccaggaggaggacttcgaggccgacttccgcgagttcgagcgcggcctcggcgaggatgacgtggacagcgccggcgaaggcggcgaccccgaggtccaggagcttcctccgccggagccgacgaggtttgccttcgccaccgcggccaaggcagcagttgatggcgtgatgacgacgactccaaaggatgtcaaaggagatagaccagtaaagcgcggccggaagaaccagtacaggggaatccggcagcgcccttggggcaaatgggcagctgagatcagggaccctaacaagggcgtccgcgtctggctcggaacctacaacaccgccgaggaggcagctagggcatacgacgccgaagctcgcaagatccgcggcaagaaagcgaaggtgaatttccccgatgacgacgcgccaggcactggtcacaggccagcgaacgcagcgcctaggctagtagctccacccccaccccccaaggcctgcgccgatgagatctttaacaacctgaagaacgacgacgacgacgacaacaacaacaacaacgatgatctgtttgcgatgtttgcgttcggtgacaataagaagaaggttcctgcagcgaagccagccgccgccgagggtggcagtggcagtggcagcttcctcgtccctgcgcctgcggtggcggtggtgcccggtaataagaggaggtcgtccgcgaccaacactatgctctccgtctccgacgaccagcgcagcaactcctacggctccggctcctccgacttggtggggtcgtggtcgtgggacgacgacgcggcggccctc

SEQ ID NO: 28594 - DNA, 1619 bp, Zea mays
  Clone ID: LIB4759-015-H3_FLI
ccgggacctcgacgcgcctccaaaagttcggagccgccggcccgtccgcctccctctccgcctcccgtccccaaggccaatagttttcaagtggcaatggcggaccaggctaaccaacccactgtccttcataagctcggtggccagttccacctgcgctcgatcatctctgaaggtgtacgggcccgtaacatatgcccatctgtctcatcttatgaaaggagatttgccacaaggaactacatgacccagagccttttgggcccttcgatgtctgttagcggtggcatcaatgtcccagtgatgcggaccccgctctgtgctaatgctcctgctgagaaaggaggcaagaacttcatgatcgatttcatgatgggcggtgtttcagctgctgtttcgaagactgctgctgctcccatcgagcgtgtgaagctgcttattcagaaccaagatgagatgattaagtctggtaggctatcagagccgtacaagggtattgttgactgcttcaaacgtaccattaaggatgagggtttctcttccttgtggaggggtaacactgctaatgttattcgttacttccctactcaggctttgaactttgcatttaaggactacttcaagaggttgtttaacttcaagaaggatagggatggttattggaagtggtttgctggcaacctggcctctggtggtgctgctggtgcttcctctttgttttttgtgtactccttggactacgcgagaacaaggttggccaatgatgcgaaggctgccaagggaggaggtgaaaggcagttcaatgggcttgtggatgtctaccgcaagacactcaagtctgatggtattgctgggctttaccgtggatttaacatctcctgtgttggaatcattgtttatcgtggtctgtactttgggctctatgattccatcaagccagttgtccttactggcaacctccaggacaatttctttgccagtttcgctctgggttggctgatcactaatggtgctggtcttgcatcttaccccattgataccgtccgcagaaggatgatgatgacatctggtgaggctgtcaagtacaagagctccttggatgcgttccagcagattcttaagaaggaagggcccaagtccctgttcaagggtgctggtgctaacattcttcgtgccattgctggtgctggtgtgctttctggctatgaccagctccagatcctcttcttcggaaagaagtacggttccggcggtgcttaaatggagaaatatgatgacgaacaagagcagtgtgtgttcccggtcctttccaatcaggatctggtgaagtttttgcctttcatatcgaagaaattaataattcatgtagagggaggattcttccaacaatttgttttggatggagacttagatctccaaacactcgtaactatcctactaggtggtgacatcagtccccaaaaacatttatggtcatagagtctgcccttcgtttgtcagtcgggcaatttttcttgcatacaatgccttcgtttaagtatcggatgagttgctgcgactaactatttgtttgtctttaccttttgcaatgcttgatcgttgatagcattgattttgtc

SEQ ID NO: 28595 - DNA, 1679 bp, Zea mays
  Clone ID: LIB4759-016-D9_FLI
ccgggagacaaatagcacacaatcaaccgtcgtctccttcctcgccttcataggcttctccaaattccaaatcgttgctagagaaaccaccaaaccggccggcagccaggcacctgtcactcagtttctcaccccttgccaccactctcccgtgacgccttctagaagcttccggaaccagacaaccactctgcgccgagttttctgaaggcggctttggtctttcgagatctcgttgtcggtgccatggcgggtcagtactgagtgcgcgggcgggagcaggtgaaggtctgccagctcgagatcccgatgcagatccgggagggcccggcgcggcggcaggcgccgtcggccgcgggggcgccgccgccgttgtccgccatgatgctcgccatgttcgctaccatggcctccttctacgtcgccggacgattgtggcaggatgctcagaaccgagtctacctcattaaggagctagacagacgaacaggccagggacaatcagcaatatctgtggatgataccttgaaggttgttgcatgcaggcagcaagggaagcggttggcatcgcttgagatggagctggctgcagcaaagcatgaaggttttgttggcaaatatactcccgagacaaatggaactcattctgggaaaaagccactggttgttattggaataatgactagctttgggaggaaaaactaccgtgatgctgtcaggaaatcatggcttccgacaggttcaatgttgaagaaactagaagaagaaaaaggcattgtagtacgttttgttgttggaagaagtgcaaatcgaggagatacttttgatagggagattgatgacgaaaataggagcaccaaggatttcttgatattggatgatcatatagagtcagatgaagagcttcctaagaagacaaaaagtttctttgctaatgcagcaaatacattcgatgctgcattttatgctaaggtcaatgatgatatatacataaacgttgacactttaagtgcaatgctcgaaactcactgggacaagccccgtgtatatataggttgcatgaaatcgggcgaggttttctctgactcaacccacaagtggtatgaaccagactggtggaaatttggtgatgggaaatcgtacttccggcacgcttctagtgaaatgtttgtcatatcaagggccattgctcagttcatttctataaacaagtctgttctccggacatatgcccatgatgatgttagtgtaggatcgtggatgattggccttgctgtgaagcatgtaaatgaagcaaagctgtgctgttcatcgtggccctcaggtgcaatgtgttcagcgctataacgagcaacaatgcatgctgaggagttttgcaaacatcgtgcctggtggataatacatgcaatatgaggtcgaatacctgaggaaattttgttttcttctgccattttctgtaacgtcttttggaggaagcttttgcgagccagttcataccgaatcagatatcttgtttttttctttgcaaggccactacactagaatcgtggcttctaacaaaaagccttctgcagattttatcctgttccgtgtgccatttgtagatgccccacccttaccattctttttctgacagacactgccattgttggagtgacagaaatcaatagcaattcagg

SEQ ID NO: 28596 - DNA, 1735 bp, Zea mays
  Clone ID: LIB4759-017-C5_FLI
ccgggacctcatctcatcatcgcctccacctcaccagagaaatcctcctcctccctagtccctagccaattcttttttgtatcaaaccctctttccccatctcagatccctctcccgtcccagctcgatcctgcccgatggccgccgtaccgtacgccgctgctgccggacgctgaacgaccaggacaaccacctccgacgtccccccgtgtatccacgagatggtcgcggaggcggcgccgtcctcctcagcggcgatctggtcgctccgccgcgacgagatcactttcgaccgcctccacaagttttggagtgccctgtcatctcgtgcacggtacgaactgctaagacttgataaacagacccttattgagcatgctcgcaagaatttgtactgttcaaggtgcaacgggctgcttttggaaagtttcacacaaataatgatgtatgggaagtcactgcatcatgaaggttcgtgtgagccaaggattcaggaagttgaagcagaagttcaggacccttcagttcatccttggggaggcctttcgacaacaaaggatggcatcctaactcttcttgattgcttcataaatgcaaaatcacttcatgagatccagaatgtatttgacaatgcacgtgctagagaacgtgaacgtgaaatgctttaccctgatgcatgtggtggcggtggcagaggatggattagtccagtgatgcctaactatggcaggggccatggaacacgagatacttgtgctttgcatactgcacgtctttcttgtgacactctagtggatttttggtcggcactgggtgatgaaactagatcatcacttttaaggatgaaggaagaggacttcattgaaagactcatgcacaggttcgacagcaaaagattctgcagagactgcagaaggaatgttattcgtgaattcaaggaactcaaggaactaaagcgcatgcgaagggaacctcgctgcactagttggttttgtgttgcagataccacatttaactgtgaggtgtttgaggatgctattcttgttgattggcatcaatccttattggagcaagatggaatttaccatcatttcgagtgggctattggaacggatgaaggaaaatctgatattctaaactttgaaaatgtgggcatgattgggcaagtccacaggaaaggccttgatcttgatcagtttgaagactattttgttacactgagagcatgtaggctggatggccgccgtacagaattctgtgtgaaggcccatgccttgaagggccaatcttgtgttcaccggaggctaatcgtgggggatggatttgtgacaattacaaaaggtgaaagtattagaagtttctttgagcatgctgaagaagctgaggaagaggatgaagatgatgtagtggacagagacagcaatgaccctgatggtgatatcgctcatccacaaaagcatgctaagagccctgaacttgcaagagaatttcttctggatgctgctgcagtgatcttcaaagaacaggtcgagaaggctttcagagaaggtacagcgcggcaaaatgcacatagtgtttttgtgtcccttgctctaaaactgttagaagaacgagttcatgttgcttgcaaggaaataattacattggaaaaacagaccaagctacttgaggaagaagagaaagaaaaacgtgaagaagaagagcgcagggataggaggagaacaaaagaaaaatt

SEQ ID NO: 28597 - DNA, 1422 bp, Zea mays
  Clone ID: LIB4759-017-F5_FLI
ccggggcctgccttaaccattcctcccaacaccacctcgcctgcgatcttcgtagcctccgtcgcgtcgagcatcgatcatgtcggcctactgcggaaagtacaaggatgagctcatcaagaatgctgcctacattgacacccccggcaagggtatccttgctgctgatgagtccactggcaccattggcaagcgcctttccagcatcaatgtcgagaacgttgaggagaaccgccgtgccctccgtgagctcctattctgctgccctggtgctctccagtacatcagcggtgtgatcctcttcgaggagaccctgtaccagaagaccaaagatggcaagccttttgttgatgtcctcaaggagggaggcgtcctccctggcatcaaggttgacaagggcaccattgaggttgttggcactgataaggagaccaccacccaaggccatgacgaccttggcaagcgttgcgccaagtactacgaggcaggtgcccgctttgccaagtggcgcgctgttctcaagattggccctaatgagccatcacagcttgccatcgacctgaacgctcagggtctggctcgctatgccatcatctgccaggagaatggtctggtgccaattgttgagcctgagatccttgttgatggccctcatgacattgatcgctgcgcttacgtcactgagaccgtccttgctgcctgctacaaggcgctcaacgagcaccatgtcctcctggagggtaccctcctgaagcccaacatggtgactccaggctccgactccaagaaggtgacccctgaggtgattgctgagtacaccgtccgtaccctccagaggaccgtccctgctgctgtgcctgctgttgtcttcctctctggtggacagagcgaggaggaggccacccgcaacctcaatgccatgaacaagctcagcaccaagaagccgtggtccctgtctttctccttcggccgtgccctccaggcgagcaccctcaaggcctgggctggcaaggtggagaacctggagaaggctagagctgccttcctcgccaggtgcaaggccaactctgaggctaccctcggcacctacaagggtgatgctgccgccgacaccgagagcctccacgtcaaggactacaagtactgagttgcttctctttgcgtgcccgttttggaactcctgcctacgagctaggttgcggagtgtggtttgctcgttagagcttattttcggacatccaaaaaacatgcttcctatgtgggatgatggttatctttatatttgtatgttaattagtctctttgctgttaaatttcgtgtaagttggtcctgccgatggagaatcgagcagctccctttttttgttctatcaactatgctgtaattctggctatgtatcggcaaaaacaattctatatgct

SEQ ID NO: 28598 - DNA, 1417 bp, Zea mays
  Clone ID: LIB4759-021-C7_FLI
ccggggcctgccttaaccattcctcccaacaccacctcgcctgcgatcttcgtagcctccgtcgcgtcgagcatcgatcatgtcggcctactgcggaaagtacaaggatgagctcatcaagaatgctgcctacattggcacccccggcaagggtatccttgctgctgatgagtccactggcaccattggcaagcgcctttccagcatcaatgtcgagaacgttgaggagaaccgccgtgccctccgtgagctcctattctgctgccctggtgctctccagtacatcagcggtgtgatcctcttcgaggagaccctgtaccagaagaccaaggatggcaagccttttgttgatgtcctcaaggagggaggcgtcctccctggcatcaaggttgacaagggcaccattgaggttgttggcactgataaggagaccaccacccaaggccatgacgaccttggcaagcgttgcgccaagtactacgaggcaggtgcccgctttgccaagtggcgcgctgttctcaagattggccctaatgagccatcacagcttgccatcgacctgaacgctcagggtctggctcgctatgccatcatctgccaggagaatggtctggtgccaattgttgagcctgagatccttgttgatggccctcatgacattgatcgctgcgcttacgtcactgagaccgtccttgctgcctgctacaaggcgctcaacgagcaccatgtcctcctggagggtaccctcctgaagcccaacatggtgactccaggctccgactccaagaaggtgacccctgaggtgattgctgagtacaccgtccgtaccctccagaggaccgtccctgctgctgtgcctgctgttgtcttcctctctggtggacagagcgaggaggaggccacccgcaacctcaatgccatgaacaagctcagcaccaagaagccgtggtccctgtctttctccttcggccgtgccctccaggcgagcaccctcaaggcctgggctggcaaggtggagaacctggagaaggctagagctgccttcctcgccaggtgcaaggccaactctgaggctaccctcggcacctacaagggtgatgctgccgccgacaccgagagcctccacgtcaaggactacaagtactgagttgcttctctttgcgtgcccgttttggaactcctgcctacgagctaggttgcggagtgtggtttgctcgttagagcttattttcggacatccaaaaaacatgcttcctatgtgggatgatggttatctttatatttgtatgttaattagtctctttgctgttaaatttcgtgtaagttggtcctgccgatggagaatcgagcagctccctttttttgttctatcaactatgctgtaattctggctatgtatcggcaaaaacaattctac

SEQ ID NO: 28599 - DNA, 1605 bp, Zea mays
  Clone ID: LIB4759-021-G12_FLI
ccggggcctccccgagagcccccgtttctgtcacaaatcgccactaaaaccctagccttccgccatggccacctcccctgccgcctcgtcctcctccgctccgaccgcctccgcggtggctgcggctacgatggctgttgaggccaccgacgggccggtgctcagcgtagtatcgaagcgtctccgcgcactgcggaagaagtacaaccgaatcacgcagatggaggagtcgctcgccgccggcaagacgctcaaccgagagcaggaggaggttctccgctccaagcccgtcgtcgccgctctgatcgacgagctcgagcgcctccgccctccgctcgcctccgccctcgcggaggagctctcctcccgccccgcccccgccccctccgccgcttcctcctccgactcagattcgtcagtccaggacttgcttgcgctcgtctacttcggctccctctttgacgtcaagcagcaaagcgacttcgtctctttggtttacacgcgcgaactcgagcggagcagctgcctcacttatgactacgtcggggatgatccggaggacagtctcgcggagaccgatctgaacgcggtttctgcccttgcctccctcgccgcgttgcgccctcctgctgcagccggagtctcgcaccgtgacgcccttcaggcttgtgctcatcacgcccgcctctggctctgccgtgcggatgaacccatccatcctgactccaccatcacatatgctggggtgagggcaaagctggataggatcatggcatcgggctacttcacagcgcagctagaaatgaggacaccattggatctggctgctgcagtggcaagtttgggagctggaggtgtgcaggtgcaagagagcatggttgtgtcacctcaggcaccggaagcagtggaggagagccaggctgttgaaggacacaagaatgagaaggaagattctcaggctacagaaatctacaatgatcatcctgttgttgactctgaacatgtggaggatgaagtcctggtgcatccaactgatgaagttcctccagctgagacagagcaggagcaggagacatttgatgctgatgtgaaggatcaggagcaaaaggaccaacaattcatccagcggcggtcttaccagaaccagcgtggtggtggtcgtggtggcagcaggagaggctatcctaatggtcgtggaggacgtggtggccgaggtggcgggtaccagaatggccgtggtggataccagaatggtcgtggcggtgctggcgggtactactacgaatctggatactaccagccgaggaactacaacagaggccggggtggtcgctccggcggtggcaactcttactacaacagccatggtggaggtgcacaggggcatcatcctgggagtgttgagctgggcgcaaacgcctagcttcgctgactgttctgtttgataatgaggagcgagtgagtcgtgccattttgttattatagaactaacttagcctgttattacgtcaccgttggtcccatccgtgagtctttttgctgctcgagtgactgcatatggtcggtcggtattgaggaaatactctgggaaagtagtttcaggcc

SEQ ID NO: 28600 - DNA, 948 bp, Zea mays
  Clone ID: LIB4759-021-H10_FLI
ccgggaaaactccgtttcgaattctagggttttgctgctctccgaccccgagctccgaaggccgcagcatcaggcgcggcccccctcgcgtgtgaccgagatggcgctgccgaatcaggggaccgttgattaccccagcttcaagctcgtcatcgtcggcgatggtggaactggtaaaactacatttgtgaagaggcatctcactggagagtttgagaagaaatatgaaccaaccattggtgtggaagttcatccgttggatttcaccactaactgtggtaagatcaggttctactgctgggataccgcagggcaagagaagtttggtggcctcagggatggatactatatccatggccagtgtgcgatcatcatgtttgatgtaacctcaaggcttacttacaagaatgttcctacgtggcatagggacctgtgcagggtctgtgaaaacatccccattgtcctctgcggtaataaggttgatgtgaagaacaggcaggtcaaagccaagcaggttactttccacaggaagaagaatctgcagtactatgaaatttctgccaagagcaactacaactttgagaaacctttcctgtaccttgcaaggaagctggctggtgatccgaaccttcactttgttgaagctgttgctcttaagcctccggaagttaccatcgacatggctatgcagcagcagcatgaagctgagcttgctgcagcagctgcacaacctcttcctgatgacgatgatgatctgattgagtagaaaggatcatgagtcttggacttgagcaggagttgtgccttgcacgatttaagttgttctagggtggactctctcttgagttatcattgtctggatcatttttttctccttggacttgttgcaacttttgagtgtggaaatggattggaatagtcgccatgaatttgctggctactttatgc

SEQ ID NO: 28601 - DNA, 1472 bp, Zea mays
  Clone ID: LIB4759-022-G10_FLI
ccggggtctcctcttcttcccccgcctcggagcgccagcggcttcatccgatctccttctcacctcctcacctcaggcgcacaccgatcactctcttccctcctccagcagtccagctcacacccaccgccccaccccttccactcaaatccagggacatcgcagatccaccggctctccgatccgctcgcctccgcacccgcccgatcggatcccgcagtgttgatggaacactgaattgtggatattcaagttttagaggaagaagggcaagcatggaagatttctatgatataaaagcatctaaaattgatgataaacaaataaatctcttcggaatttttgatggtcatggtggttcacgtgctgctgagtatttgaaggagcacttgtttgagaacctcatgaaacatccggagttcatgacaaatacaaaattagcattaagtgaaacatatagaaagaccgattcagagtttttggatgctgaaaggaatactcatagagatgatgggtcaacggcatcgacagcagtgatggttgctgatcatctttacgtggcaaatgttggagactcgagggctgttatatcaaaggctggcaaagctattgcgctctctgaagatcacaagccaaacagaagtgatgagaggaatcgaattgagagtgctggtgggatagttatgtgggcaggaacttggagggtaggtggtgtacttgcgatgtctcgggcatttggcaaccgtctcttaaaacaatttgttattgcagaccctgaaattcaggaacaagaaataaatgaggagttggagtttctaattatagctagtgatgggctgtgggatgtggtttcgaatgaggacgctgttacacttgtgaaaatggaggaggaaccagaggctgcagctcggaagctgacagagaccgcgttctctcgcgggagcggcgataacatcacgtgcatcgtggtgaagttccagcatgacaagccgcgcagtggcggtggcgattccccttcctcgcctcgtctctaggcgacaggagttgattccatttgtttttggttatacgtgttgtcggggtcctttttaccttgagccggattttgctggcccccgaggctgatacttgagaaaaaggagtcggttcatgttcgttgcctgtcttgtctatatattccccctccctaattttgcttctccggtggcagtgctgcccattggcatgcacatcgtcggcgttgtcgtagacttgtagtttgctgttgtatcagtgagagagagagagagagagttaattctgtgaggtgttcattttgagatgtcactggaccgatcttcagtccagctagatccgtaagatgtgcagtgcataatctcgtagaggtgatgatattcgtcagaagaatcagtgagagattaccgtgtcacattactgtgtttttctaatgtaatgggtgtactgtttctatg

SEQ ID NO: 28602 - DNA, 1633 bp, Zea mays
  Clone ID: LIB4759-024-A6_FLI
ccggggccccgaaggccgagggaagcgtacgcgcctagcgaccagcacagattcgttccacgccccccctcctcccctctcagatctcgcgcgcgccccgcaaagggtaactttgagccatgggcacagttgtggatgccgctccagcagttgtggctgaagaggtcactgagaacatgttgggtggtaagaaagttacagttgtatttgttctaggtatatgttctatcttcagtaattttcagttatttgtgtcctaacatagaagagaatgttgtgttatttgtgtcctaccataaaagagaaggaggttataacaactttgaactcaaatagatgattttgttttgcatctgatcaagaatttacacaggtggtcctggaagtggaaaaggcacacagtgtgccaacattgtggaacactttggattcacccatcttagtgctggagatcttttgcgtgcagagattaaatctggctctgagaatggaaccatgattgaaaacatgataaaggagggaaagatcgttccatcagaggtgactataaagctgttgcaggaggcaatgataaaaaatgaaaatgacaaattcctgatcgacggatttccaaggaatgaggagaatcgtgcagcatttgagaatgttgtaaggccctcttttttgtacacaaaatttgttgattctcatgccagtttaagaaattattgctcctttcttttagttactcaaatgaattcgtagactattaattctttctcattccttcagaccaaaatttctcctgcatttgtgctattctttgactgttctgagaaagagatggagaaacgtctcttggggcgcaatcagggaagagttgatgataacattgaaactatcaaaaaaaggttcaaaacctttgttgagtcaagtttgcctgtcattgagcattacaactcaagggacaaggttaaaaagattgatgctgcaaaaccaattcctgaggtgtttgaagacgtcaaaaccatttttgccccatatgctccaaaggctgaatagagcagtctaaaagggacatgataaaggtgatacaaggtgtcataggcaacacacaaacatatttgtgattatgaacccttcaatatagaacaaaagttttggctcacatgagctaccagcgcatcagtaggcaattcgatttgttatcagcaatatttagatctgattctcaggggtcctgctagagtaacattttaccactgttgtttatgtatatcctttgatgttgtgttgtaccaatgtggaatttactttagggttagtttggacagggaaatggaggagatccatgcgacagagatccccttgttaatttgaataacaagtggattcctgccccatttaatcccttcattttcctgttcaccaaaccagcttttatggagcaatgagaccttgtgcgatcccaccagatttcttgtggcattatggaaagtataaaactgctgccatattctttatacgttgaatggggtgtttggttctgtggactaaagtttagcctgagttacatcaagcgtttgactttcaaataggagtatgaaatatagacccaaccaactgtaatagattcgtctcactttttaatctt

SEQ ID NO: 28603 - DNA, 1371 bp, Zea mays
  Clone ID: LIB4759-024-B6_FLI
ccgggatgacactgtctccatcatatcctctcgatccatcacttggtcatcacgaacgccgattcatcggttgattgctcgtctcatcggtcgagcaataatcgagatgggcgcggcgtcgtcgacgatccactcggcggacttgccgcggctgctgtgctgcgcgtgcgtggagcagtcgacggtggccatggaggagacgtgcgggcggtacgacacggtgctgcagccgggctgccacttcatgccctggtgcgtcggccggagggtcgccggctacctctccctccgcgtgcagcagctcaacgtccgttgcgagaccaagagcaaagacaacgtcttcgtcaccgtggtggcgtccgtgcagtaccgcgccatcgaggacaaggcctacgacgccttctaccgactcagcaacgcccgggagcagattcagtcctacgtcttcgacgtcatccgtgcgagcgtgcccaacatgaacctggaccaggtgttcgagcagaagaacgaggtggcgcgggccgtggaggaggagctggccaaggccatgaccatgtacggctacgagatcgtgcagacgctcatcatcgacatcgagcccgacgaggtggtcaagcgcgccatgaacgacatcaacgccgcggcgcggctgcgcgtggcggcggcggagcgcgcggaggccgagaagatacagcaggtcaagcgcgccgagggggaggccgagtccaggcacctggccggcgtcggcgtcgcgcgccagcgccaggccatcgtggacggcctgcgccggttcgtgcccgacgagaagtccgtcatggacatggtcctcgccacgcagtacttcgacaccatcagggatatcggcgccacgtcgcgcgccgccaccgtgttcatcccgcacggccccgccgcggtgcacgatgtggctgcgcaggtccgcgacggcgtgctccaggccgcggcgtacaacccctacgccggaaccaagtgaccggccgccgcacggccacggtgcctttccgccctgtcttttcttgcttcttggacatgttcatgtgtgaattcgaaacctgaccatcagtgtgtgtaccttgtgtcgaacctttacttcagtaggcgaaatacccaaatttatacttcgaggtgtgtatatacgtacaaaacataggaatattttatacatgaaaaaaacaagtttagtagcttagaagcagatacttatccaccagcgttgttagtctatctcccgcaccttcaatgtcccatttctcatctcaatttctatttcaaacttcactctacaaatagtattatatacaatgtaaaacagtgttttgtacgagcatgaataagtaaacttaagtaatgtcc

SEQ ID NO: 28604 - DNA, 897 bp, Zea mays
  Clone ID: LIB4759-024-F3_FLI
ccgggctctctgtctctctagggtttttgattttagccgccgccgctgctcatctcacatccctcgagaagacgcctgctcctcgccgatcgatacgatggccgtcttctccgacctccacaccgccgacggcctcaagtccctcgaggctcacctcgccggcaaaacctatgtgtctggtgactccattactaaggatgacattaaggtcttcgccgcggtgccgtcgaagcctggcgctgagtttcctaatgccgcccgctggtacgagaccgtctctgcggctgtagcctcaagattccctggtaaggctgttggtgtaaatctgcctgcgggatcagctcctgcggcagctgctcctgcggatgaggctgaggacgatgatgaccttgatctttttggtgatgaaactgaggaggacaagaaggcagctgatgagcgtgccgccgctgccaaggcctcttctaaaaagaaagaaagtggtaaatcctccgtccttatggatgtcaaaccatgggacgatgagactgatatgaagaagctggaggaggctgtccgcagtgtccagatggagggtctgacttggggagcatcaaagcttgtgcctgttggatacggcatcaagaagatgactatcatgttgacaattgtcgacgatcttgtgtccatcgacactctaattgaggaccaccttacgcaagagcccatcaatgagtacgtccagagttgcgacattgtggctttcaacaagatctagagttcagtttctgagtttgggcaacggcagcggctcagctcgtcaagtttgtgctgggatgccagtttatcccttctagtctattacagaaatgttgttcggagctgagtctattataaacatcttggtctgagtttagg

SEQ ID NO: 28605 - DNA, 1802 bp, Zea mays
  Clone ID: LIB4759-024-H7_FLI
ccggccggggtccgcagcgtctcatggctctgcttcttccttgagagctttaaccgtgttgtttgtgttggcagcttttgtttcagatgtagaggggcgacatcgtcgtcatgtctgtcctcatttctcctgcggtggtttaagcaatatatcgtatccatttcgtcggcaaggtgatccatctgggtgcggtgtccaatcgtatgagctggtttgcacggatacagacgcgacaattcgcatcggcagtggaacatacaaggcatgccggtgcccatgaatacaagctatccagatgttgttaagttcatgaggagtggatttgcccttcggtttcctctttcgtatggtgacaacatcagagaatgtctcgcagagaatacgcgtgctttccatgaagaaccaagaaatagtacaggcatcagggaacagatcttggacattcttacgttcgagacattatggttttgtgttcttgatcaacttggatcaactaataatgatgtcaaatctgttctcatcgacatcatcgtcggaataataccatttgttctgtggggtctaaaatctgcacatgttatttgcaggttcgtattgatgccgctagcagtatttgtcttcctagcctataagtactggaaaacacggataacaatagatgcagttgagaagttcctgcgaatgcagcatatgcttgttccgatgagatatgcatacacaaacatcattgctatcaccgcccatttcagagacaagctcggacaaggaggctacggtactgtatacaagggggtgctacagccaggtgaagttcatgttgctgtcaagatgctgggcaactcaaactgtaacggagaagagttcatcagtgaggtggccaccattggaaagatccaccatgtcaatgttgtgcgcctcattgggttttgctccgaggaaaatatcagggcacttatctatgagttcatgccccgtggatctctcgataagtacatcttctcgtcggagaagacattctcatgggacaaactcaacgagatcgctctgggcattgctagaggtcttaactacctgcatcatgggtgtgatatgcagataatacactttgacatcaagccacacaacatccttcttgatagcaactttgttccaaaagttgctgattttgggctagccaaattgttcccaaaagatgacaatttcgtgccactgagcgctatgcggggaacgattggctatatagctccagagatggtatctcgaagctttggtgtcatctctagcaaatccgatgtgtacagctttgggatgctactattggagatgacgggcgggcgaagaaacgcagatcctcatgcaggaagctccagtcaagcatactacccatccttggtgtacaagcagctgagccagggtgatgcgaacaggatcagtgaaggtgttgatatgcacgagttagagaagaagctatgtatcattgggctttgctgcatccagatcaagccgcaagatcgaccgacgatgagcgaggtcatagagatgcttgaagctggtgtcgatggcatccaaatgcctccaaggccatacttttgtgatgaagagggtgacagttcttactctataatctctgaactggatataatagaagagtagtagtagtaaaatgcacttgtgtctatgtgctcttaatgtatcagactattaagattgcaaggttgccataagctaaggtactggttgtatgcttttattgagtgtgataatgtgatatcatataaaatacctccatgaagttttttact

SEQ ID NO: 28606 - DNA, 1379 bp, Zea mays
  Clone ID: LIB4759-025-C6_FLI
ccaggaaggtcgccgccgctcgtcagtcaccacctcccctgatcccctcatttccatcccacccttgcgatcccggcagctgatccttcttccctttctctctaccccacttgccgatcgggcgccgtcgccgtcgccttcttcttccctctcgcgctttcctcgcggcggtggagccaccaccaggccggctgcaattcgccgtggcgcgcctgactcgtggcgcgggaacgcggttgcacgcctcgaagaggggagacccctctcccgcgcgcgacggttcccgaacatcccggcgaaggacctgctcggtcatcgctgctgccggagctgctcatgttgaatccgagatctgaaatctaccccaccatagagtatcgccctatccagccctccgacctcgaagctcttgaaaagattcatcttgctctctttccaataaggtacgagagggagttcttcttgaacgttgtcagtggcaatggtattgtctcctggggcgccgtggacaccagcagatcagatgatcgcagggatgagataataggttttgtaaccacgaggatgattgcggcaaaagatagcgagattgaggacctgttcaggtataacagttcacgcaaagatctaacacttgtgtatatattgacgttgggtgtggtggatggctacagaaaccttgggatagcttcatcactggttcgagaagtggttaaatatgcagcaagcatatcaaattgcagaggtgtttatttacatgtcatttcatacaaccagcctgctatcagcttctataagaagatgctatttaagctagtcagaaggcttccgatgttttactacataagaggacaacattatgactcatacttgtttgtatactatgtgaacggtggtcgttcaccttgctcaccactatgtccaactattgccatccaatattcctgcacaagatgtagaggagctgttggagggtgaaaagatacggagagcgttttttagtacttgagggctttcgtgaagatgctggttgccaagttctggagcaaagaggaccattgcaatccgagatggaccagatgtcaggaatcaaacaccctcttggcaacacaaagtaataaacggataatcagcggtgataataccagatgtcatgtctaatcttagttgtgatgacaatttctcgtcttttactttcctttttttctcttggaggagtttattgaaacaaccgctgttgttgtacacttctgatacgggtacataagttctcaaatggttgtagtcacgtcacattcgttgtaaagaagaggggaaaggagaaactggtaacgttgggagtgttgtgcaatgttgaaatgatcgtgttgaattaacag

SEQ ID NO: 28607 - DNA, 1457 bp, Zea mays
  Clone ID: LIB4759-025-G2_FLI
ccggggtctctcccttatcctttgatttataaaagggggtaaaatacggtattattattactagacatctcagctctctggaccatcacgtgtacaattgcgaccgctatatatcaacaaatatatgccatgagtgtgcaagtgtaagttgtgtacacaatatacagggcggttttgtcttaagccagcagctccccggccgatggcaataagctgcttcaacggcggcgccggctggccggagcccgtggtgcgcgtccaggctgtgtctgacacgtgcggcgacacgatccccgagcggtatgtgaagcccctgtcggagcggccccggctctcaccggcctccgatggcagcggcccgaatatcccagtcgtagacctgtcaatgctagacgtggacgcgacatccagcgccgtggcggcggcgtgccgggagtggggctttttccaggcagtgaaccacggcgtccgcccggagctgctgcgcggcgcgcgcgcggcgtggcgtggcttcttccggcagcccgcggaggtgcgcgagcgttacgcgaactcgccggcgacgtacgagggctacggcagccgcctcggcaccgccaagggcggcccgctggactggggcgactactacttcctccacctgctgccggcttccctcaagagccacgagaagtggccttccctgccttcctccctacggggggcaacggaggagtacggcgaggaagtgttgcagctgtgccggagggtgatgcggctgctctccagcgggctgggactggaagccgggagactgcaggcggcgttcggcggagagggcggcgaaggggcgtgcttgcgggtcaacttctacccgcagtgcccgcagccagagctgacgctgggcgtagcggggcactccgaccccggcggcatgaccatgctgctggtggacgaccacgtcaagggcctgcaggtcaggagccccgacggccagtggatcgtcgtcgaacccgtccccgacgccttcatcgtcaacgtcggcgaccagatccaggtgctgagcaacgcggcatacaagagcgtggagcaccgggtgacggtaagcgcagcagaggaccggctgtctatggctttcttctacaacccgcgaagtgacctgcccatcgcgccgatggcggagctggtggggcccgaccgcccggcgctgtacccggagatgaccttcgacgagtaccgcgttttcatccggcaacgtggtttggccggcaaggcgcagcttgagtccctgcaggtcaaagccgccgccggcggaggaggctgtagcgctgcagctgcctcgtccaccagctagcagctactgagctatatatatacatatatcatctgcaggggcagccggtttcagttagctagctgtgcataatcaatgttggatcgaccagtgaataatatacaattatttgatgttaatttcg

SEQ ID NO: 28608 - DNA, 1581 bp, Zea mays
  Clone ID: LIB4759-025-H11_FLI
ccgggcgcaaccaccccaccggttcggcccccactctgcaggctctagccagtgagtcgcacactgaaatcttttcctccattttctcaacttcccttttcttctcttctctctctctctctctctctctgatttcttctcttaactctcgcgtctcgcgtccttttcccttcctcccctccgttgcgtccgtcgtctgcgttgcgtccctccgtccgtccgtccgttggcccgtccgtcgtcaccagcctcctccctcgcgcccaccgccgggatccggccctcctcgtctgcgcccgcctcggtctagatttctgagaaaatggcgagaagtgcgggaactaggaggcgtgtggctcgccagctcaagtccacacatcccattccttcataccgatggaagtcaaagcccatgaaaaagccgatgaaaaaatccaaccgaaagcaagtgttgccaaccttgcaaaagatggactgggaagatgccaattgctctgtgtgcatggaatacccacataatgctgtgctcatcctttgttcatcccatgataagggttgtcgtccttatatgtgtggaactagctaccgccactctaattgcttggatcagttcaagaaagcttacaccaagggggcattgcttgaggaagttcctgcaaatagtgttggctctaatctggattcggcgccattgactgcagaaaaaactgactccattgaccttgcatgtcccttgtgtcgtggcaaggtgaaagggtggacggtggtggaaccagctcgaagctacctcaatggaaaacgaagaacatgcatgcaggatggttgctcatttgtggggacctacaaggagctccgcaagcatgccaagttggaacaccctcttgcaaagccaagggaagttgatcctgtccttgagcaaaaatggagattgctcgagattgaaagagagcggcaagatgcgctcagtacgatcactgcaacaatgggcagagccgtcgtttttggtgattatgtgctaggcttggaggatggaatggactcggaggatgttgacagtgatgctgataatgatggccgtgggacagaaaacactcgtaggatgctactatttattatgcgccaagttgctcaacatcaccaaaaccaaaggctccagaatgcgactggtgcatctgacaatgctgaggacaattatgtggtgagcagtggtgccaatggaaccacaccatactcttaccccttggagggggaggacgagaatggtatggttgtggccggaggcagaagcactgatgtgctgagaccagagaggaggcgccgtcgccgccgcaggaaccgtgggagattgtttttaggtgctaattgagaggacaggtgaccaggtagggtttagccgccagaggagtacatacagaaatgcttccctggtgcctggcattcatcaattcctgtctcaatttacttgatcatgatcatgtaccaagtagttatcttaacatcagctcattgtcataaatttatggtatctcacattcttcgttgaaaaaggaaaacaccgcatccatctcttgcggtttgtgt

SEQ ID NO: 28609 - DNA, 2192 bp, Zea mays
  Clone ID: LIB4759-026-A6_FLI
atgcttccagaatcttccggaaccttgcgccgagcctgaactccccggcggcgcctggccctgtgaaggctgcatgagtagtcccgccgccgccgccgcagcggagccatggggatgctcgccgccgccgttgcccccgctctcctcgcctcgccacaggcatccctcgtccgccgccgcctctccggtgcgtggacgctgcgcctgaagcccgctgctgcctcccacggcgtcgcggcgctcagggtacataattttctcccaaagtgttacattaccaacgttgaggttgatgttagtactgtaaataaagaagaaactttcgatgatcatccatcattggcaccaggacgcaacattccgcttgttaatcttcgaggagatattctagattctagtccttttccgctgcacgatagggcttcctgtccttcaggttttgaagagttgccggtcttgtctgaaggagagcaacatactttggcatccactcctgctcatcctgctggactatatgctctatatgctagttacttatttggtaacttggtggaacaactgtggaattttgcttggcctgccacactggcaattcttcatccaaatctattgcctgtggccattgttggtttcttcacgaagctttcagtgtttgttggggctcccatagttggcaaacttatggatcatttcccccgaatacccatgtacacagcattgaatgctgtgcaggtaggcactcagttgatatcagctgcaactgtcatctatgctctaagaaacctgagccatgcttctacaacagctgtggttctgagaccttggttcattgcactagtggcagctggagctatcgaaaggcttgcaggattggcgctaggagtttccatggagcgcgactgggttgtgttgttagcaggaacaaacaggcctgttgcattagctcaagctaatgctgtgctcaatcgacttgatctagtttgtgagacagttggtgcttctgtttttggccttcttttgtccaaataccatcctgtgacctgtttaaagattgctagtggtctaatgatatgcagtttccctgttctggtcatgttgggtcaactaatcaatagagtttcttgccatgcacttgattcctctagaactgccactgatgaatctatttgtgctgatcttttagatgtacgcaggatagttccaaatagcttgagggctatcaaacatggatggaatgagtataagcagcaaacagttctacctgcaagtgcagctaccgtgttcctaaatttcaatgttgcacttgctccaggtgccataatgactgcattattgatgcatcgtggtaccagtccatccattgttggtgctttcagtggattgtgctctatcatgggccttgttgcaacattcatctcctcaagcctggtgaaaagagttggaattctaaaggcgggagctgctggattgatatttcaagcttcactcttgtcaatcgcgctcacagtgtattgggctggttcaatttcgcaaacgacacctctacttatattcctagcatccattgcattgtcgcggttggggcacatgtcttatgatgttgtggggactcaaattgtccagacaggtgttcctgcttcaaaagcaaatctaattggaggaatggaggtttcaattgcaagccttgcggagctagtcatgcttgctatggctataattgcgaatgatgtctcccatttcggcttcctggcgatcctgtctgtgtcatcagttgctggggcagcatggatgttctgtcggtggttaacaaatccaacagatgagcagagggaactattcatggttgatcccctttatcaagttcaggcaatatagtggatgaggcaggaaacaaccaggaaaactgcaggcgcctacttgctggtggtgcttgttggatctgcaataccgttacgatgatactaagatacagtgtgacatttaggttcaatacgggatacacttagggtagaagcatttgctcctcgtggcctcagccatgcgcagaattcaatttgtatactcgttcatctcctcacctgtacaacacatatttgatctgtataagtgttacttgttatagctgatgtagaacaacattaacagccatcggtagcacacagtcaatgaaatctaaccccctcacctttcag

SEQ ID NO: 28610 - DNA, 1696 bp, Zea mays
  Clone ID: LIB4759-026-B6_FLI
acagcagctccgaagccacaccacagttatttattactgttttttcgttgcctccaatccaatagagttgaccgaaccacgcgccgcccgctgacatggacgacgtagtaccagcgacagcgaagcagaccgtcgttctgtaccccggcggcggcgccgggcacgtcgcgccgatgacgcagctcgccaaggtcttcgtccgccacggctacgacgtcaccatggtgctcctggagccgcccatcaagtcgaacgcctccggcgccagcttcgtcgagagcttcgccgcctccaacccgtccatcaccttccacctcctcccgccgatccctccccccgacctcgccagctccaccaagcaccctttcctcgtcgtgctggagttgctgggccagtacaacgacaagctcgagagcttcctccgcaccatcccgcgcgagcgcctgcactcccttgtcatcgacatgttctgcaccgacgccatcgacgtggccgcgaaggtgggcgtccccgtctacacgttcttcgcggcgaacgccggagccctggccgtcttaacacagacggtggcgctgcttgacggccggcaaacgggcctcaaggagctcggggacacgcccatcgagttccttggcgtgccgccgatcccggcgtcgcacatcatcagggagatgctcgaggacgcggaggacgaggtgcgcacggcaatggcgaagatctggaagcgcgacacggacacccggggcgtcctcatcaataccttctactcgctggaggcccaggccctgcaggcgttcagtgacccgctgtgcgtccctggcaaagtgttgcctcctgtttaccccatcgggccgttggttggcaagggcgggagcgggacggacggaggagaggcggcggagaggccgcatgagtgcctcgcctggctcgacgcgcagccggagcgcagcgtcgtgttcctctgctgggggagcaggggcttgctgtcagaggagcagcttaaggagatagccgctggcctagagaagtccgggcaacggttcctgtgggtggtgcgcacgccggccagcagcgacgacccgaaacgattctggctgccacgcccggagccggaccttgacgcccttctgccggaggggttcttggagcggaccaaggaccgcggcctcgtcatcaagtcgtgggcgccgcaggtggacgtgctcagcaaccccgctgttggcgcgtttgtcacccactgcgggtggaactcgtcgcttgaggccatcacagcgggtgtgccgatgctgtgctggccacagggcgcagagcagaagatcaacaaggtacttatgaccgaggccatgggcatcgggctggagctggaggggtacaacacaggtttcatcaaggctgaggagatagagacgaaggtgaggcttgtgctggagtccgaggaggggagggagattaggacacgggcggcagaggtgaagaaagaagcacacgcggcgttggaggacgggggatcatcgaaggcagcatttctccaattcttgtcagatgtcaagaatattaattaggtcgggaagtgatcaatctttaaccgcccgatacaacgtaacacaaactattcaataaaatattagtatacatattgcttaggaaaaaaaatcccataaacaagtaataaagaaaacatgtgtgtagcaacaac

SEQ ID NO: 28611 - DNA, 2292 bp, Zea mays
  Clone ID: LIB4759-027-B12_FLI
ccggggtctgcgtgtcgcgcacgctagtacgctacgctaccggctgcggtggctctcccgagtcgaagtggcagctcccagcctcccacgcgtgaccgtgagagggaagggggtatttaacagacggcgggccgaggatgcgagctctcgcggcagcagcaactgcagtggcggcgcctacccccacgcgcctccgcctcccgctcctctcccgcaccctgcgctctggtcactgtagaagctcttattcctccaggctcctacggttctcgtgcagtgccaccaccatgggagatgagacctcaacctcggttgctccccaggagcaggaatccactgtggctgggagtgtcaagcaacagctctccgggctggtccttatgtccctccgggctactgtgcctgaggtggaggtagaaccgatggttgaagtttcagcaaagtttgctgactaccaatgcaacaatgctatgggattatggtcaaaggttaaaggatctggaaccagtttcaaaaaccctaatgccattggacaggccattgccaagaacttgccttcttctgatattattgaatccacatctgttgctggacctggttttgtgaatattgtcttatcaaaccgctgggttgcacagagaatacaagacatgctcgttaacggtatcaagacttgggcaccaattcttccagtaaggagggcagtgattgatttttcatcacctaatattgcaaaggaaatgcatgtgggacatttaaggtctacaattattggagatacattagcacgcatgtttgagttctcgaatgttgatgttctgcgaagaaaccatgtaggagattggggtacacagttcgggatgctaatagaatatctttttgagaaatttccaaattggcaagagattggtagccaggccattggagaccttcagattttctataaagcatccaagcatagatttgacaatgatccagaatttaaagcaagggctcaacaaggagttgttcggctacagggaggagaagagagatatcgagaagcatggaaaaagatttgtgacattagcaggagtgaatttgacttggtctacaaacgcctaaatgtggtgcttgaagaaaagggggagagtttctataatccttatattcctcaagtgttggaggaattgagtagcaaaggcttgatcaaggagagtgagggtgccagagttatatttattcaaggtcatcagatccccttgaatagtggttaagagtgatggtggcttcaactatgcctcgactgacttggctgccctttggtatcggctcaatgttgagcaggcagagtggatcatatacgtgacagatgttggtcagcagcagcactttgacatgtttttcagtgctgcaaagatggctggttggctgccaggtccaaacgaaaagaagtttccgaaaacaagccatgttggatttggtctagttcttggttcagatggcaagcggttccgaacgcgcagtactgaggttgttcgattggtagagctacttgatgaggctaaatctcggagcaaatcagaactactacaacggctcactgaaaatggcaaaattgttgactggatggatgaggaattagagcaaacttcagaggcagttggatatggtgctgtgaagtatgctgatctcaagaataatcgtctgactaattacacatttagttttgaacaaatgctgagcgataagggaaatactgctgtgtaccttcagtatgcacatgctcgtatttgttccattattcggaaatccaacaaggatgtggaagatctgaagatgactggagccatttctcttgaccatccagatgagcgtgtgttggggctgtatcttatccgatttgctgaggtggttgaagaggcatgcacgaatctgcttccaaatgttgtgtgtgaatacttgtacaatctatctgaaatgttcacaaaattctataccaactgtcaggtggtcgggtcaccggaggagacgagccgactgttgctttgccaagcgactgctgttgtcatgcgacagtgcttcaatctgctagggatcaccccagtctacaagctgtgatcggctgcatgtttgaagtttgatttatacattcaacatcgctttacgtagaaacccattcatcatggttgcagttttggccttgtaacctagttgaggcagttaacagactataatccatctccctgtttgaaaatagaagcaactcaaaagtttgtaacaaaatatgctctgcagagcttctattgatcc

SEQ ID NO: 28612 - DNA, 1442 bp, Zea mays
  Clone ID: LIB4759-028-E1_FLI
atccctctcttcctctctgctttccccttccaatggaatcctgtagcttccgtgccgcaaccgcgccttctccctttccctccgctccttcttcatcttcatccccgcgcgccccatgccccatactccgatttcccgtaggcgacttcctcctccgcttgccaagaaaagggaggcagattggggtgcggaggagggcgtccggatttgatgccttcgcgtctttcgccggcaaggtcttcgtggatgaggcgattggagcggaatatggggagggcttcgaaacatttcgaatggatggaccactcaaggttgatgtggattatctgaatgaaaaattgcaagagtgcttccttcaaaggataaggcatgctatgaagccggatgaggcgtttggtctaattttttcgtgggacaatgttattgctgatacagactcgctaaagttgaatgcttggagacaacttgctttggaggaaggtaaggatatcccaagtggtgctcatgtccggaagagcattattcatggtgctgctgaccatgttcttagaaaggttttgtactgggcaaaagaggaagataaaatggaaaaattgaaggcacgccttatagagttgtactacgagaacctgttcaaactcgatacacctgtagaaggattgagagaatggctggatgctgttcagacagcagggataccttgtgctgtcgcatcaccccttgacaggagatgcatgatcgaagctttggatcggatggcgctaagcaaatatttcaaggcgatcgtgactgacgaagatgatatggagtcgatagcaaatcgatttctgtcagctgctatgaaggcatgctcctgccccacttctaatcgttgtacatcatgttaatatatataggtcacacatttgcggtttttcttttcttcctggcagttggatcgtaaaccctcgaagtgtgtggtgttcgaggatgacccaaggggcgtcacagccgcccacaactgtacaatgatggcagtcgcattgattggtgctcatccagcgtatgagttggtacaggcagaccttgccattgcaaagtacagcgagctctcagtgatcaacctcagaaggctgtttgcgaacaagggaatcagcttcatggacttgcagaagcagataatcgagaagtcacctcccaaaaggaggctgacagtagacaccattttctgatagatacacttttatttggtgtctgcctgttgttcttgagtagccaacaaccttcggcattatggcggtggcgttgtatataagatagtgctgatgttaggtgatccgctgtgtacctccttgtgaatgcaatgcggtagttccatcaaggtaccatgaggaagactgctgcaacaatgttgttgctgatgtaagctgatattattcaaatttattcatatttcatggtcg

SEQ ID NO: 28613 - DNA, 1170 bp, Zea mays
  Clone ID: LIB4759-028-E5_FLI
accaacctcagcacaccaaggagagtacgtggaggagcagccatggcttcatcggtggccgccgcggcgagcacattcctgggcacccgcctggcggacccggcgccacagaacgggcgcatcgtggcccggttcgggttcgggttgggcggcaaggcgaagcctgctccgaagaaggtggcgaagacatcgacctcctctgaccggccgctgtggttccccggcgccgtggcgcccgactacctggacggctcgctggtcggcgactacgggttcgacccgttcggtctcgggaagcccgtggagtacctgcagttcgagttggactcgctggaccagaacctggccaagaatgaggccggcggcatcatcggcacccggttcgagtcctccgaagtcaagtccaccccgttgcagccctacagcgaggtgttcggcctccagcggttccgcgagtgcgagctcatccacggccgctgggccatgctcgccaccctcggcgccctctccgtcgagtggctcaccggcgtcacctggcaggacgccggcaaggtggagctggtggacgggtcctcctacctgggccagccgctgccgttctccatctcgacgctcatctggatcgaggtgctcgtgatcggctacatcgagttccagcgcaacgccgagctcgacccggagaagaggctgtaccccggcggctcctacttcgacccgctcggcctggcggccgaccctgagaagaaggagcggctgcagctggcggagatcaagcacgcgcgcctcgccatggtcgccttcctcggcttcgccgtgcaggccgccgccaccggcaaggggccgctcaacaactgggccacccacctgagcgacccgctccacactaccatcttcgacacgttcggagggtcctcttaagcccgccattgctccgccccgtccatcgaccggaacgtgttcttggattaattaactacgatctctatgagcctggggatggatcaacccgtcgtgcgtggtctcgttttgtgatgagtgggagagagaggatgacaagatcgatcctttgttaatggagatctcgttaattaggagagctaccgctgggacttggtggtttgtaatatatgatccaaccagtgatgaatcaatgcattcacttgtgtacac

SEQ ID NO: 28614 - DNA, 1775 bp, Zea mays
  Clone ID: LIB4759-032-A6_FLI
aattcgtcttcttccacaaactccaaaaccctagcgccgccgccgccatgtcctcgtctccgtccccggcgaaccgccgtccccggggcccgcttgcgctggggctggagtcctcggcgaacaagatcggcatcggcgtggtctccctctcgggtgacatcctctccaacccgcgccacacctacgtgacaccgccgggtcatggattccttccccgggagaccgcgcagcaccacctcgcgcacctcctccctctcctccgcgccgcgctcgctgagtccggtgtggcccccgctgacctcgcatgcgtctgctacactaaaggccccggcatgggcggccctctccaggtcgccgccgcagccgcccgcgcgctctccctgttatggaggaagcctctcgtggcggtcaaccactgcgttgcgcacatcgagatgggccgcgcggtcactggggccgtggaccccgttgtactctacgtctccggcggaaacacgcaggttatcgcctacagcgaggggaggtacaggatcttcggggaaacgattgatattgccgtcgggaactgccttgaccgattcgccagggtcctagagctctccaatgaccctagccccgggtataacatcgagcagcttgcaaagaagggagaaaaattcattgatgtcccttatgttgtgaagggtatggatgtgtcattcagtggcatattgagctttattgaagctgcggcgattgaaaagcttaaaaataatgagtgcacacctgcggacctatgctactcattgcaggaaactatctttgccatgcttgtcgaaattactgaacgtgccatggcacactgtgattcaaaggacgttcttattgttggtggcgtcggttgcaacgaacgtttacaggagatgatgaagattatgtgctcagaaagagggggtaggctgtttgcaactgatgaccgctattgtgtagacaatggggcaatgattgcatatactggtttactggcgtatgcacatggcatgaccactccccttgaggagtcgacatttacacaaagattccgaactgatgaagttcatgcaatttggagagagaaggagatgccggtgctaaataatacccattcagatgcaattgctgaagtttctaaagatgaagcctccatggcaacaccaatcgttatagattactgagacagtaaagagtaaatgcttgtacggtaaagcctagaaccactcctaaggctatctccaactgatctcctatagtcctatctcatctcctatctcaaacttcactctacaaacagatagttccacatctaaatgtgatatctttgctctgtttgggagaagcctcctccaggcacatggcaggggctcagaatagttgtgctgttgtatgaactgcagcaggtaaaatgaacatgtcgtatgcctgacatacctgaagatagctgacatggatcaaacctcaccaatcgctgacatggatcaaacctcacctatcaccttaacattctagttagttacttcatcgagtgaacttattattgttgtaaactaatagacgcatttctgcaaagctagcttaactcttaagttactcttgtgatggtaatctgttaaggttctaaagcagcctcttttggatcgacattggattcttgggaacgtggggagttatttcgattcgcatccaatgcacatcagctaaggtggtggttttctgtaaaatatatacattggattattatgtgggtgttttgttttgcg

SEQ ID NO: 28615 - DNA, 1430 bp, Zea mays
  Clone ID: LIB4759-038-D9_FLI
attgtctgttcgaaaccaccactgcctgcgccttcttctggagaaaggcaggcggaggcggacaggccacccccgcacctcattccacaattatttgcgcccgtcccatgtcagtcggctttaaaaggacacgagcgcttaaacccccaccccatatccgcatccgctgcctccgcctctcgagtctcgtccacccgtcgtcctcctagctcctctactcgccagtcgccatgggcaagattaagatcggaatcaacggcttcggaaggatcggcaggctcgtggccagggtcgccctccagagcgaggatgtcgagctcgtcgccgtcaacgaccccttcatcaccacggactacatgacctacatgttcaagtacgacaccgtccacggccactggaagcacagcgacatcacactcaaggactccaagacccttctcttcggtgacaagccggtcaccgtctttggcatcaggaaccctgaggaaatcccgtggggtgaggctggcgctgagtatgtcgtggagtccaccggcgtcttcactgacaaggacaaggctgctgcacatctcaagggtggtgccaagaaggttgttatctctgccccaagcaaagatgcacccatgtttgttgttggtgtcaatgaggacaagtacacctcggatgttaacattgtttccaatgctagctgcaccacaaactgccttgctccccttgctaaggtcattcatgacaacttcggcattgttgagggtttgatgacaactgttcatgccatcactgccacccagaaaactgttgacggaccctcagccaaggactggagaggtggcagggctgccagctttaacatcattcctagcagcaccggtgctgccaaggctgttggtaaagttcttcctgatctgaatggcaagctcactggtatgtccttccgtgttcctactgtggatgtctcggttgttgacctcaccgtcagaatcgagaagggggcctcctatgaggatatcaagaaagctattaaggctgcttccgagggtccactcaagggtatcatgggttatgtggaagaggatctggtttctaccgacttccttggtgacagcaggtcgagcatcttcgacgccaaggccgggatcgctctgaacgaccacttcgtcaagctcgtctcgtggtacgacaacgagtggggctacagcaaccgcgtcgtcgacctgatccgccacatgttcaagacccagtaggggtttttcccccctgcttctcatggatggttgctgcttgtgtatgccgagaataaatgtggatggcgcgtgcctctgggtcgccaggttcatgctgagtctggacatgttttgcacttttgtttcccttcctgctaccatctgtgacagatccgctcgctaatatgggacctgagattagctttg

SEQ ID NO: 28616 - DNA, 1442 bp, Zea mays
  Clone ID: LIB4759-039-A4_FLI
gccgcttgcctccgccggcgagggaagggacgaggcgccgagccggcaaccgttttcggggttgctggcggcgattggctgcggttccgcatcaaggctggtcgaacgctgcccctcctggttggggacctcgcggagtccaaatccttggtgagcggttacagaggtgcatggtttcgctgtaagatacataatatgcgtgtcaggcttggatacctggagtgttacttggaatacattgattatccaggcgaaaaaaaggaatgggttaggctctttcgaaagaactctgcaaggtccaaccaaaattcaagtgatagtattcacaccatgataaggccttcatttccaaaatggtattttgtgcatgaagttcctgagcagttcccaaatagtgatgtcacagcaattgttgatgaaacctggcaaattggtgatcgagttgattggttgaaggaaggttgttattggtctgggacaattactaagataatcaatgaagatctggtcgagatagagctgccggcacctcccataggtgaaggaaaatgttataaagctaaatgtagtgatctgaggcctactctcgagtggtctctagcaagaggttggatggtccctctttcacaggcaaatggaaaaggttggcatgctgctcgtctacttcaacattataaatctgaatcagatgatgataatgacgacaacgatagctgcgacgccccggcaaacggtgtgcagagcttcaaacacgcatgaggaagctcccagccccatgggtcccgcacctccgtcagccacaaaacacgcttccagccacacatatcaggaggatgctgctgtcacatccacagaggacctgctgaagcccagctcaacatccaagtcgccagaccccaggcacgacacccaagctagcactcaacctgcaggtacggaggtctccatgaagccggaaccggttattcgagtctcaacaatcaagaaagaggactcagcattgacagaaggtgaggttgatggcggcactgaagagtgcctggagaagctgggcacgatcaaagccaggctcaaatacctcatgcagggcacgcggctggaacatgagcgcagcgccaccttccgtgggtagtcaggcagatgaagctgcatcaaaggtgcaacttcacgcaggggtttagggtttagggccatctaacgcctgttgtggttgctgaattttgtgtcctgtggttacaggtattattgtcctgaataatgatgctgtgaataagtggtttgttttttgagtgcggcaatttgtaggagctaagaggaatgtgttgcttttgcattagactgtatccactagttcactcatatggtcatcccaaacactgcacaatggagtttgaatattgaaatgaggatagataagctggtgcagatagctttatgttgcg

SEQ ID NO: 28617 - DNA, 1499 bp, Zea mays
  Clone ID: LIB4759-039-G11_FLI
aacccaagccacagagccgtccgaatctgctgccagaatgcggtggttctaccacaaaggctcatcgggcttctccagcgcctccacggctgaggatgtcaccgccggcgtcgacggccaaggtctggtcgccgtcatcacagcgcaggtgcgtcgagcggcatcgggctggagacggcgcgtgtcctggcgttgcgcggcgtgcacgtcgtcatggccgtccgcaacgtctccgccgggctcaaggccagggaggccatcgtggctaagatccccgtcgcacggattgacgttctggagctggacctcagctccatagcttccgtaaggagattcgcctccaattttgactctctaaacttgcctctcagcattctcatgtaagtaccaatcctactacttcgtcgtgccactgctatcacgagctgtcaaaagccagcctaaaatcatagtagtatgtgtttggctggttgacttggtgttcttttcgacagcaacaatgctggagtgatgacaaggagctgcacacgttcctgcgacggcctggaactgcatttcgcgacaaatcacattggtgtgtcctcttatactagtacacactacagctagcctttgctaagcgtattgttcgaattctaactactttctttgtgcgacatctcttgtttacattattctgtagaagagtatcccttgctcgtcttatgacctatgagaatgattcctgataatgcactagcgattaaccgggatatatatatggcaggccattttcttctaacgaacctcttgctagaaaacatgaagaagacatgtagggacagcggtatcgagggacggattgtcaatttgacatcatcggcgcattccataacctatcgtgaagggatatgttttgacaaaattcatgatccatctagtttgaacgactttgttgcttatgggcaatccaagcttgccaatattcttcattctaatgaactgtctcgaatactcaaggaggatggagtgaatatttcagccaatgcagttcatcctggtgtcatcatgactaacctttttaggaacaggactattgtctctgctttactgaactccattggaagaatcatatgtagaacagttgagcagggtgctgcaacgacatgctatgttgcaatgcatcctcaagtgagggggataagtggaaagtacttcaccaattgtgatgtagccaacccgagctcacaagcttcagatgctgagttggccaagaagctatggcaatttagcttgcaaattgtgtcttcttgatctagtgcttatctgaacaagcggtgcacaaattgatgtgctaaattgcagatgcttaggctctcttcagaacaaatggaaaaccatatgaattttttagatcaaaggcattcacccggatttattagaaaaccataagtattttggatgactacaatcctgtaggaaaatgtatgcccttttggaaaaaatgattgcttcctatg

SEQ ID NO: 28618 - DNA, 837 bp, Zea mays
  Clone ID: LIB4759-041-E11_FLI
ggacacttgctcgcacgccacatccacagaatccatctccagatgtcagcctccggcgaccccctggacgtcctcccggcggcggtcctcgccgacgtcctgggccgtgtagctgacgccggagacatcgcggcttgccgcctggcctcgcggacgcttctcgccgcgtcctacatctgcccccgcgttcgcctctgcgccgccgaccgcgcccgccgccggcgcgagggcggtggtggttcccccgctttccgcgcgaccactgcaaacctcgcctcgcttctcgggcctcacctccggtccctgtcgctcgacacggccggcggtcagggttcccccgatgacgcgatgtgggtggaggagggagagttcgatgaggccgacggcctgcatctcacctgcggcgaggccgtggcggcctgggcgacgacctccgccggaacggtcctccgggagcttgatatcgccgactactggccgcaagcgtgctggcggaaggccgaggcgctccccctcatctcacactactgtatgcgagcttttttttaaggagattacctctggttatacgcaagttctacagatactactgcatgcaaggtttcactctgagagtgtcattttcgtttggtgtgtctgtcttcggttatgccatgcttgattgatgtaaacatatagctgaatatccggcacactaactctccgtagacatttgatgattagttcaaaatcatatcaagcagtggtgagagggggaggaggggtcatgtactcctgttcatagggaacttcccctaatcgatataatttaggtgttgtgtaacgcaacagcctccc

SEQ ID NO: 28619 - DNA, 1168 bp, Zea mays
  Clone ID: LIB4759-043-H8_FLI
accaacctcagcacaccaaggagagtacgtggaggagcagccatggcttcatcggtggccgccgcggcgagcacattcctgggcacccgcctggcggacccggcgccacagaacgggcgcatcgtggcccggttcgggttcgggttgggcggcaaggcgaagcctgctccgaagaaggtggcgaagacatcgacctcctctgaccggccgctgtggttccccggcgccgtggcgcccgactacctggacggctcgctggtcggcgactacgggttcgacccgttcggtctcgggaagcccgtggagtacctgcagttcgagttggactcgctggaccagaacctggccaagaatgaggccggcggcatcatcggcacccggttcgagtcctccgaagtcaagtccaccccgttgcagccctacagcgaggtgttcggcctccagcggttccgcgagtgcgagctcatccacggccgctgggccatgctcgccaccctcggcgccctctccgtcgagtggctcaccggcgtcacctggcaggacgccggcaaggtggagctggtggacgggtcctcctacctgggccagccgctgccgttctccatctcgacgctcatctggatcgaggtgctcgtgatcggctacatcgagttccagcgcaacgccgagctcgacccggagaagaggctgtaccccggcggctcctacttcgacccgctcggcctggcggccgaccctgagaagaaggagcggctgcagctggcggagatcaagcacgcgcgcctcgccatggtcgccttcctcggcttcgccgtgcaggccgccgccaccggcaaggggccgctcaacaactgggccacccacctgagcgacccgctccacactaccatcttcgacacgttcggagggtcctcttaagcccgccattgctccgccccgtccatcgaccggaacgtgttcttggattaattaactacgatctctatgagcctggggatggatcaacccgtcgtgcgtggtctcgttttgtgatgagtgggagagagaggatgacaagatcgatcctttgttaatggagatctcgttaattaggagagctaccgctgggacttggtggtttgtaatatatgatccaaccagtgatgaatcaatgcattcacttgtgtac

SEQ ID NO: 28620 - DNA, 1567 bp, Zea mays
  Clone ID: LIB4759-046-E1_FLI
aaaatctctcacctcgacgcgcctccaaaagttcggagccgccggcccgtccgcctccctctccgcctcccgtccccaaggccaatagttttcaagtggcaatggcggaccaggctaaccaacccactgtccttcataagctcggtggccagttccacctgcgctcgatcatctctgaaggtgtacgggcccgtaacatatgcccatctgtctcatcttatgaaaggagatttgccacaaggaactacatgacccagagccttttgggcccttcgatgtctgttagcggtggcatcaatgtcccagtgatgcggaccccgctctgtgctaatgctcctgctgagaaaggaggcaagaacttcatgatcgatttcatgatgggcggtgtttcagctgctgtttcgaagactgctgctgctcccatcgagcgtgtgaagctgcttattcagaaccaagatgagatgattaagtctggtaggctatcagagccgtacaagggtattgttgactgcttcaaacgtaccattaaggatgagggtttctcttccttgtggaggggtaacactgctaatgttattcgttacttccctactcaggctttgaactttgcatttaaggactacttcaagaggttgtttaacttcaagaaggatagggatggttattggaagtggtttgctggcaacctggcctctggtggtgctgctggtgcttcctctttgttttttgtgtactccttggactacgcgagaacaaggttggccaatgatgcgaaggctgccaagggaggaggtgaaaggcagttcaatgggcttgtggatgtctaccgcaagacactcaagtctgatggtattgctgggctttaccgtggatttaacatctcctgtgttggaatcattgtttatcgtggtctgtactttgggctctatgattccatcaagccagttgtccttactggcaacctccaggacaatttctttgccagtttcgctctgggttggctgatcactaatggtgctggtcttgcatcttaccccattgataccgtccgcagaaggatgatgatgacatctggtgaggctgtcaagtacaagagctccttggatgcgttccagcagattcttaagaaggaagggcccaagtccctgttcaagggtgctggtgctaacattcttcgtgccattgctggtgctggtgtgctttctggctatgaccagctccagatcctcttcttcggaaagaagtacggttccggcggtgcttaaatggagaaatatgatgacgaacaagagcagtgtgtgttcccggtcctttccaatcaggatctggtgaagtttttgcctttcatatcgaagaaattaataattcatgtagagggaggattcttccaacaatttgttttggatggagacttagatctccaaacactcgtaactatcctactaggtggtgacatcagtccccaaaaacatttatggtcatagagtctgcccttcgtttgtcagtcgggcaatttttcttgcatacaatgccttcgtttaagtatcggatgagttgctgcgactag

SEQ ID NO: 28621 - DNA, 1868 bp, Zea mays
  Clone ID: LIB4759-065-F5_FLI
gtccacgctcctgagtcgcaactcacacaagtcaccaagcgagcaatacaaaatcagcaagcaggcgggctggcatcggccggttgcggtggcatccataggactctcagattcccatctcgtcttcttatctccacttctccctccacacacatcccctcctctctctcctctgtttaaaaaactcgccaggcgcaatctctctcgctccgtccatccccgtcgccagcatcgcttccacttcggtctcagcgacggtcgccaccaccgctcccctccctctccccctcctcgcccagcggcaattaccacagcctccccagcaagccgggatggctgcactcaaggcatcgttccggggtgagctcagcgccgcttccttcctcgactccagcaggggacctctcgtccagcacaaagtggattttacgtttcaaaggaagggcaaacgagctatttcactgagaaggacatgctgttctatgcaacaggctccaccaccagcatggcctgggcgagctgttgctgagcctggccggaggtcatgggatggcccaaagcctatctcgattgttggttcaactggttccataggaacacagacattggacattgttgcggagaatcctgataagttcagagttgttgctcttgctgctggatccaatgtcacgcttctagctgatcaggtcaaaacattcaaacctaagttggttgctgtaagaaacgaatcattagttgatgaattgaaagaagccttggctgattgcgaagagaagccagaaattattcctggggagcaaggtgtcatagaagttgctcgccatccagatgcagttacagttgtcacagggatagtaggttgtgcagggctgaagcctacagttgctgcaattgaagctggtaaagacatagcattggcaaacaaagagacacttattgcaggtggtccttttgtgcttccccttgcacacaaacacaaagtgaaaattcttccagctgattctgagcactctgcaatatttcagtgtatacaaggcttgtccgaaggtgcacttcgtcgcattattctaactgcatcaggtggtgctttcagggactggccagttgacaggctgaaagatgtaaaagttgctgacgctttaaagcatccaaactggaatatgggaaggaagatcacagtagattctgctactttattcaacaagggtttagaagttattgaagcacattatttatttggtgctgaatatgatgacattgagattgtgattcacccacagtctatcatacactctatggttgaaacccaggattcatctgtcctagctcagttgggatggccagatatgcggttaccaatcttatacaccttatcatggccagatagaatctattgctctgaggtcacctggccccgtctggatctttgcaagttgggttcactgacattcagagctccagacaacgtaaaatacccatcaatggacctagcctatgcagctggccgcgctgggggcaccatgacaggagtcctgagcgctgctaatgagaaggccgtggagttgttcattgacgagaagattagctacctggacatattcaaggtggtggagcttacatgtaacgcgcatcggaacgagctggtaacaagcccgtcactggaggagatcgtccattacgatctgtgggcgaggagatatgcagccagtctacaaccatcttctggcctgagccctgtccctgcataataggtcgtcacgacaacgttgtacagcaggagttctaagatatgatgtgttcgtggctcctgtttccatgttcaattttcaggcctccacatgaataaaatgcatctattccatgcg

SEQ ID NO: 28622 - DNA, 1417 bp, Zea mays
  Clone ID: LIB4759-105-B10_FLI
atatatccaacaaccagcacctcagcactagtctcctcttcgcacgagcgcaacaccatccacccaccagttcgaagcggaggcgaccggcaacctgcggcggagatgtcaggcaggggcaagggcggcaaggggctcgggaagggcacccctcgtgttcccttttcgtccttgttcctcaacgtcgccggtgcgcccgcctcctgcctctctccccctgcgagcgatcgtgaggggatcgggatggcctcccaccattccgagcccctcgaccccgccgacgctgacgacccctcagataacaacccagaattaccatgcccctcctatcatatcgttaccaaacctggtcaactcccagtcgagtttcttgaacccccagctacccagaagttggtaattggatttgactgtgaaggtgttgatctctgccgcaatggtgctctctgtattatgcagcttgcattccctgatgctgtttacctagttgatgctattgagggtggaaaagaacttattcaagcttgtaagcccgcacttgagtctgatcatatcaccaaagttattcatgattgtaaaagggacagtgaggctttgtattttcagtttggcataaaactgcataatgtgatggatacacagattgcttattctctgatagaagagcaggagcaggaaggaaaaaagatgacatctgatgattacaattacatatcttttgtcagccttcttgctgataaacgatactgtggcatactatatcctgaaaaggaagaagtccgtacccttctaaggcaggaccctaacttttggacaattaggcccttgtctgatatgatggttcgagctgccacagatgatgtccgcttccttctcagtatatatgcgaaaatgatggaaaagttaagcaaagtatctttatggcgtctggcagttcgcagtgagctgtactgtaggtgcttttgcttaagcgacaaccagtttgcagattggtcacctcttcctcctgtccctgatgacattgaggctgatgtttatgttcctgaagccgatatcctgtcagtcttagatgtgcctcctgggaaaatgggacgagttattggcagaaaggggtcaacgataatggctgtgaaagaatgttgcaaggttgaaatacatattggtggtgctaaggggcctccagacagggtgttcatcattggaccagagaaggaggtcaggaaagctgaggccatctttcgaggccgaatgctggagttctagagatgttaccctttgcgatacaggtttcaactgctttatattttgaacgtaaaaaggggaatatccaaaaggtgtatgcgggaccgtggatcccttgaccgtctgtgaatcatgaaaacaaaataaaggatttcaacttggcacttcgcgtttc

SEQ ID NO: 28623 - DNA, 1278 bp, Zea mays
  Clone ID: LIB4760-001-E6_FLI
actcatccattccatcatcccccttgcaagtatagtctcggcggctctagaagacgatgggcaaggacgacgtgatcgagagcggcgctggcggcggcgagttcgctgccaaggactacacggaccctcccccggcgccgctgatcgacgcggctgagctggggtcctggtcgctgtaccgcgccgtgatcgccgagttcatcgccacgctgctgttcctgtacatcacggtggccaccgtgatcgggtacaagcaccagacggacgcgtcggcgtcgggtgccgacgcggcgtgcggcggcgtgggggtgctgggcatcgcctgggccttcggcggcatgatcttcgtcctcgtctactgcaccgccggcatctcggggggccacatcaaccccgccgtcaccttcggcctcttcctggcgcgcaaggtctccctggtgcgcgcgctgctctacatcgtggcgcagtgcctcggcgccatctgcggcgtcggcctcgtcaaggcgttccagagcgcctacttcgacaggtacggcggcggcgccaactcgctcgcctccggctactcccgcggcaccggcctcggcgccgagatcatcggcaccttcgtgctcgtctacaccgtcttctccgccaccgaccccaagcgcaacgcccgcgactcccacgtcccggttctggctcccctccccatcggcttcgccgtgttcatggtgcacctggccaccatccccgtcaccggcaccggcatcaacccggccaggagcctgggcgccgccgtcatctacaacaaggacaagccctgggacgaccactggatcttctgggtgggccctctcgtgggcgctgccatcgcggccttctaccaccagtacatcctccgggctggcgccatcaaggccctcggctccttcaggagcaacgcgtgatgagcggggcttggctgtggagcaatggcgggcgacctacgggcgggggaagtcgtgagcgaggagaatgacatcatcgatcgacttgggtgccggtggttggttcgggtcgccttttttgtttcagcagctgctgcgttgcgcgcgtgcgtgagatttggtttggtttcgttcccctgcaatgtaatcatgtcgtgactctcaagggattattccgctctgctcttatggtctctgttttctatttaatgattgttattaccatgtagcagtaaccatcgtcatcagtgagaaccttgttgcttctgtctaaatcaaccgagacgtgtggagtggatgtggatcgaac

SEQ ID NO: 28624 - DNA, 884 bp, Zea mays
  Clone ID: LIB4760-001-G4_FLI
atcacccatattattgataccaactagcaacatacatagtgaagtacactagcaacatcttagcaccaatgggagccaagatttttgccctccttgccctccttgctctttcagcaagcgctgctacctcgacttttattccacaatgctcacaacaatacctctctccggtgacagccgcgggatttcaatacccaactatacaatcctacatggtacaagaggccatccaagcaagcatcttacggtcattagcattaaccctccaacaaccatatgctctattgcaacagccatccttagtgcatctgtatctccaaagaatcgcggcacaacaactacaacaacagttgctaccaacaatcaatcaagtagttgcagcgaaccttgctgcttacctccagcaacaacagtttcttccattcaatcaactagctggggtgaaccctgctatctacttgcaggcacaacagctactaccatttaaccaacttgtcgggagcccttatgccttcttactgcaacaacagcttctgccattccatctgcaagctgtggcaaacattgttgctttcttgagacaacaacatttgttgccattttacccacaagttgtgggaaacattaatgccttcttgcaacagcaacaattgctaccattctacccacagaatgtggcaaacattgttgccttcttacaacaacaacaattgctgccatttagccaacatgctttgacgaatcctaccaccttattgcaaccgcccaccattggtggtgccatcttctagattttttatgatttatactgtaataataaagttctcatgctgatatgtgcgacctctcagtaataaagtattagagacctatattttaaattt

SEQ ID NO: 28625 - DNA, 700 bp, Zea mays
  Clone ID: LIB4760-003-A8_FLI
atctatcatcatccaatccagatcagcaaagcggcagtgcgtagagaggatcgtcgaacagaacagcatgaagatggtcatcgttctcgtcgtgtgcctggctctgtcagctgccagcgcctctgcaatgcagatgccctgcccctgcgcggggctgcagggcttgtacggcgctggcgccggcctgacgacgatgatgggcgccggcgggctgtacccctacgcggagtacctgaggcagccgcagtgcagcccgctggcggcggcgccctactacgccgggtgtgggcagacgagcgccatgtaccagccgctccggcaacagtgctgccagcagcagatgaggatgatggacgtgcagtccgtcgcgcagcagctgcagatgatgatgcagcttgagcgtgccgctgccgccagcagcagcctgtacgagccagctctgatgcagcagcagcagcagctgttggcagctcagggtctcaaccccatggccatgatgatggcccagaacatgccggccatgggtggactctaccagtaccagctgcccagctaccgcaccacctcctgtggcgtctccgctgccattccgccctactactgattcatgatatttgggaaatctcctctatccatccctctctatctatatctgtaataatgcagtaagacgacacacattatcatgtgtggtatgacc

SEQ ID NO: 28626 - DNA, 1063 bp, Zea mays
  Clone ID: LIB4760-003-D2_FLI
ccgggagtacctgagctgatcacgagtctctcagcgagtgctggagagcccactatgtccgccgccggcggcgacctgccggagactgtggaggtgacgctgcgcgccgtcggcccgtcccgtccaaccaccctccgcctccctccgcttctctcggtcgccgagctgcgcggctgcatcgcgcgcgaacgccgtctagcaggcacggaagaagttcgactccgcttgatcctgcgggggaagacgctcccgcaccaagacgacagccatgtcactctccgcgatggggatactcttatagtcgccgtggcacctaagcctcctgttaatcatcttcttgatgatgacgttgaggacgaagaagaggatgaactgaagttcagaataccacaaacgacaaccttgtggaagaggaaattttttatgtttcttcgagacaaattgagattgcctgatatcattttgatggcgctgttttctctcagtatgaaagcatggattatcattgcaatgtggttcctattggcaccgattgctcagaagtacgacattggacctttatatataattggtactggtttcttgatcatacttattaatctcggaagacgacagcaaggtgatgttagtgcatactccatattcaacgaagattttagggagctgccaggaacacttaatgcagaccgcattgatgcagacatccgggcaggtcaattttaagcccttactgggcattgcagagatagggaccatggtatgctgagatttgtacagaagcgtactgggcattgcatttgtttgtgcatggaaagcagtgtggagataaaggctgtgcccctctaaggttaaggtcaaataaatttctgacctgtaagtgagaatgttgcctggttacaattggaaattaccgtgatactttgcagatctgtacttgtgaaaccaaaagagcagagtagcttaagactggcaacaaagtgattttattcctctcttgcaagttcttgtgtccgctatgagccacaaagtcctatatagcaacttgcatttatgagtttcatcc

SEQ ID NO: 28627 - DNA, 812 bp, Zea mays
  Clone ID: LIB4760-004-D9_FLI
ccgggcttacgtgagctatggcggggagcagcatctgccgctggtgatgtcgctggtggacgaggagctcagcgagccctattccatcttcacctaccgctacttcgtctacctctggccgcagctcaccttcctggcgttcgatgccagggatggcaagtgcgtggggacagtcgtgtgcaagatgggggagcataggggtgcattcaggggctacatcgccatgctcgtcgtcctcaagccctaccgagggaggggaatagcaactgagctagttactagatcaattcgggcaatgatggaatctggctgtgaggagcttgtatcttctgatcaggtgacacttgaagcagaagttactaataagggtgcccttgctctgtatggtcgccttgggtttatccgagcaaagagattgtacagatactatctaaatggtgtagacgcatttcggctgaaactactgtttccgcgccctgataatgacccacaaatatttggtataattgactagattctccctactcgtgacagcatcctaatcagtaggttgaattgagttggagatctgtaatccgatcatttttcgctctgttcatgcttcctcagctatcatgtggctgtaatattgctgtacttacatataaatgttcgaggtgttttattttcttcctgttctttgataagggtgttgtaagacctttttcttttgtgagaaaaacaaaacgcatgccgcagttgcaagaggactgtgcagttcttttgctcaataaacaaaacgcatgccgcagttgctgtagtgtttaattgtg

SEQ ID NO: 28628 - DNA, 807 bp, Zea mays
  Clone ID: LIB4760-004-F8_FLI
accaccaccactggacgtcagcctagcaattagctcatcgactccagattggagaactcgacaccatgaaggtgctgatcgttgcccttgctctcctggcgctcgctgcgagcgccgcctccagtacaagcggcggctgtggctgccagacaccaccgtttcatctaccgcctccgttctatatgccgcctccgttctatctgccgccgcagcagcagccgcagccatggcaataccccactcaaccaccgcagctaagcccgtgccagcagttcggatcctgcggcgtcggcagcgtcggcagcccgttcctgggccagtgcgtcgagttcctgaggcaccagtgcagcccggcggcgacgccctacggctcgccacagtgccaggcgctgcagcagcagtgctgccaccagatcaggcaggtggagccgctgcaccggtaccaggcgacatacggtgtggtcctgcagtccttcctgcagcagcagccgcagggcgagctcgcggcgctgatggcggcccaggtagcgcagcagctgacggcgatgtgcggcctgcagctgcagcagccaggtccctgcccttgcaacgcagctgccggcggtgtctactactgaggaaactatgtactgtagtaataatgtaatggagccgctggctagctacctagctcgctagtttactcatttagcggcgatgagtaacgtagtgtcacccatcaccatgggtggcagtgtgagcaatgacctgaatgaaccattgaaatggaaaggaataatatataaggaaaaaagatgattggaaact

SEQ ID NO: 28629 - DNA, 685 bp, Zea mays
  Clone ID: LIB4760-005-D9_FLI
ctcgaggccggccggatcttccaagtcaccaacgcaaattgcaccaagaaatccatcgagaggccgtcgacaggggaattaatggcgtcgtcgtctagcagcagccaccgccgcctcatcctcgcagccgccgtcctgctctccgtgctcgcggctgccagcgccagcgccgggacctcctgcgtgccggggtgggccatcccgcacaacccgctcccgagctgccgctggtacgtgaccagccggacctgcggcatcgggccgcgcctcccgtggccggagctgaagaggagatgctgccgggagctggcggacatcccggcgtactgccggtgcacggcgctgagcatcctcatggacggcgcgatcccgccgggcccggacgcgcagctggagggccgcctagaggacctgccgggctgcccgcgggaggtgcagaggggattcgccgccaccctcgtcacggaggccgagtgcaacctggccaccatcagcggcgtcgccgaatgcccctggattctcggcggcggaacgatgccctccaagtaactgcgaagagcatagtgcatgaggaatgagcttgtagctagctcatatgtctgaataagaagcacagcaagaagatgaatgcatttctcggatcgttcatccggaacaataattaaaggggatccggatttgttcc

SEQ ID NO: 28630 - DNA, 730 bp, Zea mays
  Clone ID: LIB4760-005-G11_FLI
ccctcgaggccggccgggataaaaccggcccacccatcgctagggttcgcccaccaaagcctccgcccccttcttccctgacaccctcgccgccgcgcacgcacgcacgcagggaaccagcgaagagagatgggcgtctacaccttcgtgtgccgcagcgccggcggcggcgagtggaccgccaagcagcactccggcgagatcgaggcgtccgccgccaccccctacgagctgcagcgccgcctcgtcgcctccgcctccgcggccgactccgcgtccggcgtccagtcgtccttctccatggtcacccccagctccgccgtcttccaggtgatcgtcggtggtggcgcgatgatggttagtggcggcggcggcggcggcgcgtccgccgccgcgtcgggtggtgctgcggccgaagctcccaaggaggagaagaaggaagaggagaaggaagagagcgacgacgacatgggattctccctgttcgactagagacagagttaagctgcgtgtgcatggttgctgttcggtcgtgtcgcgaaacgtgaagagctcaagcggcctttttgttccagtcccacatgtgagagcttgatacgttgtctggaatgaaaaattttctccaaaattcacgaatatatattgcgtacgcacaatactgtagattaaacaatgacttgtgtagagctgtaaaatcgacgcaattatatgaaagcagcactggagtttc

SEQ ID NO: 28631 - DNA, 806 bp, Zea mays
  Clone ID: LIB4760-006-C3_FLI
accaccaccactggacgtcagcctagcaattagctcatcgactccagattggagaactcgacaccatgaaggtgctgatcgttgcccttgctctcctggcgctcgctgcgagcgccgcctccagtacaagcggcggctgtggctgccagacaccaccgtttcatctaccgcctccgttctatatgccgcctccgttctatctgccgccgcagcagcagccgcagccatggcaataccccactcaaccaccgcagctaagcccgtgccagcagttcggatcctgcggcgtcggcagcgtcggcagcccgttcctgggccagtgcgtcgagttcctgaggcaccagtgcagcccggcggcgacgccctacggctcgccacagtgccaggcgctgcagcagcagtgctgccaccagatcaggcaggtggagccgctgcaccggtaccaggcgacatacggtgtggtcctgcagtccttcctgcagcagcagccgcagggcgagctcgcggcgctgatggcggcccaggtagcgcagcagctgacggcgatgtgcggcctgcagctgcagcagccaggtccctgcccttgcaacgcagctgccggcggtgtctactactgaggaaactatgtactgtagtaataatgtaatggagccgctggctagctacctagctcgctagtttactcatttagcggcgatgagtaacgtagtgtcacccatcaccatgggtggcagtgtgagcaatgacctgaatgaaccattgaaatggaaaggaataatatataaggaaaaaagatgattggaaac

SEQ ID NO: 28632 - DNA, 1052 bp, Zea mays
  Clone ID: LIB4760-006-F8_FLI
ccgggatcaacctcagtacctcaccctcctctcccggagagcctctcgcctccgctccgctcctctgccctgccctgcccttccccgccacaccaaccaaggcgccaaaaataaacgccgcgccactgcgtggcgagggagcctgtcacattgcttgccgctgcgccctgccgcctcgtcttcgcggaggcctcgtcgcgcgacgatatggagctcgccgaggcgccggcgcccgtgcccgacgaggacgggctggacgaacgcggcgtggcgctgcacctcccgaggctgctggccggcgtcgtctccggcgccctcactggcatcttcgctctcgctggagctctgaccggggcagtcaccggcgcggtggcgggcagggcttccgacagcggcggcgtcctgcggggagctggactgggggcggtcgccggagctgtcctctccattgaggtccttgaggcttctcgcgcttactggtgctcgtcggaccggctgggctcgcacggcggagcatcgtccatggctgatttcattgagcagcttcttcgtgcccggtttgtgcaagagcaacttactgcttcaggatatgcatcatatcgctggcaggatgacctatacgacatctttggggacatttcatctgaggggctctcgcaagagtcactgaagaaactaccacatcatgtggtcagtgaccaccagacgcgggacttactcggcgaaatcctgtgttgtcctatctgtctacaggacattgtggccggtgagacagcgaggaggctgcccggctgctctcacgccttccaccagccttgcgtggacagatggctcgtcggccatggctcgtgccccgtctgcaggcaacgcgtgtaaaagatatataggcgacctgtgtctgtgtacgtagatagacgtggagtgaagagaaacgaccgtgcgcatctggcaatctcacttcgtttcttgcaccccggttccaacatgtaatggcaatggaataagattgctgtcggagcagttcctgtttctgtagaatttgtttgtccgct

SEQ ID NO: 28633 - DNA, 1333 bp, Zea mays
  Clone ID: LIB4760-007-B6_FLI
ccgggaagctagcgctgacggagggaacaagggcctcgcgctgggccagttcgtctcgctgctcatcaccgccaccggcttcgcctcctccgaactcgcccgccgagggatcaacgcgcccacctcgcagtcgctcctgaactacgtcctcctcgccgtggcctacggcggcgttctcctctaccggcggcagccactcacgataaaatggtactactacttaatacttggaattatcgacgtggaagccaactacatcgtggtcaagtcgtaccagtacacgtcgttgacgagcgtgatgctgctggactgctggtcgatcccgtgcgtcatcctgctcacctgggtgttcctcaagaccaagtacggggcgaggaagttcctgggcgtcggggtctgcgtgcttggcctcatcctggtcgtgttctcggacgtccacgcctccgaccgagccaaagggcctaacccgctgaagggcgacctgttcgtgatccttggttcgatgctctacgcctgcagcaatgtcaccgaggagttcgtcatcaagaaaagcaacagggtggagctgatggcgatgctggggcttttcggagcgcttatcagcgccatacaaattagtgtacttgagcgagaagagcttcactccattacatggactagtggtgctgtgctcccttttctcgggttcgcggtagcaatgttcctgttctactcggctgtgccagtaatattgaagttatgcggcgcgaccatgctgaacctctcgctcctgacctcggacatgtgggctgtcctcatccgcatcttcgcttaccatgagaaggtcgactggatctacttcgttgctttcgccgccactgcgggcggcatcgtcttgtactcgtacagtggctctaatgaagtggaggagacggcacaggtggccggggccagcgacgagcacggcaagggccgggacgaggaggctgggacgcggaacccagcgtgaagctctggcgccagccagcaatggaggtgggttgccccctgccaggcatccaggagtgacgagttgttgttgcatgccttgacggcgagtgtagcagagaactttgtcaagtgtcgcaggagactgcttcaagatttgacgacggagatagtattggttttcatgtaaaacaagaacagttggtaacataccgacaccgaaccgtcgtcagaaatgattagatctaagaatcgaagattttacaggtgtttttggtaggtgtgtttggttgagaaatagagcggtttcatttttattttctgatgcttgatttccaataaaagataagcagagcacagttttcgt

SEQ ID NO: 28634 - DNA, 1023 bp, Zea mays
  Clone ID: LIB4760-007-E3_FLI
ccgggttttagccccgccggcactcggcaataatcccacctgtctgcctccctccgcactgcttctcctctcctcgcggcgcgcatccatggcggcctcgtccgcctccctcctcgcccgtcgcctcatcatgtcccgccgcttcctgtcatccccactcggctccctctctaccacaaccgcgacgcgcagtttctcgatctcttctcccgggtttaaaagcttcgttgtggagtccgaccttgagaacgagcacgaccagccccccgcggaccagaaccgccagcagacgtcgaacagcccgcgcccgcccgacaccacccgccctctcgagaacggcctcgaccccggcatctacaaggcgatactggtggggaaggtcgggcaggagccgatgcagaagcggctgcggagcgggaagaccgtcgtgcttttctcgctcggcaccggtggcatccgcaacaaccgccgcccgctggatcgcgaggagccgcaccagtacgccgacaggtgctccgtgcagtggcaccgcgtctgcgtctatccagatcgcctcggcaccgtcgcgctcaacaacgtcaagactggcactattctctatttggaaggaaatcttgagaccaaagtgttctgtgatccaattactgggctagttagacgcataagagaaatagctgtgcgttcaagtggtcgtctcttgtttctgggcaatgacgccaatgctccaaagttaggcgaagtcaagggcgtcggctacttctgatattggtttatgtttaactgagcataccagttgcagggacagagtcatcataacggtgttactttactggaatctgagtggaccaacaaatcctggcggcgattcgagtcttttgccgtgttgaattttaccagattcctgttttgtcaagctctcagcaccactgtagataccttgtaatcgttgtaacagcaacatgtaggatgtgtgatcagtaatctgtactatccttaaagtactagtttcaacggccgttctgc

SEQ ID NO: 28635 - DNA, 847 bp, Zea mays
  Clone ID: LIB4760-012-F8_FLI
atcttccaagtcaccaacgcaaattgcaccaagaaatccatcgagaggccgtcgacaggggaattaatggcgtcgtcgtctagcagcagccaccgccgcctcatcctcgcagccgccgtcctgctctccgtgctcgcggctgccagcgccagcgccgggacctcctgcgtgccggggtgggccatcccgcacaacccgctcccgagctgccgctggtacgtgaccagccggacctgcggcatcgggccgcgcctcccgtggccggagctgaagaggagatgctgccgggagctggcggacatcccggcgtactgccggtgcacggcgctgagcatcctcatggacggcgcgatcccgccgggcccggacgcgcagctggagggccgcctagaggacctgccgggctgcccgcgggaggtgcagaggggattcgccgccaccctcgtcacggaggccgagtgcaacctggccaccatcagcggcgtcgccgaatgcccctggattctcggcggcggaacgatgccctccaagtaactgcgaagagcatagtgcatgaggaatgagcttgtagctagctcatatgtctgaataataagcacagcaagaagatgaatgcatttctcggatcgttcatccggaacaataattaaaggggatccggatttgttcttgtgatataattaacgattcctgttatacttggaagtagctaggctcgtccccatccaatgcaagcaaagatctgatctcccaacgtgcatgagaaaatgtgagcgatttacttcaccggtccttcctctaattaaatggaaatgtgaagtggaacataagaaattaaggtgaagcc

SEQ ID NO: 28636 - DNA, 965 bp, Zea mays
  Clone ID: LIB4760-012-H9_FLI
ccgaggggggcgccagcgtctcgcctcgccgtcagcagcagcagcagctgcacctccattccacggcttccgtcgtgcgcttcgtctgcacccacaaaggcgacggcgacggcagggggaggagatgaagctgaagcagctggagggcctcttgggtggcctgacccagttctccgaccccaagctggagctggagcagtatgcgacgggccctcacatcgcgtcgcggatgctctacatgacatgttcttggtattgatattgacccgactatcacttgaacttgctcaagaaaatgctgctgatctggagctggacatcgatttagtttggtctgacataaagaacttaaatctgaaaggcgtccatgttgatactgttgtcatgaatcctccctttggtacacgaaggaatggagcagacatggagttcctctctatggccttgcaggttgcttctcaagctgtctattctctacacaagacttccactagagaacatatcaagaaggcagccttgcgtggcttcaatgccatcagtgcggaggttctatgcgagctgcgttacaatctaccgcggacgtacaagttgcacaagaaaaaagagatcgacattgcagtcgatctgtggcgctttgttcctaacgcccaacgccgcagctagcgcgctcgctatgggccgaggggcacaggtgatggaatggaactgaacatgaatggaaaatgatcaaatggatatgtgtctcaaaaggctggacttgatcgaagagatcccaagcgtcacgcttgctgtgcttatcgtcttcttggtgccagtaagggtagctcagaatttgacgaactgtgtagagttttgtgggcacagatgatgctcccagtagtgtgcacaatgaatgctttgtatgtattgtgctctattgcctgtgctaacgctacagaataatatttacaattaatttggtgatc

SEQ ID NO: 28637 - DNA, 942 bp, Zea mays
  Clone ID: LIB4760-017-D10_FLI
atcgcacatattattgagaccaactagcaacatagaaagcacaatattgtaccaataatggcagccaaaatattttgcctcattatgctccttggtctttctgcaagtgctgctacggcgagcattttcccgcaatgctcacaagctcctatagcttcccttcttcccccatacctctcaccagcgatgtcttcagtatgtgaaaatccaattcttctaccctacaggatccaacaggcaatcgcagcaggcatcttacctttatcacccttgttcctccaacaatcatcagccctattacagcagttacctttggtgcatttattggcacaaaacatcagggcacaacaactacaacaactcgtgctagcaaaccttgctgcctactctcagcaacagcagttacctttggtgcatttgttggcacaaaacatcagggcacaacaactacaacaactcgtgctagcaaaccttgctgcctactctcagcaacaacagtttctgccattcaaccaactagctgcattgaactctgctgcttatttgcagcaacaacaactactaccattcagccagctagctgctgcctacccccggcaatttcttccattcaaccaactggcagcattgaactctcatgcttatgtacaacaacaacaactactaccattcagccagctagctgctgtgagccctgctgccttcttgacacagcaacatttgttgccgttctacctgcacactgcgcctaacgttggcaccctcttacaactgcaacaattgctgccattcgaccaacttgctttgacaaacccagcagtgttctaccaacaacccatcattggtggtgccctcttttagattgcttatgagttatagttcaataataaagttttttttgctgatatttgtggcttcccagaaataagaaagtacatttct

SEQ ID NO: 28638 - DNA, 1278 bp, Zea mays
  Clone ID: LIB4760-019-A4_FLI
ccgggacttcataagattcggagccaacagtgctggagttggtctgagcatccctatttgtaggacgctccccctctagtcatctcctcaaacaaaaaccctagccgccgcgccgccccgctccctagtggtcctccctcccccaccactgcagctccgtcccggcggccccaagagttgcggcgaggatgaacgtgaagggcggcagccggattccggtaccccctccgggggccagcgcgctggtcaaggtggccgtgttcggcggcgccgccgtgtacgctgccgtgaacagcctctacaacgtcgagggtgggcaccgcgccatcgtcttcaaccgcatccaggggatcaaggacaaggtataccccgaagggactcactttatgattccatggtttgaacgaccaatcatttatgatgtccgtgctcgaccgaatcttgttgagagtacttctgggagtcgggatcttcagatggtgaaaattggtctccgtgtccttacaaggcctatgccagagaggctaccacatatctacagaactctgggagagaacttcaatgagagagttttgccttcaatcatccatgaaacactgaaagctgttgttgctcaatataatgctagtcagctgatcacacagagagagactgtgagtagggagattaggaagatactgactgagagggctagattcttcaacattgctcttgatgacgtctccatcacaagcctgagctttgggaaggagtttactcatgccattgaagcgaagcaggttgctgcacaggaagctgagcgtgctaagttcattgtcgagaaagctgaacaagataagagaagtgcaattatcagggctcagggagaggctaagagtgcggagctgattggtcaagccatagcgaacaaccctgccttccttgccctgaggcagattgaagctgcaagggagatctcccacaccatttcggcctcagccaacaaggtgttcctggactccaacgacctgctgctcaacctccagcagctgaatgtatcgagcaagcagaagaaatgatgtcacaacgttatcccctttcttctgagtttgcagtcagtagtggatgcctttgtaccagacattgtgaggaacgctcggttttggatgtagtttcgccaatcttcctgttatgtggaacttgcgagtatttgctcaaaggcaagcaagctgacaggttttgtttaaacgtaactacaggatgagaaagttttcaataaggaacaaattctgttatgcc

SEQ ID NO: 28639 - DNA, 759 bp, Zea mays
  Clone ID: LIB4760-024-F1_FLI
taccctcgaggccggccgggatcgcacatattattgagaccaattatcaacatagaaactagaatagagtagcaacaatgacaaccaagatattttccctccttaagctccttgctctttctgcaagcgctactaccacgccattttcctgcaatgctcacaagctcctatagcttcccttcttcccccgtacctttcatcagtgatggcttcagtatgtgaaaacccaattcttcatctctataggatccaacaggcaattgcagcaggcatcttaactttatcacccttgttcctccaataaccgtcagccctattacaacagttatctttggtgcatttgttggcacaaagcatcagggcacaaaaactgcatcaacttgcgctggaaaaccttactgccaactctcagtaacaaaagtttattccattcaaccaactggctacattgaactctgttgcttatttgcaacaataacaactaccattcagccaactagttgttgtgagcctgttgccttcttacatagcagcagttgttgccgttctacccgcacgatgtggctaacacaaccaccctcttacaactgcaacaattgccgccattcaaccaacttgcgttgacaaacccaacagcgttctacctacaacccatcattgatggtgccctctgttagattgcttatgagttatagttcaataatgaagttttttggttgatgtttgtggcttcccagaaataataaagtacatttctag

SEQ ID NO: 28640 - DNA, 1337 bp, Zea mays
  Clone ID: LIB4761-002-E4_FLI
ccgggatctctaagcaatgttctgcactgtatcatccgtattatatataagtgaataaaaaaactgcagattttattgtggaattccaaaagcagctacagctagcctacatcgccggtctagctcaacaagattggtaccgtatctataagactataagataaattcgcctgatatatctccaagaaaaagcaagcccatcgtcctaccgtattagcaatggaggcagcagcaggagaggggccgacgacgacgatgaagacggtgtgcgtgaccggcgcggggggtttcgtggcctcgtggctcgtcgagcgcctcctcgccggcggacgatacaagatccacggcaccgtccgcgatcccggcgacgccaagaacgcgcacctgctggggctggacggcgccgcggagcggctgcggctgttcaaggccgacctgctcgacttcggcagcctggcggcggccattgcaggctgtgacggcgtcttccacgtggcctgccccgtccccgactataccctcaccgaccccgagaccgagctgctggctcctgccgtgacgggcaccatgaacatcctcagggcgtgctccgacgcccatatcaggagggtcgtcgtggtctcctctctctcggctgtcatgataaaccctgactggggcgagtgcaaggtcatggacgaaggttgctggtctgatgtcgacctctgcagaactactaaggtatatggaggcacgacatgaagagcatctaactacagtaaaacacattttgaggtacatgctactacaatcaaggttgggggtattctatccaaggaacaagaacatgatagaaatgtcgggatgcagtgataaggacctagctggtgatatggacagtaggaagagcacttcaagtaccatattcttcctataaaaaagtactatcaactagcaatcctccaagcaaagtgtggtggctctcttaagttgcgaagctaagtatatagcagctgcaacaactgcctaccaagctatttggctgacagggttgctgtttgaattgaaggatgaaagagcaagtgtgttagtgttgagtgtgtcattgtccaagaatcatgttctcatgattgatccaaacatactgatgtgagatttcatttgattcgggtatatgacaacatgaagagaattgaagtgaagttcatcagaacaaaagagtaattgggggatattctcaccaagcctttttgcaagaataagtttgctgaattttgcaacaagattgctatgtgtatcaaggattatggggagagttgctaaaataaaccttggacacacttgtttcaatcaaattt

SEQ ID NO: 28641 - DNA, 1112 bp, Zea mays
  Clone ID: LIB4761-002-E6_FLI
ccgggatcccatggcacacggtcgtttgaggcattgcgagtcccgagtcgactctctcccgtttcccggccgtccccttcaccaatccaatccaactccaattcgtcctccggtcctccccctcgaggcctacgcacaatagattcgatctcgagtcctcgaatcctgccttttcctctggtcaggaaagcatgagcttgatttccggcgcttctcgccgtcgagctcgaaccagaagataagaagaatccgctaggggcgagccccatagaagatggccccgcacccgcaggaggacaaatcagatcggcacagcagcggcgccggtgcgtcgagggagcaggaacggcggccgtccaaggcatggggaatcctcatcttcggcctcatcggcgtcaccaccgccagtttcgctattactcaagttcgcaaaagcatggactggttctacactcagttgaataaagtgcagtcaacatcatcttggacttggaggtatacaagtaataactcaagtcgtggaagcttcagtgaggaagctaagaaaagatattatcagcgaatgcagcaggaatatgaagaggaacaagagagagttcaaagaataaggcatatgcagagtgtcttcaacagagagaggaataaatttggacgaggttatgaaagctggagggagaatggccctcctcgtggctacaattacatccctcgggatgattggtattggcagaccgatacttctcactcagaacataaaaataggcggacgtacacaccggcaggacctagggtttatcctatgtcgcatcactatgcagttctaggtcttgacagatcacgagcgacaccatacagatgcagaagtgaagactgcttttagaacaaaagcgatggaagtgcatcctgaccaaaatcaaaatgatagagatgctgcagaagagaagttcaaggaggttgtcaagtcttacgaagcaattaaatcggagagaaaaaacggtgtaagttgatgcaaacttccagtgtggtcggatcaagtggtaaagactgggaccggatcacgcgggaatcagttgtgccttgtatatgtaatcaattgttgccggcagcttgac

SEQ ID NO: 28642 - DNA, 1631 bp, Zea mays
  Clone ID: LIB4761-003-B9_FLI
ccggggcgtactcctcgatctccttcaagcagctaacataattaactcatgggtgcatagagatatgccgccgacgacccatcatatctatgggtccctccccttgcactgcatctccttcaattcctagtgtttgcttctcccttccttgacctttgcttggaaccattgattgatagttacttattattgggcatggagcacgtcatctcaatggaggagatcctcgggcccttctgggagctgctaccaccgccagcgccagagccagagccagagcgagagcagcctccggtaaccggcatcgtcgtcggcagtgtcatagacgttgctgctgctggtcacggtcatggtggcggcgacatgatggatcagcagcacgccacagagtggacctttgagaggttactggaagaggaggctctgacgacaagcacaccgccgccggtggtggtggtgccgaactcttgttgctcaggcgccctaaatgttgaccggccgccggtgatggaagaggcggtaatgatggcgcctgcggcggtgagtagtgccgtagtaggggaccccatggagtacaatgccatactgaggaggaagctggaggaggacctcgaggccttcaaaatgtggagggcggcctccagtgttgtgacctcagatcaacgttctcaaggctcaaacaatcacactggaggtagcagcatcaggaataatccagtgcagaacaagctgatgaacggcgaagatccaatcaacaataaccacgctcaaaccgcaggccttggcgtgaggcttgctactagctcttcctcgagagatccttcaccatcagacgaagacatggacggagaagtagagattctggggttcaagatgcctaccgaggaaagagtgaggaaaagaaaggaatccaatagagaatcagccagacgctcgagatacaggaaagccgctcacctgaaagaactggaggaccaggtagcacagctaaaagccgagaattcttgcctgctgaggcgcattgccgctctgaaccagaagtacaacgacgctaacgtcgacaacagggtgctgagagcggacatggagaccctaagagctaaggtgaagatgggagaggactccctgaagcgggtgatagagatgagctcatcagtgccgtcgtccatgcccatctcggcgccgacccccagctccgacgctccagtgccgccgccgcctatccgagacagcatcgtcggctacttctccgccacagccgcagacgacgatgcttcggtcggcaacggtttcttgcgactgcaagctcatcaagagcctgcatccatggtcgtcggtggaactctgagcgccacagagatgaaccgagtagcagcagccacgcattgcgcgggggccatggagctcatccagacggcgatgggatccatgccgccgacctccgcctccggatctacaccgccgccgcaggattatgagctgctgggtccaaatggggccatacacatggacatgtattaggcactgcgggtttcgtgatcgctgggaacattttatttgcaggcgtcgctgaataaggctggttgtctcgatctcccttgacatgaaatccaaataactcacaattaact

SEQ ID NO: 28643 - DNA, 662 bp, Zea mays
  Clone ID: LIB4761-005-A1_FLI
acgccccccatccccttccttctctgcgaaactgagcacttgaccccgaaccctaattcaagctactgtatttggctatctatatccggatctgatccaatcacaagcgcaagtgtctgcacgtatcgtccctgctaatttcgttctttatatcctttgttggatccgccgctgcctcctgcattccattccaggatgacgacgctcaggaacctcaagatcaagacgtcgacgtgcaagaggatcgtgaaggagctgcgctcgtacgagaaggaggtggagaaggaggctgccaagaccgccgacatgaaggagaagggcgccgatccctacgacctcaaacagcaggagaatgttttggctgagtcaaggatgatggtcccagactgccacaaacgacttgaaactgcactggctgacttgaaagcaacactggctgaactgaaggagtcaaatgagcaaggtgccgagattggagaagctgagagtacaatcgcagaagttgaagcagttgtcaagccagcagaagattaaactaaaaaaaactcttggtttgctgaactgttagcgcacatcctattttctcatattcagcccttgtgagcttattacgatatgtttgaggcgtcaaatcctgtaccattatcatcacttctgtctcg

SEQ ID NO: 28644 - DNA, 522 bp, Zea mays
  Clone ID: LIB4761-006-D1_FLI
ctcgaggccggccggacacagccgccagagacagacgctgccgccgtcggccgtcctccgccctccagaatcacagtccgctgctcgcccgaccggagtgaggcggcgcggcgatggagcacgggtcgttgacagactcgacgtcgtcgactttctccatcatggacgaggaccacaccctcgccaactccgccagattcgtcctcaaccaggacccaagggtagcattttgtggatataccatccctcatccttctgagaagaaagtgaacataagacttcagacaacaggagatgcagcaaaggatgtactgaaagatgccttgcagaatctgatgattatgtgccagcatgtcagagggacaatggacaccgcggtggttaaccatagagcaaaaaatgctgcagaagaaatggatgttgatcagaactagaatgaacgcagtgtttgttgagaccaaacacaatatcattacagcttttagtactggtcagaagctcggagagctcagtcattgttcc

SEQ ID NO: 28645 - DNA, 1351 bp, Zea mays
  Clone ID: LIB4761-007-C2_FLI
ccggggatatcgccgtctgcccgtctctactgggaagggaagggagcacctgcctgctcctgcgcggcggcggttgagcggcgtggaggaggcactacccgttcttctgggctgtcaggccttccgtaccgccgccgccgtcgccactcccactcccacagccgcgcacgcgcttctcctcctcctcctcactgcgctccaccaagagatccgccgcaaagacgtcaatggactcgtcttcagtcggtgaacccttctacgtcgtccgcaagggggacgtcatcggcatctacaaaaccctcagcgaatgccaagctcaagtcagcaattcggttcgcgacccttctgtcaccgtcttcaaaggctactcgctgcgtaaagacaccgaggaatacctcgccgcgcgcgggttaaggaacgctctctacgccattgatgcaacagatgcacgagatgaattgttcgacgatctagttccctgccctttccagcaacctgatggagctgcatcgtctactctgaaaagatcacaggagattgaaatcggaccatcaaagaagcatcccaaagttgatgagcaggtaccattacctgatagtcatctctcttgtattcttgaatttgatggtgcctctaaaggaaatccagggaaagccggtgctggagcaataataaggcaggtagatggttccgtgattgctcaactacgtgagggtctgggcattgcaaccaacaatgctgctgaatatcgtgcattgatcctagggctaacatatgcagccaagaaagggttcaagtatattcgtgctcaaggcgactctaagcttgtttgtaaccaggtccaagatatctggcgtgttaagaatgataatatggctagcttctgcaagaaagtgaaggagctaaagggaacatttcatttattccaaatcagacatgttttgagggaatataattcggctgctgatgctcaagctaactttgcagtagaacttcctgttggtgaagttcaagagcagtcgaacttcccatgctagcagttgtgttgtggtcaagtgtggtttgtgcatcgctaaggttctgggactgaagctatgtcacatttgttcagttctcattgacacaaaaggaagagacgaaacaacagttgtattggaagtggtagtgggtctgatatatctgcggagtattgaacagacagatgcaatattgagtagattcttaggaaatttaatcgtctcaaacttctagatagtgcgagttgatttgtccaggaccagtgtttgctgatatacgatgtttgtattcagaacagtattagtaccggaaactttaattgctcctttctctt

SEQ ID NO: 28646 - DNA, 1575 bp, Zea mays
  Clone ID: LIB4761-011-B6_FLI
ccgtatttccgctgcgcgtctcagactctcggtcccgccacacacccccatgccgcttctccacctctcgctcccgtcgcaccgcctcctcgtcggcggccgaggtcggctgttcttcccgtcgtctccccgtcgtatctgcctatctgtcagggcggctggggatgcggcggtttcagttgcagagggggcttacggactccccttccggccggagggcgccgctcaccaccgcgagctctccgcggcagtggccgtcgtcgagcgcgcctgccgcctctgcgttgacgtgaagagatcactgctttcacgtcgcagcagtattcttgagaagaatgaccaaagtcctgttacagttgcagatttcggagtgcaggcccttattagtttggagctccagagattgttcccatcgatacctctggtggccgaagaggattcagcttctctaagatcatccaaagctgatgataatagcagtgatatacttgttgagtcgatttttagcgcagttgtagacaaagtgagtaataacggttcacatttaactcaagatgatgtcttgagagcaattgatagaggaggcaaggacgctgtctcatttgattcaaaccctgctacttattgggtgcttgatccaattgatggcaccaaaggtttcttgagagggaatgatgctctgtatgtggtgggtctggcacttgtggtgaatggaaaggtaacagttggagtgatgggatgtccaaattggaccaacgatgacatagtcaacaagaaagatgatagcgttgctgcatgtaatggtcgtggtattcttatggtctcccatattggctgtggcacatggtctaggcgtctgtctgctgatattggtcagttcaatacagctcaggatatttggaaaagatgttttgtggacacttgttcgatcgcacacatggcacactattgcattccagatagccaaacatgggatatgataccgttatctgcttcctacgattcaacaacggatgcaactgatcctagaaatgagaatgaaatccttctcctgtccgttttttgtggcagcttgtgcaagtatctcacaattgcttccgggagagcctcggtttttgtccttcaagcactgccgacaactcagatcaagtcttgggatcacgctgttggggtaatctgcgtgcaggaggccggtggtcagaccagtgactggagtggagaaccgttggatcttgcagctgacctaacatcgcgcagaatcatctaccctcggggcggtgttctggtgacaaatggtgcgctgcatgacaagcttgtcgaaatgatctcagcaagttacaagtagctgcatagcttcacaggccaacacaccttgtcttttcgaatttgaatcattttaccttatctattcgatcttcagtgaaaccgtattcgatcttcagtgaaatcgtatttgatcttcggtgaaattgtatttgatctgcacattcagtatagaaaccacaagcatgttcacttgttcagatggcttccattgccacaagagttacaggaatgaaaacacactgtttcctg

SEQ ID NO: 28647 - DNA, 1919 bp, Zea mays
  Clone ID: LIB4761-011-F5_FLI
ccgggaaacgggctagcgtgacgaggtcaccggccataaatccccaacctccgcacactttccatccgccccacactcgtccactcccccagtcacccccgcgcccgtctttgctctgcctctccgcgccgcagagcagagcagagcatggcgcccccacgccctctcctcgccgccgtcttcctcgccgcggcggttccgctcctcctttctccggcagaggcggggacggtgggcgtgaactacggccgcgtggcgaacaacctgccgaacccagcggcggttgtgcagctgctgaagcagcagggcgtggcgcaggtgaagctgtacgacgccgaccccaccgtgctgcgcgccctcgcaaacaccggcatcaaggtggtggtggcgctgcccaacgagcaggtcgcggcggcggcgtcgcgcgcgtcctacgcgctgctgtgggtgcgccggaacgtggcggcgtaccacccggccacgcagatccagggcatcgccgtgggcaacgaggtgttcgcgtcggccaagaacgtgacggcgcagctggtcccggccatggccaacgtgcacgccgcgctggccaggctgggcctcgacggggccgtcaaggtgtcgtcgcccatcgcgctcacggcgctcgcgtcgtcctacccgtcctcggcgggcgcgttccgggaggacctcgcgcaggccgtcatgaagcccatgctcgacttcctggcgcagaccgggtcgtacctcatggtgaacgcgtacccgttcttcgcttactccggcaatgcgggagacatctccctcgactacgccctgttccgccccaacgccggcgtgctcgacgccgggaacggcctcaagtactacagcctcctcgacgcgcagctggacgccgtgttcgccgcggtcagcaggctcggggagggctacaacggcgtgcgcgtcgtggtctccgagacggggtggccgtccaagggcgacgccaacgaggcgggcgcttcggcggcaaacgccgcggcgtacaacggcaacctggcccgccgcgtgctctccggcaacgccggcaccccgcgccgccccgacgccgacatcgacgtgtacctcttcgcgctcttcaacgagaaccagaagcccgggccgacctccgagcgcaactacggcgtcttctaccccaaccagcagaaggtgtacgacgtcgagttcgtcctcggcggcggcggcgccagccagggcaacggcggcctcgggtggcaggagaacggcggcggggcgagcagcaccagcaccaacccgccgagcggggtgaaggtgacgaccggggaggcgtggtgcgtggcgaacgcgatggccggggagcatcggctccaggcggcgctggactacgcgtgcggccccggcggcgcggactgcaaggccatccagcccggcgcggcgtgcttcgagcccaacaccatggtcgcgcacgcatcctacgccttcaacgactactaccagcgcaagggccggtccatcggaacctgcgacttcgccggcgccgcctacgtcgtcaaccaggcaccgaagatgggcaagtgcgacctcccatcgacggtctgaactgaagcagcagcggcgaggaccgtaacgccagcggccatctcgaggaacaaaagaatcgatggcaggcaggaggcagcacagcagctcagctcatcagtcgccctagagactggactggactctgggggacgccggaatctttgcccaccctttcagactttctttaccgctgcagctttgactccagccccgcagcgacgccgtagaacgaacatcgctgtactaggctgtagctgtacgccttcctttttgcagctttggctaatggtgggtgtgtgtgtggatatgtttgtttagtcatgaccagcactactacttctact

SEQ ID NO: 28648 - DNA, 1070 bp, Zea mays
  Clone ID: LIB4761-011-G11_FLI
ccgggagcagcccggaactccggatccaccgctaccgccgccgcgtctaaaccctccaccgccgcggtgcgtcagaggcagaggcagagaggcagaggcagaggcagccatggggagccgcctcgggcgccgcgtgatccactttgccaacctcccgctgaaggtcatgctgccccccgcgccgctctcctccgtgcaggagttcgccgtgcggaccgtcccctccgcttccaaggtggacatccggcgctgcctcgagtccatgtacggtttttccgtcgccgaggtccgcacgcttaacatggagggcaagaagctccgccggggcccctttctctccgccaagcccgactacaagaaggcctacgtcacgctccgcgccccgctcgcggtctcgcgcgacctgttccccatcggggccatcctcgcggagcgggagcggaaagccagcgcagccgctgcgaggaggaaggcggtggagggcgccgaggtggagggggagagcaaggggaagcactggatggaggacgagagggagggcttctccagggctggctgcgggaaggtcgtgtatgggaaccctgggaggctggggaggaagaggaggggaggggataaggtgaaggagcaagctggggacgaggcggccaagttcccgtggtccgggatgcgcctggctaccgagaaaccgaggagggtgagacgctctccatcgaagaagggaatagtcctgaagcaaaaatcacggaaggtatccctgcagcaccgctcaaagaagttgaaagcttgatagtacttgacttgagctgctgtaccgaaccactggaggatcctgccatcgagcgtggatgcaggccgtggacccataagttcgctggcggacctgccttgtttttaaattaccaaataaacaccgaacgttgaaggacttgtaaggattttgtgcctttgatatgggatttagaaggctgcatcgggcatgtgtgctggaggaccagacctggaagggttcatgggcgttccctatcctatactgtcccttcgtttgatatgagaattgagatttgttt

SEQ ID NO: 28649 - DNA, 1561 bp, Zea mays
  Clone ID: LIB4761-013-E11_FLI
ccggggttacgagatcgaatcatcatccctagcaggctaacgtggcccaaaaggcccaaacattcactgatatcccatgttttgacacgagcggtgggacgtgctgacggagatgggtggcgccgccgccgccgttcttgccgtcgcagccgcacgccggaaatctggtcccttcgtatccttgttctccagggcggcgcgcaggctccacgatgctgtagagactgcagcggcggaggaggacatggcggggacgcggagtccgcggcggcggcggcggagcagcagcagcctccttcttggaccggaattccccgacacctgggacccttcatcgcgtgacacgacgccgcagtctcctccgcggtgtgcccaagctgattatgatcgcactgcatccattattgatggcaagtccattgcagaggacatgaggttacatattgctgaagaggtctgtcaaatgaaatgttcagttggacacgtgcctggtctagctgttgttttggttggtgatagaagagattctgaatcatatgtgcgatacaaaacaaaaggctgtgaggaagttggtattaaatctttgttggcgaagttgcctggaaactgttcagaagatgaagtgatggattcagtgtcaagatttaatgaggatccatctgttcatggcatcctagtgcagttgcctctaccagagtttatggatgaggaaaagattctgagcatcatcagtctgaataaggatgttgatggtttccatcccttaaatgttggcaatcttgcactaagaagccgaaatcctttgtttgtgccctgtgctgcaaaggcttgcattgaattattgctccaatctgggattgaactgatgggcaagcatgtatctgtcattgggagaagcaaagttgttggattgccaacttccttacttttacagcggcatcatgccactgtcagtgttatccatgccttcacaacaaatccagaggctattacccgcgaatctgatattgtgatatcagctgctggagtggccaatcttgtaaggggaagctggttaaagcaaggtgcagtggtgattgatgttgggacaaatccaatcgaggatccaaccagtgactacggttatcgcctaactggggatgtctgcttcgaagaagcagtgaatgtggcctctgctataactccagttcctggcggagttggaccagtaacgattgccatgcttcttggcaacacacttgattcagcaaaacgcgtttatggcctaagtgactgaaactgacccccctctgaactgtaattttgtcgtgcttgtcctttgtaaactagttctcttctcttttcaacctcccgtcgctctctattttagctgtaggaggagggctgggatgtaccatattcttgctcaataagtattgtattagctgtgtccattaggtaagtttttttgtgtgtgaccatattagcctgttacctatataaccaacacacaatagcaggaacatgtcttcagacacgatttatttgcatttttttataagagaaataggcctgactgact

SEQ ID NO: 28650 - DNA, 1604 bp, Zea mays
  Clone ID: LIB4761-013-G12_FLI
ccgggctctacagatccaggcgctcttctgctgcagcgccgcctctcgtcctcccggcgtcatcgtcgccgccctgatctccgcaggccggcgtgtggcggagatccatccgtgcttgaactgactccttccttagctacaagtacctattatcaaccatgtttggacgcatgccaaggaagagtagtaacaataccaagtattacgaggttcttggtgtgtctaagaccgcaagtcaggatgagcttaagaaagcatacagaaaagctgccataaaaaaccatcctgataagggtggagaccctgagaagtttaaagagctgtctcaagcttatgatgttcttagtgacccggagaagagggagatctatgaccagtatggagaagatgcccttaaggaaggaatgggaggaggcagcagcagtgatttccatatccctttcgacatttttgagcaactttttccgggttctagcacctttgggggtggtagctcaagaggacgcagacaaaagcgtggtgaagatgtggtgcatactatgaaggtttccttagacgatctgtacaatgggacaaccaagaaactatctttatcgcggagtgctttgtgctccaagtgcaaggggaaaggatccaagagtggggcatcaggaacatgccatggttgtcgtggtgctggaatgagaacaatcacaagacagataggccttggcatgatccaacagatgaacactgtttgccctgaatgcaaaggatcaggtgagatcataagtgacaaggacaaatgcccaagctgtaaaggaaacaaggtagtccaggagaagaaggtgttagaggttcatgtggagaaaggaatgcaacataaccaaaagattgtattccagggtcaagctgatgaagctcctgatacggttacaggagacattgtttttgtcttgcaacttaaagaccatccaaaatttaagaggatgtacgatgacttatatgttgagcacacaatctctctcaccgaagcattgtgtggcttccagtttgttcttactcatcttgatgggcgacagcttctgatcaaatctgaccccggggaggttattaaaccaggtcaacacaaggccattaacgatgaaggtatgcctcagcatggccgtcctttcatgaagggccgtctgtttgttgaattcaacgtggtgtttcccgagcctggtgcgctctcccctgcccagtgccgatcgttggagaagatccttccgccgaaaccagggagccaactgtcggacatggagctggaccagtgcgaggagaccacccttcacgatgtcaacattgaagaggagatgaggcgcaggcagcagcagaagaagcaggaagcctacgatgaagacgaggaggaggatgctcaaccaagggtgcaatgtgcccagcagtaaaatccgtgttcgttggaactgttctccaaaagtttcagcaggattttttatccatctgatcatctcgattctttttggcaaaaatataatcgttttataaactttaaactgttagttccatcctagtgtcagggaaaaaatgagagcccggaatggcatgttccttgtttgaactgc

SEQ ID NO: 28651 - DNA, 1570 bp, Zea mays
  Clone ID: LIB4761-016-D8_FLI
aaacaaacccggctctctcacttgcttcaaggccgacgggctatctcactgatagtgataggaacagaacccgtgcatatttcagtcgtcgctcgcggagccgtggcgcatcgcgactcaggcactcaccgaccgcggatatggccccgtcgccatggcctctccttgcgacttccctcctcctcatcctattccaccactcgcctcgcgccgcggcggcgtttccgccgtctcttggcgacggcctcctgggcgccgcccgcgcgccgggtttcgcggcgtggctgcgcggcttgcggcgccgcatccacgagcgccccgagctcgccttccaggagcaccgcaccagcgagctcgtccgcgacgagctcgacgcgatcggggtgccgtacgcgtggcccgtcgcgcagacgggcgtcgtggcgaccatcgccggcggcagcgatggccccgtcgtcgcgctccgagccgacatggacgcgctacccttgcaggaattggtagactgggaacacaagagcaaggagaatggaaagatgcatgcttgtggacatgatgctcacacaacgatgcttcttggggcagctaaattgcttcatgctcggaaggatgatctgaagggtaccgtgaagcttgtcttccagccaggagaagaaggctacggcggcgcttaccatgttctcagagaaggtgtcctggatgacgtgtctgccattttcggcttgcatgtggatccaggacttcctgtaggcaccgtttcgtccaggccagggccgtttctagcagcagcaggtagatttctggtgacggtcactggaaaaggcggacatgctgcagggccacaggatgctgtggatcccattgttgcggcatcctctgccatcgtcagccttcagcttcttgttgcccgcgaaattgatcccctccaggctgcagtggtctcggtcacgttcatgaaaggaggtgatgcttacaacgtcattccagagtcagcatccttcggcgggaccttcaggagcttgacaacagaaggcttttcgtatctcatgaagaggatcaaagagatcatagaaggtcatgccgccgtccaccgctgcaccgccgccgtcgacttcatgcaggagaagctccgcccgtacccagccaccgtgaacgacgaagggatgtaccgtcacgccagagaagtggcagaggccatgcttgggcaggacaaggtgagtgtaggcgcgcagatgatgggcgccgaggatttctccttctacgcggagaagtttgcaggggcgttcttcatgatcggagtccgcaacaagagcatggaggaggcaatgcatcctctccactccccgtacttcgtgatagatgaggacgttctgcctgtaggagctgccttccactctgcagtagcgatggagtacctgaacaaatactcaacgacccggcaaactgagctgctgcgcattgagctgtgatagattattgcttgtaataagggttaccatgccgaggtcatgttgcacaaaagaaagtctgcattgtgcccatggaataaatacagtttctccttgctcgg

SEQ ID NO: 28652 - DNA, 1828 bp, Zea mays
  Clone ID: LIB4761-016-E6_FLI
gctcaccggtcaccgccatggccgggaagcagttcccctccccggcgaactcgcgctccgcctcagcctcctcccgccgactcctcgccgccgtcgccgcctccctcatactcctcacagcttcctacttcctcctcctctccccatcctcgaaccgatccgccccagccatcctcgcgaaccctagcgccaccacatccttcctcgcctccctcgaccgcttcctctccgatccgcatccctctgcctccgccgccgctcccgtagaacttgacgccgcgatccgggtccaggaggatgcccgtctctacggggaccccacatggcccgcgccggccgcggggctgctcagggtctacgtttacgagatgccgagcaagttcacgtacgatcttctgaggttgttcagggattcctaccgggacaccgacaacctcacgtccaatgggagccccgtgcaccgcctcatcgagcagcattctattgactactggctatgggcggatctcatcgcacctgattcacagagacttttgaagagtgttattagggttcagcagcaagaagaagccgacattttctatgtgccattcttcacgacaatcagttatttcttgctggagaaacaagaatgcaaggcactttatagggtctgggagcatctcttaaggaagctttgaaatgggtcacagatcagcctgcttggcaacgttcagaaggcagggatcatgtcattcctgttcatcatccatggtcatttaagtcagtccggagatctgtcaagaaagcaatatggcttctacctgatatggactccaccgggaactggtataaacctggacaagtatatctagaaaaggatgtcatccttccatatgttccaaacgttgatctttgtgatcacaagtgtgtattagaaactcaatccaaaaggagtatattgctgttctttcgaggaagactgaagagaaatgctggaggaaagatccgcagtaaacttgtagaggaacttaaaagtgcaaaagacatagttatagaagaaggttctactggagctcagggaaaagcagcagctcaggatggcatgcgcaagtctctcttttgcttgagtccggctggggataccccatcttctgctcgcctgtttgatgcaatcgttagtggttgtatcccagttataattagtgatgaactggagcttccatttgaaggaatacttgactatagggagatagcattgtttgtttcagcaagtgatgctgtgcaaccgggctggctcttgaaatacctaagaggaatcaatgccaaaagaataagagaaattcagtctaatcttgtgaagtattcaagacattttctgtattcaagtcctgcccaacctctcggaccagaagaccttacatggagaatgattgctggtaagctggtaaatatcaagttgcagattcggcgttctcaacgtttggtcaaagagtcaaggagcatatgtacatgtgaatgtagagttgggaacaccacgagaatgctttgaccaatattttcatttgtgcctttaaacttttgtagcatagccgttttttgttaccaatgaggcgagctttgagtttggcaaaatttgccgatgtatttgtaaatgcaactgagctggaaagagttgtgatactgtactaatcccgatgcttgtgtttgctttactgcccgttaggaacaaaaggaatgtaaaacagagaaatgtaaaaaaaatcaagagcttgaagtagatatttatttcctccatttcatgaatgaaagtaagtcttttcataggaaaagaaaacttcattccact

SEQ ID NO: 28653 - DNA, 1623 bp, Zea mays
  Clone ID: LIB4761-017-H7_FLI
ccgggctctttctcttcctccttccccaagtcggcgcggtagcttcccgtgtaccgtacacagcaggatcctccgccttccttgtgttccgcgcttccacaacagtttaccgcaaggaaggaaccatggacatgaactccaacgccaacaacagcactgccgcagcagcatcggctcccatcaacaaccagcaggaggctgtggtgtcatccccaaccagaaaggagcaagccaggaaccccaagaaggcgcgggcggcgccgcagcaggcgggcggcagcggggagcctaggccgcggcctccgccggacgcggcgcacagctgcccgcgctgctcctccaccaacacaaagttctgctactacaacaactacaacctgacgcagccgcgctacttctgcaagacgtgccgccgctactggacacacggcggcaccctccgcaacgtccccgtcggcggcggctgccgcaggaacaagcgcgcctccagctcctcgtccccgtttccgggcccctccagcaccgccgccaccagcgccgcgatggagaagaccgtcagcacgcggctgatgctgatggcgaccagcaccatggcgatgccctccccgacggcaggcctgtttgttcccgatgacatgtccccggcattcacgccgacgacgggcggtagcggcttcgacgacctcgccggcatggacgagcagcaccagcagggcttcctgcccttctcgccgctgtccctgtccgaccaggcgccggagctggctcctggaggaggaggtgacacgacgccgtctttcctggacatgctgacaggagggtatctcgatggcggcggctacggcggcatgagcggtggcagcgatgcgatggacatgccgttctcgctgcctgagatggggcccccgacaactgatccaatgccgtttcagctccagtggacgtcatcagagcttgacaactacatcaacgacgacggtggttatgcagcaggaccagccgccggagtgcagcagcagcagcagcagcagcagcagcagattaatggtggtgatcaccagaagcaggacgagaacaaagaggcggggaacggcaaaggcaacgacgacggcggcggcgggtcgtcgtcggtgtacagcttctggatgaacaccagcggcagcgacggggcagaggggtagtgcgccactgccagtgccagccacaggaggaggcgaaagtgctgctgcaaactccctcgcatcatctggtcggtgcaagtgcagcagacatccttcgtcgacgcaatcaaatcatcaaaaggtggcaacagggagtgaaagggggaagaagttcaccatccagcgtagaggatagggtgcatgttcatgtttgatttatctgcattgtggtcggtcgtggttgcaagtcatcttgcaccaccctttgttttggttcagtttgcatgcgttcgttcgtcagagtttacttgcagcagtctttggatcgccggcagagattagttaggtatctatgctttgttttcgtcagttcgtcgttctagataatgtcttaataattcctcagtttctttctttgttaactagtcgtcgtctaaaccttttcgtgtgtagtatttagttt

SEQ ID NO: 28654 - DNA, 2022 bp, Zea mays
  Clone ID: LIB4761-018-D12_FLI
ccgggatctgacgttctagggtttggcggctcctctatcctttctccatccgctagcaggcgcgaggcgccccctccgaccgacactgaatcccgcctccaacctccgctcgaaacccataccttcggtctcctccgtctgtccgtcgcccatccggccgcctcttctcccaccagccgccgctgccgcacgttagctcctcctgcatcgtcgccggacctccgctacgcccccgtgcatccttgccttggcaggcaggatctggccacctttcgccggcaacagttgggcgccgcataggtaaccgcctacccccgaggcaaggcagtaccccgtcgcccagcgtataagcgcggaaggagggcgcggaatagcgccttttctaacactaatggcaacggcggcggcggatggcccccctgtggaaccgcagtctctgaagaagctgagcctctggtcgctcaagcggtccctggacctcttcgccccggcgcacgccctcctcttcacgcccgacgccgagagcaagcggattcgtactgggtgcaaggtgagtgcggagtacggtgcggtgaaggacctcacgccggagcaggggcgcggtgggcagggcaagggtcctgcgccgccatcttcaacagctttggcattgccaggaacacaagatacaaaagatgctcacggagaaggctctaggaatgccattgtccctgcaccacttatgctgccaaaagcacctgaatctaccatacctggcaaaaatacaactctgtcaattcctggatcatctgacagattttctacatccgcactgatggaaaggatacctagtagatggccacggcctacatggcatgctccttggaagaactatcgggtcatcagtggtcacttgggatgggttcgatctattgcatttgatccagcgaatgaatggttctgcactggttctgccgataggacaataaagatatgggatcttgcatcaggaaccctgaagcttacactgactggtcatattgagcaaattcgtggacttgctgtcagccaacgtcacacttatttattttctgctggtgatgacaaacaagtaaaatgttgggatcttgaacaaaacaaggttattaggtcctaccatgggcatctgagtggtgtttactgcctagctctccatccaacaattgatatcttactgactggtggccgggattcagtttgcagggtgtgggacatcagaacaaaagcacatgtttctgctttaacagggcatgacaacactgtctgttcagtgtttgctcgtcctacggatcctcaagttgttactggttcacatgatacaactattaaattctgggatcttgtagctgggaggactatgtgtacccttactcaccataaaaagtctgtccgagctatggcgcttcatccaaaggagaaagcatttgcatcagcatcagcagacaacgtaaagaagtttaaccttcccaaaggcgaatttctgcacaacatgctgtcgcagcagaaaacaataatcaattcaatggctgtaaatgaggatggtgtcttggcaactggaggggataatggaagcctgtggttttgggactggaagagtggtcataactttcaacaagatcagactatagtccagcctggatcactggagagtgaggcatgcatatatgccttctcatatgacgtgagcggatcaaggcttgtgagctgtgaggcggataagactataaagatgtggaaagaggacttgacagcgacgccagagactcatcccatcaatttcaagcccccaaaggacatccgaagatattgatgctcaaatcccacaagtagcaagctagtggatggttggagcctccacaattgtgtgacccaaactcgcttcttccctgagcccaattgaaattttgctggggtttgctctattgtataatctgatgcctgtactccaccagtctgatgccttggtccaacgctttgaaacccttagactgtttctttgtgatc

SEQ ID NO: 28655 - DNA, 796 bp, Zea mays
  Clone ID: LIB4762-002-E2_FLI
ctcgaggccggccggggtttccccttcttccccatcgcgtgccctcgccgcagccatcttccatggcggaccagctcacggacgagcagatcgcggagttcaaggaggccttcagcctcttcgataaggatggcgacggctgcatcactaccaaggagcttggaactgtgatgcgctcccttggccagaaccccactgaagcagagctgcaggacatgatcaacgaggttgatgctgatggcaatgggaccattgacttcccagagttcctgaacctgatggcaaggaagatgaaggacaccgactccgaggaggagcttaaggaggcctttcgcgtcttcgacaaggaccagaatggtttcatctcggctgctgagctccgccatgtcatgaccaacctcggcgagaagctgactgacgaggaggtcgacgagatgatccgtgaggccgatgttgacggcgacggccagatcaactacgaggagttcgtcaaggtcatgatggccaagtgaggagcgatccccgttatctatgaatgaattgaagtgaaatatcaggcacacaagctgtactttgccatgtcccttttgagtacacatcagtatcatgcaggaggtaatgtctagtagtggtcggtttaggtggtgtagtcatgggaactcgacatcagatacctggtctcttttgattgtgatgttatcttgcattattgctcctgctggagcttttaggatttgttgtaagctcatattttcagggggttttggatcttttgtgcgagtcttgtatctcgttt

SEQ ID NO: 28656 - DNA, 1212 bp, Zea mays
  Clone ID: LIB4762-002-F2_FLI
ccggggatagaagagagaagaaacagacagcctaaagcccttcctctctcctcggcgccggaatggcgaaaagcggcggcgagtccactgtggaggttcctattcccgcttccgcgtcggctacgaggccgaaggcgaaacaccgtatagagatcgaggggtaccctgtggatggcgtctccattggcggtcaagagacttgcgtcatcttcccgactctgagcctcgccttcgacatcggccggtgcccgcagcgcgccgtctcccaggagttcctcttcgtctctcacgggcacctcgaccacatcgggggccttcccatgtatgtggccacgcgggggctcttcaggctgcgtccgcccaccattttcgtccccgcgtgcctccgggacctcgtggagaggctatttgaggtgcaccgcgccatggaccagtccgagctcaaccacaacctggtccccctggaggtcggggaggagtacgagctcaggagggacctcaaggtcagggctttcaggacctatcacgccatacccagccaggggtatgtgatatactcggtgaagcagaagcttaagcaggagttcattggcctaccagggagcgagatcaagcggctcaagctatcaggtgtggagatcacaaatacggtgtccacccctgaaattgctttctcgggggatacaacagcagatttcattcttgatccggataatgcagatgtgctgcaggcaaaaattcttgttgtcgagagtacctttccagacgactcaatttcagttgagcatgcaagagaatatgggcacacacatttatttgagataacaagtcaggccgacaagcttcaaaacaaagctattctactgatccacttttctgctcgttatactacagaggaaattgatgcggcaataaacaaattgccaccgtctttccgtagcagagtttatgccttgaaggaaggcttctaataaaaacatgaaccaggaaatcagtattgaagttttgtcggagcagttttccaaattggattgcgtgggtatttttcaccggaaacctttttgctatgtgtgctctgatgatactataccaatcatctgaaggttcatgcggggctttttgttgtcggtactcatgcttgtgacattggaatgtttgaatggtgaaatgcgaaacatcatgtgtaagcaccatttacttaatttctttttg

SEQ ID NO: 28657 - DNA, 1142 bp, Zea mays
  Clone ID: LIB4762-003-A2_FLI
ccgatatacttagaattacataagcaaatgccaatgtactaaaaaaagaaaaaagaattcggatccgcctccatggctgccgcttcgcagctcctctctctgttcttcctcctcctcctccctgcttgtgatgccatctactgcgacgaagacgactgctacgacctcctaggggttaagcaggacgcgaacgcgtcagacatcaagaaagcgtactacaagctctctctcaaacaccacccggacaagaatcccgatccggagtcgcggaagctcttcgtcaagatcgccaatgcttacgagattctgaaggatgaatccactagggcgcagtatgactttgccattgaacatccggaggaggttttctataacacagctcagtactatagggcatactatggacataaaacggatcctcgtgcagtgttgattggtcttcttctaattgtttcagcatttcaatacattaatcagctaacgaggtataaccaggccatgaaaagtgtcaagcaaactcctgcttacaaaaataggttaaaagctttggagtatgagcgaacaggaggaattgctagcaaaaagaagggcatcaagcaggtggataagaaagttgaagaagagctaagtaatgaagttgaattgcaaattcatggggttgaaaaaccgtctgtttggaggctgtttggtgtccaatttatactttggccttactctgttggcaaggcgcttacttggaagatttgttggttttggagataccgggtaaagaaattaccatatacatgggaggatgcttgctacttgacctggatttcactccaaatacctgcgaatgcatggaaaaatatggatgagtccaggaaggaggaccttgtgagaagacacctctgggaaaagagcaacatggagaggtatacttcagggacgaggaaggaaccaaagcgtaggaggtagctgtgcaacatttttgacctgagactacagcaactttaaacaatacaacatactcctatattggagtgaaaagttattgaccaggcttgagttcaccgatagctaattgctaggatccccgggaagtggcatggctaaggaatcatgtttggaggacaattcatgtaataaagtgatcaaggccg

SEQ ID NO: 28658 - DNA, 723 bp, Zea mays
  Clone ID: LIB4762-003-C8_FLI
ccgggaagtaccaactgcccgagacaagaacaactccaattcccatctctcactacggcaacactttgcgagctgagccatcaaagctcggggcggatggcggggcggcggcagatcaagaaggagtgggtgcaggcggcggcggacgcggcgtcgtggtgcgtggcgctgtcgctggtggcgatgctggtggtgctgtgcacgctgggcgccggggaaggcggcggcgccggcgcgccggtggtggtggtgcgcggcgcggcgctgtcggcgcggccgtgcgaggagatctacgtggtggcggagggcgagacgctgcacagcatcagcgacaagtgcggcgaccctctcatcctggagcggaacccgcacgtgcacgaccccgacgacgtcttccccggcctcgtcatccggatcacgccgtccaagcccaggtagatcgatggcgatccatcggtcgtcgtgaaccaaacagaatgccgttgctgacttgctgtggtgtcgtcaagccccctctgcatgcatgccgcgtacgtactacggtgtgcagactgcactgcagagggagcgtagcgatgcaagaggacgccatgtacttactgttaagtatgcgtgaacagcgtgtagcaagaagctctggacgaggcctccagcctcctgtgtgtaaattgtaagggacgccgcgctagtgcttcaagtgaatgaagagataaaattgttggc

SEQ ID NO: 28659 - DNA, 1018 bp, Zea mays
  Clone ID: LIB4762-004-C5_FLI
ccgggcccgttcccctcgtcgacacctgcagtgccaagttgcatcgactcctccccggtcctccaccgcccgccgccgatggatgtggatgtggacgaggccaccgccacccctgcctccgcctctgccaagcccgcttccaacggcgaggccccctccggcgcccgcgaggtggatgtcggcgaggagtacacgctcgccggcgttctgcgcagcttcgtcgacggcgtctggtacccggacgagccgctgctccggcggctccgggcggcgtcctgcgaggccgcgccgcggctgaagggggcgtctcggaactcagcgcgggatctgctcgagtggacaaggcagggcagcggcctccgcgccatcctcgtcatctcggtcgggacaatcatgcctatagcattgactggccttttaatcttcatgttctttctgctaattgccactgctaatgcgatcatcgtctcagccctgatgtcactggccgctgctggcggattcttggctatcttctttgcttgcttggttgcagtgtatattggagcagtaggagttgctatctttgccatttctgccattgtcatctcatcagttgttggagttatgattactactggttgggttgggttcttctggatgatctggttcaccgcaaggaagagcatggacctgacgaagcattccatcagcatgacgagctcggcagtccaatcctattccgcgtcccgccaagtgaagcagaagcatgtcgactgaggctagttggttgcgtcttgcgtcctcgggtcgatctgtgtgaattacggtagacgacatgcttgttttggcagttctgtttttctcggacactggtgcataaatactagctctgaacttcggcagcgtgtacgtttgtcacggcggccaatgctgttctgtatggtatagtgatcagatgattgtacattgtgcaggtatgcagtatgtacatgccgattcatgagttgataataaaactatcactatattttttttc

SEQ ID NO: 28660 - DNA, 1017 bp, Zea mays
  Clone ID: LIB4762-005-C3_FLI
gaaccggcggtggttaggcgtgatctctctgtctctctagggtttttgattttagccgccgccgctgctcatctcacatccctcgagaagacgcctgctcctcgccgatcgatacgatggccgtcttctccgacctccacaccgccgacggcctcaagtccctcgaggctcacctcgccggcaaaacctatgtgtctggtgactccattactaaggatgacattaaggtcttcgccgcggtgccgtcgaagcctggcgctgagtttcctaatgccgcccgctggtacgagaccgtctctgcggctgtagcctcaagattccctggtaaggctgttggtgtaaatctgcctgcgggatcagctcctgcggcagctgctcctgcggatgaggctgaggacgatgatgaccttgatctttttggtgatgaaactgaggaggacaagaaggcagctgatgagcgtgccgccgctgccaaggcctcttctaaaaagaaagaaagtggtaaatcctccgtccttatggatgtcaaaccatgggacgatgagactgatatgaagaagctggaggaggctgtccgcagtgtccagatggagggtctgacttggggagcatcaaagcttgtgcctgttggatacggcatcaagaagatgactatcatgttgacaattgtcgacgatcttgtgtccatcgacactctaattgaggaccaccttacgcaagagcccatcaatgagtacgtccagagttgcgacattgtggctttcaacaagatctagagttcagtttctgagtttgggcaacggcagcggctcagctcgtcaagtttgtgctgggatgccagtttatcccttctagtctattacagaaatgttgttcggagctgagtctattataaacatcttggtctgagtttattgttgagtggtgccagtttttttcaatatacatttatcttaaaaacagcggtactgatgtttttttgtctaaagttaatgagtttgcaatggttctgagtct

SEQ ID NO: 28661 - DNA, 847 bp, Zea mays
  Clone ID: LIB4762-007-H9_FLI
ccgggctcttcgctaccccagcccagtcacgtccttcgcagtttgccgtcggccacaccgcatcgagcgccgccgccactcgccctcccctgccatctctcgccggccgccgcctcccgcccaccggccaccgcagcgtgttatatttcagcccctcttgatcggccacccgaaacccgcaggagagaggctaaggaacgatggggtggaaggcggcagagaagctcatcaggcactggaaggtcctgcgtggtgacaacgtgatgatcataagaggcaaagacaagggggagtccgggctcatcaagcgggtcattcggtcgcagaatcgcgtcatcgtcgagggcaagaacttggtcaagaaacacattaagcaaggggaagggcacacaggtggtattttctcggtcgaagccccacttcatgtctcaaatgtccaggtggttgatccagtcactgggaaaccatgtaagattggatacaagtatctggaagatgggaccaaagtcaggtatgctagaggaatgtacgcatcgggcgctgtgataccccggccagaaattctgaaggagagaaggaaaccgaggcccacgtcacctggcccgaaggacacaccaatcgagctggcgcaggagaagacctacgatgaaaaggctgggatcggtatgcccgatctatagctgcggagagttcactgtaatgtgaccaggacctgacgccctgtgctgtgctgtgctgtgcttcccgcgtaataacggtgtactagttaccttctttgcagaaaatgctttctaggaatgagagcggaaatatttctaccatttatttaaggtcctgtttggaaacg

SEQ ID NO: 28662 - DNA, 1245 bp, Zea mays
  Clone ID: LIB4762-009-A10_FLI
ccgggagtttcaaatctcaaatcctcatcgttctcctttccccaaaggccaaaaccgaccccgctccacgcctccactcccagccccagcggatcttctcgagcggcggccggcgatggcagcgagcaacatcgggatgatggacggagcctacttcgtcgggcgcaacgagatcctcgcgtggatcaacactacgctgcagctcggcctctccaaggtggaggaggcggcgtcaggcgcggttgcgtgccaactgatggacgcggcgcatcccggcgccgtgccgatgcacaaggtcaacttcgacgccaagacggagtacgacatgatccagaactacaaggtcctgcaggatgtgttcaacaagctcaagatcactaagcatatagaggtgaacaagctaatcaaaggaagaccccttgacaatctggagttcatgcagtggatgaaacgatattgtgattctgtcaatggtggcttcatgagcagctacaatgcttctgagagaagggaaagcagcaaagggggaaaggagacgaacagaagggcatcggtgccctctcacacaccggccaagtctgcatccacaggtcacaaggctcaagcatcacatggcgctaagcgggcaagcgggcagacggcgggtgcaccacagcgcagtgctaagccatcacctgtagccaactctagtggaccagcttatgacgaacaaataactgagctgaagctccttgtggatagcctggagagggagagagatttctacttttccaagctgcgggacattgagatcttgtgccaaaaccctgaggttgagcacgtgccggtccatgctatccagaacatactctacacatcagaggaggaccctcagcagcaggctccagccctgagccccatcatggaggcgtccgaggagaggccgaagcaagaggcggcgcacaagagaaagagcatctcggacctggacgagtttggtatgtcgtccagctcaaggcagaggctctccgacatctcggacgtgcagctgtgtggatccccgctgacgagtttcagctaaagaaactgtcatctctacaaaatgggtgtctcgtctttctgttggattggttcgtggtttcgtatttcatgtgttgtttggtggtgaactgtcgtgtgctcttagcaagttgtctgccacagaatttgtggccataaatgctacaagttcctcctgctatgttatctgccacccattccaagctg

SEQ ID NO: 28663 - DNA, 1103 bp, Zea mays
  Clone ID: LIB4762-011-A10_FLI
gggaacaaaaaccagaccacgcggaacggcaacagcaagctgcctctctcccttgcgcgcgcgtgatttcatcttcgtccgatcccatcccaccccaccccacctcaccggagcccctctccccctaactcctccggcagctgctccgatcccgaaccgtgattcgctcgatggcggcaaccgcgggcggcaacaagatccgcaacgccaagctggttcttcttggggacgtgggcgccggcaagtccagcctggtcctccggtttgtgaaaggccagttcgtcgagttccaggaatccaccatcggcgcggctttcttctcgcagaccctggcggtgaacgacgagacggtcaagttcgagatatgggacacggcggggcaggagcggtaccacagcttggctcccatgtattaccggggcgctgcggctgccatagttgtctacgacatcacgaacgcggcctcttttacgcgtgcgaagaaatgggttcaagaacttcaagcacaaggaaactcgaatacaatagtggctcttgccgggaacaaggctgatttgttagatacgaggcaggtgtcagcagatgaagcaaaggcgtatgctcaagagaatggtctcttcttcatggaaacttctgccaaaacagctaccaatgtgaacgacgtgttctatgagattgcgaagaaactgcttcaagggcagcaggttcagaacccacaaggcgggatggttctcaaccagagaccacctgagaggatggtgagctcttcttcctgctgtgcgtgaagcgcaagatggaagtgtggatcacatgttccatggcctggactccaggagtattaggtgcgcggaggcggggaagaatgttgccgaatcttgtgaagtggttgccatcccagttgctgaaatcctgtacttttcactgcttgttcgttgccgtgttccttgtaaatgtgaatacttattactttggagactcacgtcacgtgttcttacggtgcatgatcgtgcttgtctttctatgacttgagagaacagagtgaaacaagacagattcgtttgattcacttataccaattacacgatgataaaatttatgggttt

SEQ ID NO: 28664 - DNA, 662 bp, Zea mays
  Clone ID: LIB4762-011-B8_FLI
taccctcgaggccggccgggaaaaaaaaaaccgcaatcttcaatctccccagcaatccctagcagaagccttccatcctcactcgctcgatggcccgcacgaagcagacggcgaggaagtccaccggcggcaaggcgccgaggaagcagctggcgactaaggcggcccgcaagtctgcccctgcgaccggcggagtgaagaagccccaccgcttccgccccggcaccgtcgcgctccgggagatccgcaagtaccagaagagcacggagctgctgatccgcaagctgccgttccagcgcctggtgcgggagatcgcgcaggacttcaagaccgacctacgcttccagagctctgctgtctccgcgctgcaggaggcggctgaggcctaccttgtcgggctcttcgaggacaccaacctctgcgccatccacgccaagcgcgtcaccatcatgcccaaggacatccagcttgcccgccgcatccgcggggagagggcctaagcgtcatattttctgtcatcagtgcccgatcagaagatgtagagatatgctgggttctgtagtttgggttactgtcgaatcatcgagtgttggctgttcactgctgtaacttaattatcatgatgcatatgaaatggcaatgaactctgttatcagttctcg

SEQ ID NO: 28665 - DNA, 759 bp, Zea mays
  Clone ID: LIB4762-012-H11_FLI
ccgggaaccaaacggcccaccaaacccgcggattaaagaaggctgcgaaggcactagccaggtcagccacgctccccgtaacgaacgacgcagcccaacccgttcccaccaaaccagcggcaccacccatggcttcggcggcggcgagatccggtctccggtcgctggcggtgcgcgccgccccgttgaggcgccgcatgtcctcctccgtccacgacgacgcctatgagacggccaagtgggagaagatcacctacgccgggatcgtgacctgcaccctcctggcggcgtacaacctgtccaagggccacccccacttcgatgagccgccggcgtacccatatctgcacatccgcaacaaggagttcccatggggccctgatggcttgtttgagacgaaggaccaccactgagccctgattagcacaccttcaggagctggtgcatgcttaaaagagttatatggttgtttcagtgattttgcttttcccttgagacctatttgctgcaacaagaaataagaatgaccaaactcttgtattgacagtgaagttttaactgtgttagctgttaccggcttgtctatttttctttgccgtccacgccatatatggtcacctgtaagttggtcttgcccggtgtcaggaaacggcatcacaattatcaaaagctgttattgtattctgatggcttaagattgcaccctgtgctcgtgataatttgcctatcaactatcattgtatcaaggcagaaaaaaac

SEQ ID NO: 28666 - DNA, 2179 bp, Zea mays
  Clone ID: LIB4762-013-B6_FLI
ccgggacacgtgactggtggactagacaggaaaatcccaagttacgacgacttccccgagacgacggcgaaacaaggggtaaaaaaaggaaaggggatcgccatggcagcgtcgccgcagcagcaaggccagggcggccctggcagcggcgggtggactcccgagcagttctggtcgctgctggacaaggcggaccgccggttcgcccgggtgcgagatctgccctctttcggccgccaggagcccgacgagttcgccaaggccttccgcgcctacacccagctctggcggatgcagcaggagcaccgtcaccgccttctcgacgcgggcctccgccgctggcaggtcggcgagatcgccgcccgcatcgcccacctctactacgcccagtaccagcgcaccgccgacaccgcgcttctctccgaggcgttcgtcttctaccacgccgtcctcgaccgcgcctacttccaggacgccgaccaccacctcacccccgccaagcacctccgcttcctcgccaggttcctcctcgtcgcactcctgctcggcaggcgttcgcacaccgtcccgcgtctcgcctcggacatacgcacgctcttagatgactccaaaaagtccttccaggatgccgaatacaaggagtggaggcatgtcgtgcaagagatcgcgaggttcctgcgagctgactcaccatttatgaacatgaggccgctcaggtacagctatgcattcgatccgcccccggacacgcttcgtactatgccaactactatcaagaagcgaggtctcgtcttaagtgacaccatactttgcagctactatcctaacgaggtcaaatttacagacctctccatagatgtattcagaatggttcagtgcctcgaatgggaaccatgtggttcatttgcgctaaacgatggttacagcgcccatgatgaaagtggacaaaatcaacccaatctattgaaagatttaagagatgctgcactgcccccgaatccacttaagacaattctctatcgcccttcggtaacacatttcctaacggtcctttccacaaaatgcgaggagcttccttcaaatggtatcatgttaatatatctttcagctacaggggagatgggaacttctggattttgtcctgatactggtgaaaatgttttgagcaactttaataagtttgacatatccagtcttagtcatactagttcaaaggaaaacaaagaaccttgtctatggttaggctgccgtgaaactgaaggttcaaattgcatataccctggtgatctaatcccatttacaagaagacctctatttttggtgattgacagtagcaccagctatgcattcaagtctattcatggtactgaaaggggggagacttctgccatgctactttcaccaagttcccgatcttccgctgcgggattcagtggcgattctactcggcacagtggtagccaatttactatgttcctcacatctccattgcaagctttctgccttctgcttggcaacaatgggacagatattgacagggatgcatataacaaagctgaggagttattattattgtccctaaatgaatgggctgcgactttagttgcatcatcttcacttcattctatttgggttgaagttttaggcgacccgctcctaagaaggttacttctcaggttcatcttctgccgagcaactcattccctgttcaaaccaacaaaccataagacagagttccttccgacctgcatgcctcctttgcctgagtctgttgatgcagagagcatgctctcccaaagctgtgtgctgcgagtcgcatcattctttggcgctgccagtcagttctcatttgctgaggttaccacatggcctgatgttgactctgaggaggctgttgtcaccagttcatctggcagtgccaacaaaggtgtgcctgagacagccagagattcagacatttcaaactcatcatcatctttttgatgcgaccatggcgctaccttcgtccgcttgtgttatttacttatctgcatatgcggatccatttgtaattactggtgctcctttatgcttgatttacacatcatgcagaactgccttgcctttttgtttcctggttacttactgaattaatagtcactagaacatttttttatcccttaaaaaaggaaaaaaattt

SEQ ID NO: 28667 - DNA, 1217 bp, Zea mays
  Clone ID: LIB4762-014-C3_FLI
ggccggccgggacacacaaaaaccccaatgcgagcgcccctggcttgtcggcgtcgcctccttcagccaaaaccctagcttgcatacgcgcccgaacaaagcttcgtctgcgaggggcgtcctcctgccgccagaagctttcaggagcatcagcgatggtgtggttccaatgcgaggactgtggcgagaacctcaagaagcccaaacttgccggccacttccgctcctgctccgcgtacaagctgtcatgcatcgattgcggcgagttattcagccacgacaccgtgcaggggcacacccagtgcatctccgaggccgagaagtacggtcctaagggacagaccaaaccatccaatggtgcacagggtaaggcagataagccaaagccaaatgcagatgtcgatatcaatgttgggctgtcgacacggcctccttggttctgtagcctatgcaagaccactaccacaagtaagcaaactctcttactacatgctgatgggaagaggcatagggcaaaggcgaaagccttccatgtgtctcagaaacaaaaagatggtgcagaacaaactccagatgtgaaggaagctggagttgtacccacaaaagaatctgctcaagtaaatggtggcgtgagtggtgatcatgaaagaaatgaagataaagatgctgggaaaaggaaacgaatggatgacatgaccatagagccaggtaacacaaaaagacagttgacacagtctggagatgagaagtcagaaaacaaagcgaagagtaaggccgatgaactagcaagtggtaccgactgcaaaagtgttcaaaagcaaaagatcaaatggaagaagattattactaaaacattgaaggcgaacgcagatggagttatgaagctaaagaagctacaaaagctagtctccaaggagcttcaggaatgtggtgtctccaaagacaaggaggagctccgtgctaccttgatggataaaatagcttcaagttccagattttatgttgatggcaagaatgttagactggtggccaagaatgaagaagaatcttagaaagaggttgtcagtcatttttttggcattgttgctggtttcattctttggtgtcaactttcagatggcttatagccaagtgttggttaaattgagtccatgaaccatcaattatatccatgacgtgtagacggtatgggaatttagcatctgaattttctcgac

SEQ ID NO: 28668 - DNA, 1070 bp, Zea mays
  Clone ID: LIB4762-015-D2_FLI
ccggggagacaactccctcgggaggcagcgaggacctccttgacggcgcccctcgacggcgtaccggcggttccacctccatttggcggcgcgcggggggcagcacctcctttgggcggcgtgcgcgaacaagagccgcagccgctcccgcttgtctttgggagggaacgctggcaacctcatcttctttcgacgctagatttggacagtaaagtcccgcagtgacttgccagttgccactgccagagcggtcaccgaatctgaggtctcagcccagcgggccgcggcggctatgtcctcatcctcctccttccccaactcccgcttccccttcgcagccggcgccggggcctccggcggaagcgggagcagcgtgcggccgtggggttcgagcggcgggacatcggtgtcttcatctgggaaacggatacagaaggagctgctggacctcaacgcctccgactgctccgcggggcccaagggcgacaacctctaccactggctctccaccatcatcgggccccaaggatcgccgtatgaaggagggatatttttccttgacatagtgtttcctcctgattatcccttcaaacctcccatggtaacattcaaaacgaggatttaccactgcaatattgattccactggtaaagtgcatttggacattctgaaggatggctggagtccagctttcactatttctaaggtgttattggccatcaaagacatcatcagcaatccagatccatactccccgcttatgatgagcatttcacgtcagtatctgactgatagagctaaacacgatgaaatagcagctgagtggacaatgagatttgcaagataggggatctgtttgtatctaagcatggttgacactgtaaaaaacaactcttaatgtggcctgagatggtgaatgttggcaaaggagccatgtttcgtttgatgtgatgtgacataaatgtgtactttatgcttgagtattatttaactgctccttttaggtgaagaataatcttttagattttgtacttatgccaagttgtacaagcatctatttagaacctgat

SEQ ID NO: 28669 - DNA, 1448 bp, Zea mays
  Clone ID: LIB4762-015-G6_FLI
tctctgtgtcatcaccctcattccgacagttccgctagaaggaaaagaagaaaaaaaaaactctctttctctctctttcccagccctctctctccctctccacccggccgccaccatgtcaggcctctacagccagggcttctcccctgcaagaaccctctccccccagattaggagcaaccccgacgctgacagccagtacttggccgagcttctcgcggagcatcagaagctggggcccttcatgcaggtgctgccgatatgcagccggctgctcaatcaagaaatcatgcgggtatcaagcatggttcatgaccatggatttagtgatcttgacaggcgccggtttagaagtcctagccctatgtcctcaccaattgtccggcctaatctacatggcaatggatttggtccttggaatgggatgcaccaagagagattgggctttcctcctcctggaacaagtatggactggcaaggagcaccaccaagccctggctcttatattgtcaagaagatcgttcgcttggaagttcccgtcgactcttaccctaatttcaactttgtggggcgcattctagggccaaggggtaattctctaaagcgagttgaagcatcaactggctgccgtgtttttattagagggaagggttccatcaaagacacagaaaaggaggagaagcttaaaggaaaacctggctatgaacatctgaatgagccactgcatatattgatcgaggctgaattaccagcgaatatcgttgacacaagactgagacaggcacaagaagtcatggaagaattgctaaagccagtggacgagtcacaagatttctacaagaggcaacagctgagggaactggctatgctgaactcaaccctgagagaagacagtcctcatcctggaagcgtatcccccttcagtaacggcagcatgaagcgcgcgaagccaagccagtagagggaagcttctggctctcctccaacccttgagtcgtccacggcgcggcaccgacaaggtggtgcccttggaactcgcgctgtccgtgtctgtctcgtgggtgcttgtgtaatagaaggtatgcatctgctgctagacaggatagtctgggtaccaggtgcgtcgtcgtctcaaggagacgaggagggatcggtggccgatgaactgcctttgatcttggtgggtggatccggccgtgctgttgttgtaactgcttgtaagggtgatggacattattcgttttattcgttgttggctgttaaccctgagtagattatggtgctgaggagatagtggtttcagtgggagactagttaaaccctgatagtagtgtgagctgttcgtttaggtgtttaattagcttgtactattctcgaatatttgtcgtccgctagttcattttttgaactaagccgcgacaaataaaaaagaactcatggatagtatt

SEQ ID NO: 28670 - DNA, 624 bp, Zea mays
  Clone ID: LIB4762-016-B9_FLI
tcttgctccgatcacgagctagctgaggtcgacgatggcggctgtgctgaacagcaggaagacgccgcaggtggtggccgtgctggtggtggtggcgctgctggcttcgtccgcgtcggcggcgatcacctgcgggcaggtggggtcgtcgctggcgccgtgcatcccttacgcgacggggagggccagcgcgctcccctcgtcgtgctgcagcggcgtcaagagcctcaacagcgcggcgcggaccagcgcggaccgccaggcggcgtgccgctgcctcaagagcctcgccaacagcgtcaagagcgtcaacatgggcaccgtcgccaccatccccggcaagtgcggcgtctccgtcggattccccatcagcatgtccaccgactgcaacaagatcagctaagttacgacgaccaagctaataagcctaccgaacgtacacgtacgtcccgcgcgctgcacgagtgatgaagccagggaagaaataaaataaagctagctgtattgccaggagcagcatgcagtatcgatctatatatatactgtactgtagtactctattatatatgtatgtgtggcctgcagtgcgagttgcttcgatccacctacttgttcagacagttt

SEQ ID NO: 28671 - DNA, 643 bp, Zea mays
  Clone ID: LIB4762-016-E5_FLI
ctcgaggccggccgggacttctgtctgactgtctccacggctgccgacgagccgtgcaaccgaactcattgcacgaggactcgcacagatcggtgagcgagcaagcgagagatggctgggaggctaaccgcggcagggtcccgcatcctgggcggcggcggcgcacgcgccgcggcttccgccctccgacaccgcgccggcatgggcctccccgtcggccgccacatcgtccccgacaagcccctccccgtgaacgacgagttggtatgggataacggcacgcccttcccggaaccctgcatcgaccgccttgccccgcacatcggcaagtacgaggcgttggcgtggctgtgcggagggctagggttcttcgctgccctcggtatggctgctgttgtgaacgacaaggcctccaatataccatatactcccaaagtctacccgtacgacaactttgacaaggcactttgatgaatatgatctgagatctatatctcctttccatcagagagaagcagggggaaacttatttaccatggttttttttgtgactgccttgttgtaaaccaccgttatgtgatttgctgaaattgtgaagcatgggtttgccctacaataatgcaaccagctctgaacttattct

SEQ ID NO: 28672 - DNA, 640 bp, Zea mays
  Clone ID: LIB4762-016-H2_FLI
ctcgaggccggccgggtcttgctccgatcacgagctagctgaggtcgacgatggcggctgtgctgaacagcaggaagacgccgcaggtggtggccgtgctggtggtggtggcgctgctggcttcgtccgcgtcggcggcgatcacctgcgggcaggtggggtcgtcgctggcgccgtgcatcccttacgcgacggggagggccagcgcgctcccctcgtcgtgctgcagcggcgtcaagagcctcaacagcgcggcgcggaccagcgcggaccgccaggcggcgtgccgctgcctcaagagcctcgccaacagcgtcaagagcgtcaacatgggcaccgtcgccaccatccccggcaagtgcggcgtctccgtcggattccccatcagcatgtccaccgactgcaacaagatcagctaagttacgacgaccaagctaataagcctaccgaacgtacacgtacgtcccgcgcgctgcacgagtgatgaagccagggaagaaataaaataaagctagctgtattgccaggagcagcatgcagtatcgatctatatatatactgtactgtagtactctattatatatgtatgtgtggcctgcagtgcgagttgcttcgatccacctacttgttcagacagttt

SEQ ID NO: 28673 - DNA, 752 bp, Zea mays
  Clone ID: LIB4762-019-E11_FLI
ctcgaggccggccgggggctcagtcagtcctcacaccacgcatctgattctgatcgcaccgccgtcggcccaccgcttcagttggcagttgcgagtggctccaacaatccaccggcaccaacccagcgcggcgccaccggcgacccgtaccccctcccccggagagcgatggcgacggagctgacggcggcgcagctgcgcgcgtacgacggcaccgacccgtccaagcccatctacgtctccgtccggggcgaggtctacgacgtcacctccggccgcggcttctacggccccggcggcgcctacgccgtcttcgcgggccgcgaggccagccgcgccctcggcaagatgtccaaggacgaggccgacgtctccggggacctctccgggctcaccgacaaggagctcggcgtcctcgccgactgggagatcaagttccaggccaagtaccccgtcgtcgcccgactcgccgccgacgcctgaactcgtcagtctcggtctaaatttactctgtcctgcctcttgcggtgttcagtgctgtgcttgcttgcttgttgctagttgctttgctacccaataatctgaatggaaggacgtatgtgatgtgcctgctgaatagttcctagtccttgcatacactgctgtgctaccacatgacatgatgtactcgtgtgtgtgctttggttgttgtgtaattccatgaccatgatcagtaatctgaataaaaaatattggagacgtgcttgcttcct

SEQ ID NO: 28674 - DNA, 655 bp, Zea mays
  Clone ID: LIB4762-020-E8_FLI
ccgggacctctccaagcagacagacgggaagggagggcaaccgagagcgatcggcgatgggctccttcctctcgagcttagtcacgccccctccggccgccgacgaccccaactgcgccgtggtggccgcccactccaaggccacctacgacgagcagtgggcggcccacaagagcagcagcaagctgatggtgatcgacttctcggcctcctggtgcgggccctgccgcttcatcgagccggccttcaaggagctggcctcccgcttctccgacgccatcttcgtcaaggtcgacgtcgacgagctcgcggaggtcgcaaggacatggaaggtagaggcgatgccaacgttcgtacttgtaaaggatgggaaggaggtaagccgtgtggttggggccaagaaggacgagcttgagaggaagatccggatgttcacgtcatcttcctcatcgtaaactcctgtggttcgcctgggacggagttgctgaagtgaaatggttcccttctctgaatgctgaaaaaaagaaaaaaaaaactatgtgaaaatgatggtagacgtgtctgggtcagtaataagagtttctaaaatctgaatgagatttgaatcgctccccgttgatgaatttctcatggtctgtgtattccaccatgattg

SEQ ID NO: 28675 - DNA, 824 bp, Zea mays
  Clone ID: LIB4762-021-B2_FLI
ctcgaggccggccggggtttccccttcttccccatcgcgtgccctcgccgcagccatcttccatggcggaccagctcacggacgagcagatcgcggagttcaaggaggccttcagcctcttcgataaggatggcgacggctgcatcactaccaaggagcttggaactgtgatgcgctcccttggccagaaccccactgaagcagagctgcaggacatgatcaacgaggttgatgctgatggcaatgggaccattgacttcccagagttcctgaacctgatggcaaggaagatgaaggacaccgactccgaggaggagcttaaggaggcctttcgcgtcttcgacaaggaccagaatggtttcatctcggctgctgagctccgccatgtcatgaccaacctcggcgagaagctgactgacgaggaggtcgacgagatgatccgtgaggccgatgttgacggcgacggccagatcaactacgaggagttcgtcaaggtcatgatggccaagtgaggagcgatccccgttatctatgaatgaattgaagtgaaatatcaggcacacaagctgtactttgccatgtcccttttgagtacacatcagtatcatgcaggaggtaatgtctagtagtggtcggtttaggtggtgtagtcatgggaactcgacatcagatacctggtctcttttgattgtgatgttatcttgcattattgctcctgctggagcttttaggatttgttgtaagctcatattttcagggggttttggatcttttgtgcgagtcttgtatctcgtgtacgttgcattgcattgttgtgttatgcg

SEQ ID NO: 28676 - DNA, 636 bp, Zea mays
  Clone ID: LIB4762-021-D11_FLI
taccctcgaggccggccggggtccaatcgcatcgcctgcacgagccttatcagtccacgaccatcatcatcaccactcactgcagcggcccgcactcggccgcgactgcgagcgagccgtcgccgcgagatccagcgccgtcgtcgcgcctccgccactgccgccgccgccgccgctgcccaagatgccgagcccgacgatccggaggctagacgtggcatcgccggtgccggcggacatcgacatcgccaactccgtcgagccgctcccaatcgccgacatcgcagcagagctcgggctccggcccgagcactacgacctctacggcaagtacaaggccaaggtcttgctgtcggttcttgatgagctcaaggcgcaacaggacgggtactacgtcgtggtgggcggcatcacgccaacgcccctcggggaggggaagtcaaccaccaccgtcgggctgtgtcaggctctcggcgctttccttgataaaaaggttgtcacttgcctccgtcaaccatcacaagggcctacctttggaatcaagggaggtgcagctggaggtgggtacagccaagttatacccatggatgagttcaatcttcatctgacaggcgatatccatgcaattacggccac

SEQ ID NO: 28677 - DNA, 1575 bp, Zea mays
  Clone ID: LIB4762-021-E6_FLI
ccgggttccgtttccctcctctctccgaagtcccaaccgaacctaaaccaaaagcaggcgagagtctagaccgcagcggaaggggagcaggcggcggccccgattgcggtaatggagctgtcgatgagtggcagctccctgcgaacgttcggccggtgcgtgaccttcctcgcgcgcgttgcctccgagctcgtgctccaggcgcaccccgccaagctggagatgcacacgcttaacagctcgcggtcggcgtacgcttcgatctccctagcgcgcgacttcttcgaccagtatcacctcgacgccgcggcttcggcaccgtcttccacgccgctgcagtgcagcgtcctcctcaagtccctgctcgccgtcctccgcacgccgcacgccgcgctcgaccgactcgccgtatccctcccagaacccgacgcacccaagctccagatcaccctccactgcctcaatggtgtgaggaagacgtactggatcgtgtgcagcgcagagcccgaggtgcagtcgctgtcgctagaccggggacggttcccgagccgcctagccattcggccgcgggagctggcgcggctgtcgtccaacttccagtcctcgctgcaggagctcacaatcatcgctacagatcctgcttcagggttacctgatgctagcggtgacgtcgggggcaaggctgttgagctccggagctacaatgacccgacaaaagatgactgtgacactagactgcacacacaactgtggatcgaccctgccgaggagttcgtggagtttgttcatgctggtgatccggtggatgtcacctttggggtaaaagaactgaaggcttttttaacattttgtgaaggatgtgaggttgacatcctcctattctttgagaagactggcgaacctgttcttttggtcccgagattcggattggatgatggagcagcttctgattttgaagctactctagttctggctactatgactgtatcacaattatctgacagcgatgatgcccaacaaccagctacatcagcacaaaacgcgggagaaccaggggctgctgcaccaacactagttcctgaaaatgtctcgaaccatactaaaatatggtcggagctttcaggtagtactcccaaaagcattgaagctaacagagaaaatcatgcccagaagaagagaaacgcaagcactaatatgctgaacgacatgtcaatgctgcccaatgttacaaatgctccaagcaagccaccagttgcagataatgcaaacaatataatgcagcctttgcaaatggatcacatggaagaacgtcctgaaggtatcagtggtattcctcgatcacaacaccacccgagcaactgggccggtgctgatgataacgacgatgacaatgaagacgacgaggagcttttagtccagacaacaccctactatatggactgaggataaatgctgattctaaaatatgtaggtgcatttcagcgtagtgtactatacgaacgaattaggaactagctgaaggctttacgtgtactcttgtagtcttatttctagtagggctggagttggtgactt

SEQ ID NO: 28678 - DNA, 895 bp, Zea mays
  Clone ID: LIB4762-021-F8_FLI
ccgggcatcaacctcgtctcgcttcgtcgatatatctttgtgtctcctgtgttaacccagagcccgaactcttcacgtcgcgtcggccgtcaattggcattcccactgcgccgccgtcggatcgactgggtccccgccgccgatgggcttcttccgccggatcgccggcttcctaggcatctcgcgggacgacgccgaccacccggactccccgacctccgtcggcggcgccgcggcggcggcggaactccctcatgacagggcagcggcgcacggggtgaggcaggggttcagcgtcaaggttcctgtccatgtcgagcggcaggtgcccgtgcccgtgctggtgccctgcccgcagggggacggcggcgtgcagggttttaggtggtacacaaggaggcttaggatcgatgaagacggcgacgtagctgacgagttcttggatgaaattatcccggaaggctcaatcagcaacgacaaaagcgcaaggttccaagtgaaatataacaataaacctgctgctgtagctctgaggaagcaggtcatggctgtcgacggtgacatccgccatagcttggaacaccaggggcaactgcggtgggtgtgactgagtcggagcagataagtgaatcctgagctctgctccatcagtgtgcgttgagcagagggcgggcgcacacaggagcggagcgaatgacccaggttcttcatctctgaagtggatctagaggtagttcgttgctgatgtatccattgttcttcgttcagtgtgttggtatgcttgatctcatggcgattgagacgccttgtaccactagcagttgtacattattgaaacagctcctgctgtacatgttgaatgtgcttgcttggcaatggatctgccagactggtg

SEQ ID NO: 28679 - DNA, 743 bp, Zea mays
  Clone ID: LIB4762-021-G10_FLI
ccgggagttcgctcccctacacgccgcgtgcgcgcgccgtgctctctctcgctcgtggggacagctgcgcgaccgccgccgccctacgccaggcgcccaggtcttcgccagtaccttcgccggcgacgaactagcacccacaggaaaatggcaagcagagcaggtggcgacggcaaggaagccataaacgagcaggtaatcgccaacacctacgccaacatgcgcaccgagatgaaccagctctacacgaagatcacggagctggagatggaggtcagcgagcactcccttgtgatgggcgcgatcgagccgctggacccctcgaggcgatgctacaggatgatcggcggcgtcctggtggagaggaccatcagggaggtcatgcctgccgtgaagcgcaacaaggagggcccggaagaggtgattgctcgcatgcacgaggcgctggagaggaagaagaaggagataaccgagtttgagctcaagtacaagatcaggatccggaaggctgatagcgacgctgaggatgaaggcggcaagaaggaaggcactgcgcagggagtccttgttggtcctgccggacagtaatctaagttgattagagagacctgcgtgctacaagctatttatgcttggaccacagtaagggggttgttgctcctctctgccaatgtgtgtgttttggggggtgacatgcttctgtagaaccagcgattttgtgtttaaactggaatggttttggg

SEQ ID NO: 28680 - DNA, 734 bp, Zea mays
  Clone ID: LIB4762-022-E12_FLI
actcctgcgaaaaaaaaactgtgcggaaacgaaataaaagcaggagagagcatcttgtgtcgtctgcgcaagagagaaagaacactcggggttaggagatctgactcaatggccgcgaccaaggtgtgcaacgttaggttcgagggcaacgtgatcaccaccaccgtgacggcctccggcgcggccgtggagagctggctcgacgagatcctctccgtccaccgccgccgcctgcacaagctcgtcgtcgggctggacgtcgagtggcgccccagcttcagccgcgcctacagcaaaacagccatcctccagctgtgcgtcgggcgccgctgcctcatcttccagcttctccacgccgactatgtccccaacacgctggatgagttcctcagcgaccccgactacacattcgtcggcgtgggcgtggctgcggacgtcgagcggctcgagaacgactacgacctggaggtggcgaacgcggaggacctggccgaactcgcggcgaaggagatggggcacccggacctccgcaacgcgggcctgcagggcatcgcgagagtcgtcatggacgcccacgtcgagaagccgcagtgggtgaggacgggcccctgggacgcgtcatccctctccgacgagcagatcgagtacgccaccatcgacgcttttgtctctttcgaggttggccggatgctgctcagcggctactattgatcgatcgagccgttaatgcaggc

SEQ ID NO: 28681 - DNA, 659 bp, Zea mays
  Clone ID: LIB4762-023-A1_FLI
ccgggagcggcgtgatgcagttcctccgaggcagcggcggcgggggcggtgggttcccggtggtggcgtgggaggtgttgcggcggcacttctctaagaagcggtccgtggacgtgaggcggatcaaccccaaggtgcccaaggaggaggccgtcgccatttccggccgactcctccagatcctctccgaccatgggcccctcaccgtcgccaacacctggaaccacgccaaggatgctggcatcgctggcctgaacagcaagacgcacatgaagatcctgctgaaatggatgacagggagaaatgtcgtgaagctgacctgcgtgcacgtgggcaacgcgaagaagttcctctactccccgtccactgaaagcagcagcagcagcgccggcgcatcaccgtcatccacatcggcctcgcagtgacggtcagtcgctgttaagccttggtgtggttcttgatgttgctttgtggatcgatggaggttgcctctggtcattcggatcccatgtttaaccttgatgacgaacattggaaaaagcattttgttttatggactggaatagtctgcaaacatcacgatagcaatattgttctgctgctcctcagctgaggatgctgccctgtcctgaactcctgattttgcttttgatctacat

SEQ ID NO: 28682 - DNA, 1204 bp, Zea mays
  Clone ID: LIB4762-023-B12_FLI
ccgggggaacgaataagtggattgaggaataaaagctcgaagacaaagagaacagatccttcattccgttcggatttcgcttttcccccgtggggtctcgactgccggagggggaggaggacatggatttggcgtcggtcaacgaggagctggccgagatcgacgggcagatcggcgatatcctccgcgtattgcaaaatgggttccagaagctggagaagatcaaggatgccaaccgccgcagcaggcagcttgaagagcttactgataagatgcgagactgcaagagactcatcaaagacttcgagcgagttagcaaagctgaggctgagcatactgatccagcaacagcaaaaatgttgcatgacagaaagcagtcgatgatcaaagaattaaactcctacgttgctctaaagaaacagcaggcaagtgaaaacaagagaatcgatctttttgatgggccaagtgctgaagatggctttggtgaagaaaatgtcctgttagcatcaaatatgacaaaccagcagttaatggatcaaggcaatcaactaatggatgaaactgatcaagctattgcacgatctaagcagactgtccaagaaaccgtcaatgtgggcacagaaactgcagctgctctgaaagcacagacagaacaaatgagcagagttgttaatgagttggattccatccatttctccataaaaaggcatctcaattggtgaaagaaatcggtcgacaggttgcaactgatcgatgcatcatggccatgctttttctcattgttgctggagtcatagctataataattgttaagattgtgaacccacacaacaaggacattcgcgacatccctggcttggcaccacccgtcagcaggcggctgttgcgatagaggacaggtgaattgcatacctggtgtaaaaattgatgtggcgcggcgccttggcaagcccatctgtattctacgtcttgtaaaacgctgctccagtcatgtggtatattgctgtaaaacttctcatgggatccactcctactccttggctacacacagtgcgtatatgttcctcctagttcgccttcctgtttttgcaaaactaactctgaacggtgttctgttagaatcatgtgcacacatgatggttgagatgtgtctatgatgttcattgtgacgaacgattcttaaaaatctcatcggctttagtag

SEQ ID NO: 28683 - DNA, 752 bp, Zea mays
  Clone ID: LIB4762-027-D2_FLI
ctcgaggccggccgggaaaccaaaccaaaatcggagcggcggagcaaaacgatccgtagcctcgcttgccttcgattcagctcgaccagggcactaaccgggaagccaatgccgcgcgagtcgcgagatctgtagcgacactcggcttcaccggcggcggggcgggcatggaagcgcagaacggctcctgcggaggggcgcccttggtgctcaacgtgtacgacctgacgcccatgaacaactacctctactggttcggcctcggtattttccactctggaatcgaagttcatggtatggagtacggatttggagcacaccagtttccggcaagtggagtattcgaggtggaaccgaaaagctgtcctggtttcatctacagaagatctgtgtggatgggcacaactgacttgtctagagcagagttccgctcgttcattgaaaatcttgcaggaaagtacaacggcaacacgtatcatttgatttcgaagaactgcaaccattttacagatgatgtctgtaagagcatgaccaagaaatcaatccctgggtgggtgaataggctagcaagagtgggttggtatcaccagtttaacctgtctttgtcctgtcatgcttcagagtttaggtatctgatttctttccccccaatgtttaggttcattttttaattgtcttctaccagaaagcatccaagtttccacagtaagacacgttcctactcaatctgcattttctggtgagtttgtgcc

SEQ ID NO: 28684 - DNA, 1093 bp, Zea mays
  Clone ID: LIB4762-027-E7_FLI
aggccattcagcgtgccgctgctcgacacctctccgcctccgcgcgacgggcgacagcgccagtcgtgaatcagcgccggcgagcccccatcctggccggcagactccctaggcggctgggccagctctccgcctccgcatccccagtctccgcgctgactgccccgccccatctccagccacgccggcgccgcatccccattcccctcaccgccgtctccggtcacgccggcgcgtccccagcccccgcgtcgtccgcttaccaggcagggagcctggtcgctacaccaacatgaggctcaacaaggtggaagtgaaccttataaggctgctggaggctgctccccggcagcaaaatcaggctaaactactctattatgtaaccacagcccgggagcttttggagcagctaggagctgagactacaccagaagggatatcaagcatttcaaaagctaagctttctgagtattcagaaaagattgaagcactagcttccaggcttgctgcttcactgcctgaaaatgaaaagccaattactgaaagcagagatgaaatctcttacgacgaagcaaaggcagaaagtccaatatctttatcatcaggactacgaaggagatcaacagcccatgctgaggttggaccaagtcatcatgagagaaaagaagatattggagcacctataaaattggatggagaagctcaggctcacattgagaagcataggaagcttcaagaagatttgactgatgaaatggtcgagttagcacggcaactgaaggaaagcagcctaatgatgaaccaatccgtgcaggagacagagaagatccttgattctaccgagagggctgtcgagcacagcttggcaagcgcgggccacgcaacctcgcgagccgcggaggtctactcactggcttccaagactacgtgcttccagtggctgctaatgtttgtgatggcctgcatgtttgtaatggtggttctgctcataaggatcacttgatgaaggatgagggctgtagagggcactcaaatcttttgtcacccttgactttgtttcatagggaattctttgtgttgatggtattttctc

SEQ ID NO: 28685 - DNA, 675 bp, Zea mays
  Clone ID: LIB4762-028-E10_FLI
ctcgaggccggccggggtttggatggatggatgaagaaggacaccgcaatcttcaatctccccagcaatccctagcagaagccttccatcctcactcgctcgatggcccgcacgaagcagacggcgaggaagtccaccggcggcaaggcgccgaggaagcagttggcgactaaggcggcccgcaagtctgcccctgcgaccggcggagttaagaagccccaccgcttccgccccggtaccgtcgcgctccgggagatccgcaagtaccagaagagcacagagctgctgatccgcaagctgccgttccagcgcctggtgcgggagatcgcgcaggacttcaagaccgacctacgcttccagagctccgctgtctccgcgctgcaggaggcggctgaggcctaccttgtcggtctcttcgaggacaccaacctctgcgccatccacgccaagcgcgtcaccatcatgcccaaggacatccagcttgcccgccgcatccgtggggagagggcctaagcatcgtatattctgtcatcagtgcccgatcagaagatgtagagatgtgctgggttctgtagtttgggttactgtcgaatcatcgagtagttggttgttcactgctgtaacttattatcatgatgcatatgaaatggcaatgaactatgttatcagttctcg

SEQ ID NO: 28686 - DNA, 1016 bp, Zea mays
  Clone ID: LIB4762-031-G10_FLI
tcacctttacacatatctccgtatttacaaattaggttgttgatgtaggctgtacgcacctgctggtttgctactcgatcctatatatcgtccaatcctatctgacctctcgacatctggtccttgattactcgtcctttttgcttggtgcctgtgtatatcgtcgccccggccgcttgagctagcttcctctagtgctcgctctcgtcgtcgatcggttgtttgcatagcccacggcgagccgaagcaatgtcgtcggcgcccctgcagatcgcgccggtgccggagcatgtgtgctacgtgcactgcaacttctgcaacacaattctcgcggtcagtgtcccgagtcacagcatgctgaacatcgtcacagtccgttgtgggcactgcactagcctgctgtcggtgaacttgagaggactcatccaatcacttcctgtccagaaccaccactactcccagcagcaggagaatttcaccgtccaaaatatgggttttactgaaaattaccctgagtacgcaccttcgtaccgcatgccaacgacgctgtcagcgaaaggtgatctggatcatatgctgcacgtgcgcgggtcaaatgactgtggattttttgtgatgagttacatgaagtcttatgatcacaatgcaggtgtcatatcttctttcaatcaaccagacaattcccgagacctacgtgctcatgcccttcatcaactcacattccatcgcatcaacaaggtgttgccacttccattagatatccagagatttatgtttgcgcgcaattagtgaaatatgtcagaactaagcaatggtgtgggcaatgtaccgtactgtggtattttggccattattgtcagttaacaattgtaggaagcttccttatatgtgctgtttctgaacaattgtcatgctactttgtcttaggggtgttacccaggttctttctgtgaactttagttggctggatacttatggttatgttgcgaatatgtgaacatcatatgttttcactc

SEQ ID NO: 28687 - DNA, 1306 bp, Zea mays
  Clone ID: LIB4762-032-A2_FLI
agggatcctcctcggccgcaaacaaaaccctcctcgtcatccgcgcccgctttcccccctgccggcccccggtctcgctctcgcccaagcaccaaatcttcctcccactcatcacaagacgaagtttcagtgcctgcgcgtgccgcgcgatctctcgtccttggcgtcgtcaagacgcgttagtttcagtgcgcgcacgagtgtgtgttgtgggagttagtgagagcgagagcgagagcgagcgcaccaagcgattcggcgggcggcggccgatggggagggcgccgtgctgcgacaggaccaagggcctcaagaaggggccctggacgccggaggaggacaagctcctcgtcgactacatccagaccaacggccatggcagctggcgcctgctccccaagctcgcagggctaaaccggtgcggcaagagctgccgactgcggtggacgaactacctccggccggacatcaagcgcgggcccttcacatccgaggagcagaagtccatcgtccagctccacgccatcgtcggcaacaagtggtccatgatcgcggcgcagctccctggccggacggacaacgagatcaagaactactggaacacgcacctcaagaagcagctgcgtcggatgggcctcgacgagcccccgcccggcccggccgccggctgcccctccgcgcgccacatggcgcagtgggaaacggccaggctcgaggcggaggcgcgcctctccctcctcgccaccgccgcctcctcctcctcctgcggcgccatcgcggccacctccgcctcatcctcctcctccaccgtggacttgaagaccgcatgcgccaggcccgcggacatcttcctgcgcctgtggagctcggacatcggggactccttccgccgcaagacggccgcggcgcccgtggtcaaggggaaggacgcggtgatcaagcaggagtcgcaggcgctgctgctgggtcccggggacgactcctcggccgcgtccaacgagacggaggtggcggaggcgctggaggagtaccagatgttcctcgacttcgccggcgaagagctggggctgtttcacggccggcacggcggcttctcgctgttcccgccgctcgacgtgctcgccgaggcgtccctggacacggcgttcaagtgaagacgtagcgagtaccacgtacgtacacatacctattgccatgggcaagcggcagtggacatgcctctacggctagctgtatactgtacgccgcctccgccttaacatgagcgcggatgtactatgtatatatgcatgctgtctcgcgtacc

SEQ ID NO: 28688 - DNA, 1448 bp, Zea mays
  Clone ID: LIB4762-032-H2_FLI
tttctcgcatcgctgcgccgctccatccgctcggctcccacccgtccgtcgtcgcctcgccgtcgagccaccgccctccttgtcaacctcgctgacgacgggcccgtgtgattctgctgcggtgcagtgttgctgctcgggccgggcgggaggagaaaagatgggggtgtacctcagcacgcccaagacggacaagctctcagctgatggagagaacagccgcgtccggttcggcctctcctccatgcaggggtggcggaccaccatggaggacgcgcatgctgccttgccagaccttgatgaatgcacatccttttttggtgtttatgatggccatggtggaaaagctgtatcaaaattttgtgcgaggcatttgcataaacaagtgcttataaatgatgcaaattcatctggtgatttgccaacctctctccataaagctttcttaagaatggatgagatgatgaaagggcagaggggttggagagaactaactgagctgggagataagggaaacacaatctcaggtatgatagacgacataatatggcctcccaagggtggtgattcagataagataagggaagattgggataccgaggagggtccaaattcgaactttcctggaccaacatctggaagcacagcttgtgtggctgtcataagaaatgacaaattaattgttgcaaatgctggggattctcggtgtgttatctcacggaagggtcaggcttacaatttgtcaacagatcacaaaccagatcttgaggaagagagggagaggattttgggtgctggtggatttgttgttgccggacgggtcaatgcaagtctgaacttatctagggcaataggtgacatggaactgaagcaaaatgacctcctgccagtggagaggcagatcgtgacagctgaacctgaattgaaaacagtccagctctcggaggatgatgaattcattgttttagcttgtgatggaatttgggattgcatgtcaagtcaagaagtagttgattttgtacataaacagctaaagaccgaggataagatatctagtgtgtgtgagaagttgctcaaccgctgtgtggcacctacatctggtggcgaaggatgtgataacatgacggttattgtggttcaattcaagaaaccagctttagctgttgctacttctagcgctgagcagtctgctaccactgcagaagggatgcggcccaacgaggtcgatggcccagattaccccccgaagtaggcgttgagtggcacaccgtgctgtggagctctaaccggtggataatagacaaaaaaggatagtgaggtggtgtatataagaaaagggattctattcgacaatctcttatagggtttgttgcttccttctttctagtgttcagagtcgtcgcaacctgtaatacatggcatgttggtgcttaaattggtttttttgt

SEQ ID NO: 28689 - DNA, 991 bp, Zea mays
  Clone ID: LIB4762-034-H2_FLI
agcgcccgtcgcctccctttccccttccctccctccctctccccgcgggccgccagaggcaatttcgccctcgattcgaccccgattcgtccgcccgcgaccgggattccctccgccaagcgcggatctgaacgctgcgctccgtgtcgccgctcgaatccgccatgaagggggccaaatccaagggcgccgccaaggccgatgccaagctggcggtgaagagcaagggggcggagaagcccgccaagggcaggaaagggaaggccggcaaggaccccaacaagcctaagagggctcccagcgctttcttcgtgttcatggaggaatttcgcaaggagttcaaggagaagaaccctaagaacaagtctgtcgctgcggtggggaaagctgctggcgacaggtggaaatccctgagcgagtcggacaaggctccctatgtagccaaggctaacaagctcaagctcgagtacaacaaggccatcgctgcctacaacaagggcgagagcactgcagctaagaaggctcctgccaaggaggaagaggaggaagatgaagaggagtctgacaagtccaagtcggaggtcaatgacgaggatgatgaagagggtagtgaggaggatgaagatgatgacgagtgatggagctcctcgagacaatggaccgtgcttcatccaacaatggagcggctacacaaggccccgtggcgatcacaaaaaaggagcctatatccatgtactagaattattcagtttcactccacatcgtgatgttttatttttacttttgtcgtgctataacggatagcgctcctcgttggcgccactggcgggtggttctgcctctggtctggtgtgtttgtgtgtggtcacacttgccagccagtagaggcgcctgcttgtacctagattactgtttccattgtcgtcatcatcggctaacattgtcataatgtcagtttgggtaatgttagattaagtaattattgtgtttt

SEQ ID NO: 28690 - DNA, 959 bp, Zea mays
  Clone ID: LIB4762-037-D5_FLI
acatatagcgatgtcaaactgagtacttccaaagtgtactgtttgctgcccgcctggcgcctgcccccataactactctgccaccaatccggggaggaatcaacctagcggtaagcggacatggcggcggcgaagatagcgccgtcgatgctctcgtcggactttgccaacctcgcttcggaggctgagcgcatggtccgcctaggcgccgactggctacatatggacatcatggatgggcacttcgttcctaacctgactattggggctccggtgatccagagcttgaggaaacataccaaagcatatttggactgccatcttatggtcacaaagccttcagattacgtagaaccatttggaaaggctggcgcttctggattcacattccatatagaagttgctagagacaactggcaagatctcatccaaagcattaaatcaaagggtatgcggcctggtgtatcattgaggccaggtggaagcagaaaatccggtagaattggttcttgtgatgacagtcgagcctggttttggtggtcagaaatttatgccagaaatgatggataaggtgcgcacactgagaaagaagtacccttcccttgacatagaggttgatggtggtctaggtccttcaaccatagacgtggccgcatctgctggggccaattgcatcgtcgctggaagctctatatttggcgctgcggacccaggagccatcatatctgtgctgaggaagagcgtcgagggctctcagaacaaaaactgattttggtgtttctgctgtaaagtactccctccgtttttttttattcgtcgcgttttagttcaaacatgaactagcggacgactgatattcgagaatggagggagtacttcgaccctgcacgtcagatgagctgatcctcacattgcaccggaactgttcggcgagaataaaatttgatgttagaccttgg

SEQ ID NO: 28691 - DNA, 933 bp, Zea mays
  Clone ID: LIB4762-041-D9_FLI
aaatgtcaaaaccatcgggggcaaaaggataggagaacaaggaaaaaacaatggcggtgctactccgccgcgccgcggcgctcctcgtcgtcgctgctgtctgcgcggacggcgcctccacgttctactcctccgaccccaacctcggatccgcccgcgtcgtcttccagacgaattttggtgatattgagtttggcttctttcctcatgttgcacctaagactgtcgaacacattttcaaacttgtgcggcttggatgctacaacacaaatcacttcttccgggttgacaagggtttcgttgcacaagttgctgatgttatgtcaggtcgaaccgcccctatgaatgaggagcagaaaaaagaagcggagaaaacaattgttggtgaatttagtagtgtcaagcatgtcaggggaatcctctccatgggaaggcactctgatccagacagtgctggctcttccttttctattcttctgggcaattcaccgcatcttgatggccagtatgctgtatttgggagggtcactaaaggtgacgatacattgactaaactagagaggcttccaacccggagagaaggcatttttgtaatgccgatcgagcgtatcaacatcctatcaacttactattatgatattgatctagagagctgtgaagcagaaaaatctattctccggaggagactttctgaatcagcatcagaagttgagcgatggagaagaaaatgctttgcttaatggtggaataaggactgcatattccgtttcctgaggctggatatggacgacggtgtggaaatgtgtatgccgcgtgttcttatgctatcactgtaatacttgagtagatgttagatgggtcctaaggttccacatggatcttgtctgtaacacatgggcagatgagttgttacaataaaccttcaattcgttg

SEQ ID NO: 28692 - DNA, 908 bp, Zea mays
  Clone ID: LIB4762-041-E2_FLI
ctcgtaggccggccgggaaatactatcagtttcactgcttctcaggattgccattgtagttgaagtcacgtgtgctggatgttttatgggcttatatttatggcacatccacaaatacaactctttgaatgggcagcctgatattttgcggtcattatattctgcactccaaccatctaatactttggaagatcgaagatatcatgatgcccgtctttctgatcagcagatggcgttacttcagtaccaaagagagaatatccattatctgagtgaggaggttctccgcttgcaagaatgcttaagcaaataccagagaactgctggaaccactcctcaggttgatcttgcccatcttttagcaactcgtgatcaagaactccgagcactcactgctgagatgaatcaagtgcactccgaacttcaacatgcccgtggtttgatcgatgaaaaggattcagagctccagcgtatccgtctgagcaacaaccagtatgttgaagaaaacgataggctcagagctattctcggtgagtggagtgctcgagccgcaaagcttgaacgtgcattggaggcagagcgggtgtcaaacgtcgaattgaggaaaaatattgcaaagtttagaggtcatttgtacaaagagcaggaggcctgacttcggtatgttatagctggttccagaattttacctaagacacctgactaaaggcacaatttttgatatagaagggtatctcggtctggatccattcgaactgagattggcacgtgattgttcgatgacgcatggaatatgcgtctagtggtttgtagaatgcgtagtttgatgtacatgtgttcgtaggtttgagcatgtagagtatggtatccctcgggaaaaaaaaggagtatggtattcatgtggtcgg

SEQ ID NO: 28693 - DNA, 819 bp, Zea mays
  Clone ID: LIB4762-043-C9_FLI
ataattgatgtagtagtgtagtggtagaggaaggtatgcgcgagagagaggttgcgagtttgaatctcaccattcacaaaacatgtaaatttgatccaaaatactagtgaaaaatgataaggcgatgggtatggtaatgtggtgggtagtggttggagagttattcatataatttaaaaaatgtttaaccccaccacaacccagcgccggcagtcgccgtcatcgatcgatcgccggaaaactaacccctaacgatgtctggagccggcgaggaggacaagaagcccgcggagggcggcgcccacatcaaccttaaggtcaagggacaggatggcaatgaggtgttctttcgcataaagaggtccacccagctgaagaagctgatgaacgcttattgtgaccgccagtctgtggacatgaatgccattgcgttcctgtttgatggccgcaggcttcgcggcgagcagacccctgatgagctggagatggaggacggcgacgagatcgacgccatgcttcaccagaccggaggcagcgttcctagcaccacctaaaagcctcgttttgctctccgtcctgcgtagtactaaacaaaagggaaaaagtctttttaaggaacttgtgatgctctggctccttgtgccattgctgagggacatccttagcctttgtttagtagtatggtttggtactttgttctgtcatcactcgtttatctatccctaatacatgccgccatgattgtactcccaatgacgcgcagatcatttgctttgttttgtctgctcgaacctcgaagtcgtctatgcttttcagatt

SEQ ID NO: 28694 - DNA, 629 bp, Zea mays
  Clone ID: LIB4762-044-F7_FLI
taccctcgaggccggccgggaattcgcttcgatccccagaggcacagacgagacgacagagatgaaggacggaacgtcgtcggggggaggggcgttcgctgcgggcagcgatccaaggcagccgtcgacggcgaagccatacgcgccgccgaagctgtcgccccaggacctacccatcgactatgcaggcttcctcgccgtcgccttcggcgtcctcggcgtcatgctccgctacaaggtgtgctcgtggatcgcaatcatcttctgcgctcagtcgttggcaaacatgaagaactttgagaacgatctgaagcagctttctatggccttcatgtttgctgttatgggtctggtgacgaactattttggccccgctcgtccaggcagtacaaagcgctaagctgtggaagaacaccatgcgcttcattcttcataggatatctagccgatctttttggtgcttccgatagctttggtgctgacattatgtatgtcctatttgagcaaacgtcataggtatggacatcaaattaatggaccggtacatgtatgatgctcaataatttatttgtgcaatactagtaaacgcatagactgtttgaacgagtacttggtttctccggatatgc

SEQ ID NO: 28695 - DNA, 637 bp, Zea mays
  Clone ID: LIB4762-046-F6_FLI
gtgccctagtccatcgagtagcaacgaagcttgacagcaacggagaagaccatgaacagcagtagcagtgaagtgccggtgtgcgtcaccggtggcgccgggttcatcggctcctacctcgtcaagaagctcctcgagaaaggctacaccgtccacgccacgctgcggaacaccgaggacgaggagaagaccgggctgctgcggcggctggtccccggcgcggcggagcgtctgcggttgttcgaggccgacctcttcgacgccgccaccttcgcgccggcgatcgctgggtgccagttcgtcttcctcgtcgccacgccatacgggctcgaagccgccggatccaaggacggaggcggtggctgtggcggtgcaacctgaggtggacaagctgggagagctggggttcaggtacaagtacgggatagaggagatacttgatagcagcgttgcctgcgcagcgagactgggctcccttgacgcagccaagctcaacgttccagatactgtcagtagcaaataaacctgaattgtgtagtgaacctgactctactttcatggacgttattagctcaatcttcataaggatatggacatatggtgggtgtgtgtgaacacggtgtccttgccgtaagag

SEQ ID NO: 28696 - DNA, 770 bp, Zea mays
  Clone ID: LIB4762-053-B11_FLI
acttttccggcctcccattcctcgcgcggcgaccacccgattcgaagcgtgcggagagaccgaagaagcgggagagatggctcgtaccaagcagactgctcgcaagtccacgggagggaaggctcccaggaagcagcttgccaccaaggctgcccgtaagtctgcccccaccactggtggagtgaagaagcctcaccgctaccgccctggaactgttgccctccgtgagatccgcaagtatcagaagagcactgagctgctgatcaggaagctgcccttccagaggctcgtcagggaaattgcacaggacttcaaaactgatttgcgtttccagagccatgcggtgcttgccctccaggaggctgctgaggcataccttgttggcctgtttgaggacaccaacctgtgcgccatccatgctaagcgtgtgaccatcatgccaaaggacattcagctggcaaggaggatccgcggcgagagggcctaatcgccacctcaaacatcgtgacaaaaacatgaagtcctggggttattgttaatctggtgccattgtaaggacatatgagtagggtttgttttgtggatcgcaagtttctcttctgctactgttgctgctacctttgctggtgttattgctagggtcgaatacttaagttaactatgcgctgacagtctggactagcagtgttatgtgcgctgctggaccttgcgcgcaatgctgtggccgatttgttcgttaatgtcaagaattgtgttacagtgcgtgtaag

SEQ ID NO: 28697 - DNA, 600 bp, Zea mays
  Clone ID: LIB4762-053-D8_FLI
gaggccggccgggacacggcgccatgtcttcccggcggccgtcgcatccgtcccaccggaatccacggcgattcccgtccgcctgctatcttctagtactcacccttgccctcctcgtcgtctctgccgctgccaagtcctcccgccgccccatctccgacaacgagatccggcagaagaaggaggcctgctacaccgacgtcgagaacgggctgtggggatgggtgtgcaggtactcgccgacggagaaggagaactgcgtgttgcgctgcctctcgccggagtgctacgacctcatatacggcggggatccgcttgaggaaggggagttggactatgttcgaggccaggagtacaagtattgtatgcacaaatcatcccttggagaaagcttggatggtgtgaagggatccttcagctactcatgaaggaatgagaagaaaaaggttctgttagtctgctgtaaattttatttacaatcttgaacagacatgcatctttttagataatggaactgtaattccagactttgctttttctcaaagcatcaccggtgcatcatcttatactaggtctatgtcccgtgcgttgccacgagag

SEQ ID NO: 28698 - DNA, 808 bp, Zea mays
  Clone ID: LIB4762-058-G3_FLI
ctcgaggccggccgggtaaaatcgaatacggatacggagtcggctcctcgtgcgttgtctctctctctctctgtctctctctctctcgtccccctcgctctcagacgaccggtgggccgccgccgccgacgccgcaataagccaggtgctgaggctcttgttggtctcttcgccagcgaggagcacccagcaggacaaggcaacaggctgttggaatatggaccaacaaggcatgcatgaccatgaaggggtccacgttgttggatttgaagtcccgccttcaccggattccagctacgacaaccctgttcctgggaatgaagacgaaggccgggagcccccactgatgccacctcatctgcagcacacgctgctgagcttcccaccaagccaagacgagtcgagcccgctgccccagccccagaccgtggttctgaaccacctttacatcgagaaagagaacacgaggtccatggttgctctggggatcacgcaccggttcaaggctaagttcgtgaccgtcgtgctttacaagccagtgctgaggcggtagggtgtggtcgtgtgcctgcgctcctgctccctcttctcgcgcaggatcggtaatggtaatgccgtaatggtaatggtaattgaacaccccttgggttgcagcccaccccttccagttgttgttattgttgttgtagtggtgcagaaacgggcgagaacgtcattttcgaatgattattagccttgttgtacctaatttggctgctggtggtggcagtgatggtttggttggagtagtttgcttgtgatttggcag

SEQ ID NO: 28699 - DNA, 785 bp, Zea mays
  Clone ID: LIB4762-059-B9_FLI
ctcgaggccggccggggcccatatcactccaccaaaccctaaaaccgcttccgcaaccacgtataaaaacaccgcacgcgccgccgccgccgtcctattcctcggagaggagaagccgccgtcgcagcaatcacagcagcccggagaacggccaggtccgacaagatgcagatctttgtgaagacgctgacagggaagaccatcaccctcgaggtcgagagcagcgacaccatcgacaatgtcaaggccaagatccaggacaaggaagggatcccgccggaccagcagcggctgatctttgccgggaagcagctggaggatggccgcacccttgcggactataacatccaaaaggagtctacgctccacctcgtgctcaggctccgcggtggcatcattgagccctcgctgcaggcgctcgctcgcaagtacaaccaggacaagatgatctgccgcaaatgctatgcacggctgcaccctagggctgtcaactgccgcaagaagaagtgtggtcacagcaaccagctgagggccaagaagaagatcaagaactgaggtgttgctgctagtcagtttcatggacaatgttgtttggttgttgaaccgtgtttgtttacgaactgtatttttgtttggttgttgaaccgtgtttgtttaccgaacatattggccttatgttatgttttaccatgttgtcgatgacacaatactatatgacgatagcaactatgctattgtagttttggtcattgttcacctgatatgtgccatatttcggtacaaac

SEQ ID NO: 28700 - DNA, 825 bp, Zea mays
  Clone ID: LIB4762-061-H11_FLI
ggactagtcggactcgcagctccgccccaaagtccaggtcgaagcatggaagtcgcggcggcgtcggcgaggcccgtcctgcgcgtggctgccatctgcggctccctccgcaaggcctccttcaaccgcggcctcctccgcgccgccgcggaggtgtgcgaggactccatcccggggctccgcatcgacgagctcgacatctccgacctgcccatcatcaacaccgacctcgagaccggcagcggcagcggcaccgtcttcccgcccgccgtcgaggccttccgcgccaaggtctgccaggccgactgcttcctcttcggcgcgcccgagtacaactactccatcgccacccccctgaagaacgcgcttgactgggcctctagaggaaagaactgttgggcagacaaagctgctgcgatcgtgagtgcaggcggcggctttggaggagggaggtcgcagtaccatctccgtcaggtcggggttttcctggatctccatttcatcaacaagccagaactgtgcgtccaagcgtttcagcagccacccaagtttgacagcgatggaaatctggtcgatgctgaaatcagagagcggctcaagaaagtgctcctatcccttcaggccttcacgctcaggcttcagaaggaggactgaatcaactcggtaccattgtagtacgtgcttccctgagaagcgtttattgctcttggaagtttgtaacgcgttgctgggtggcctggaagtttgtaataaatccaagaagtgttctcgctgaatatttaagatttgatcgcatctatatataataaagattgtgttctagtc

SEQ ID NO: 28701 - DNA, 751 bp, Zea mays
  Clone ID: LIB4762-062-H5_FLI
ttcgctgcgccgccgcctccgacatcgtctcttcgtccccacgagcaaccgataatccgccggcgctgagatgttggtttatcaagacctcctatctggcgacgagctcctgtcggattcattcacctacaaggagctcgagaacggcgtcctgtgggaggtcgagggaaagtgggtcacccaaggtcctgttgatgtagacattggtgccaatccatccgccgagggtggtgaggatgaaagcgttgatgacacagccgtgaaggtggttgatattgttgacacattccgtctacaggagcaacctccttttgacaagaaatcatttgtctcttacataaaaaaatacatcaagaatctcactgctgtgttggagccagagaaagcggatgagttcaaaaagggtgtcgagggtgcaaccaagtttctccttagcaagctgaaggaccttcaattttttgttggtgagagcatgaaggacgaagcgtccgtggtattcgcctattacaaggatggtgccactaatccgacattcctctatttctctcatggtcttaaggagatcaagtgctagattagttacccatgttgggtactatatatgttctattgttatagccacaactatagctgccctgcctgaactgaactcaggttttttttaagaaaaaactgtccaagattggattgcttgttaaagctaaatattgttattgacgtgttattgcttagttgtcattgtctttcagcg

SEQ ID NO: 28702 - DNA, 1222 bp, Zea mays
  Clone ID: LIB4762-065-G2_FLI
gagcccacctactccctcccaccacttgcattcacacactcgattccgctgctctctccctcttcctctcccccgcggcggagccataaaccctaggcctcgccgtcgtcggaggcgccgccgtgatgtcgcactttggaaggacgggtccgccggacatccgcgacaccttctcgctgctcgtcctcaacatcagcttccgaaccacggccgacgaccttttcccgctcttcgagcgctgcggcaaggtcgtcgacgtcttcatctcgagggaccgcaggaccggggactcgaggggttttgcgttcgtgcggtacaagtacgccgacgaggcgcagaaggctatagatcggctcgatggccgtaatgtggatgggaggaacatcatggtgcagtttgcaaagtacggccccaatgctgtgccaatccacaaaggaagggtcaaagagggggttgagaaatcaagagacaggtcaaggagccgtagtccaaggccaaggcacagagacagagatgatagaaggcgaagtcgcagcaggagcaggagcagagaaaggcatgtccatgatagagatagggactatcgtcgtcggagcagaagtagaagccgaagtatgagttcaagccctgaccacaaaagtcatcgtagagcaagagatgatgttaagcgcaagagcagaagcaagagtagaagcaggagcaggagtagaagccgctcataccacagttcttcacctgcccggcgcagtgctagtcctcccaagagcccaccgccacagaggagccccactcctgaaaagcatgccaatggaaaagattcacctctgtcacgcagtgtatctccatcaccgaagcgtgcaagctcccgcagcccaggcagcgatagcaaggaataaagcttgttgatctggtgatgcttaaagagcagtcttcccatgggattgcagaacgttgagaaggctgtttgaacatgatggcagtagcaatctgcaatcaaccgctatccaaggttgctagttgttcttttaatgacttctagaattgtgttttccagttgtcaaaatatgctgttggtttgtatttcgacctctattgtcttttaatacccttgtactgcatcatctactttatgtgcatccgtttcttgactccatattaatttgttaaaacatttgtgcattttctagttatctgttcgtgagaggggttgctgtttaccgag

SEQ ID NO: 28703 - DNA, 898 bp, Zea mays
  Clone ID: LIB4762-066-E3_FLI
ttgtagaggaacccgagcggacgtagccacaccccaacatcaaaaccctcccatctcttcccctccgccgccgtctctgctctcaagatcgccatggcgtcagaaaagaagcagtcgaacccgatgcgggagatcaaggtgcagaagctcgtgctcaatatctccgttggagagagtggagatcgactcacccgcgccgccaaggtgttggagcagttgagtgggcagtctccggttttctccaaggcaaggtatactgtgaggtctttcggtattcgtcgtaatgagaagattgcatgctacgttacggtcaggggtgagaaggcaatgcagcttcttgagagtggcctcaaggtgaaggagtatgagcttctgaggaggaacttcagtgatactggctgctttggttttggtattcaggagcacattgatcttggaatcaagtatgacccgtctactggtatttatggcatggacttttacgtcgttctggaacgagctggttatcgtgttgcacgtcggcgcaggtgcaagtcccgtgttggcatccagcacagggtgaccaaagaagacgccatgaagtggttccaggtgaagtacgagggtgtcatcctcaacaaggcccaaaacacctcgtaatcattgatagtcatcaaacgacttgcccttaattctgtgtactatgaacaaaacaccccgtgtttggttcaagtataatctgtgtactatgaattctgtgtttgttggataccaaatgcactgccagttttgcgtctgtgcccgtaattccatcttgataatcagactagcagttaggaacaaataactgttgttttgattgtgttaatttgagctcgccagcaaaatctaaggaacatctatcaggtacttcgttcag

SEQ ID NO: 28704 - DNA, 753 bp, Zea mays
  Clone ID: LIB4762-068-B5_FLI
ctcgaggccggccgggaagctcctcatctcgcgcaggggggtcgcctgaggtatcggtcaatcagcaatcaccccaaatcctagggttctagtcgcttctcgtcgtttcgttcgtagatcacagagacaatggtgaaggcagttgctgtcctcgccggcactgatgtcaagggcaccatcttcttttcacaggagggggatggtccgaccaccgtgactggaagtatctctggcctcaagccagggctccatgggttccatgtgcacgcgcttggcgacaccaccaacggctgcatgtcgactgggccacacttcaatcctgttggcaaggagcatggcgcaccggaagatgaggaccgccatgccggtgatcttgggaatgtgacagcgggagaagatggtgttgttaatgtcaatattactgacagccagatacctcttgctggaccccactcgatcattggccgagctgttgttgtccatgctgatccggatgatcttggcaaaggtggacatgagcttagcaagagcacgggaaatgctggcggacgtgttgcctgtggtatcattgggctccaaggctaaagcggttaacctccgaggcaaacaccatagaaggtcgaagcgagcacctcaggatgttgctgttccatttcccctgtattggcaacacaatttgagtactccaaataagcgcctgatccatgatcagagagcactattcatgccattttgtatatgaacaatgttgcg

SEQ ID NO: 28705 - DNA, 1003 bp, Zea mays
  Clone ID: LIB4762-068-D5_FLI
aacactcccatccagccgccaccaggtgcagagtctttcgtcatctcttctccggcgaagaacccccagtcgcccaccagatcacttgttaaactttgttgaggggtgatggcggtttctttcgcaaacctcagctccgaggcagggcttaaaaagcttgatgagtaccttctcactcgcagctacatcactggctaccaagcttccaaggatgacttggctgtctacacttcgttttcgtctgctccctcgtccaagtatatcaacgtagcaaggtggtttaatcacattgatgcgctcgtgaggctgagcggaattactgcagagggccaaggtgtgaaggttgaatcgtcagcagttccttcagccccaactccagatgttgctgaagcacaggccccagttgctgaggaggacgacgacgatgatgttgacctttttggtgaggagaccgaagatgagaagaaggctgctgaagagcgtgctgcagctgccaaggcttctggcaagaagaaagaatctgggaagtcatcagttttacttgatgtgaagccatgggacgatgagactgacatggccaagctcgaggaagctgttaggagtgtccagatggaagggttgctctggggcgcatccaagcttgtcccagttggatatggtatcaagaagctgcaaatcatgatgaccatcgtcgacgaccttgtctctgtcgacactctcattgaggactatctgtgcgctgagccagttaacgagtacgtacagagttgcgacatagttgccttcaacaagatctaggcgtgactttcgatcagtccttcccctggggtgctggcgatggtggtggctgggcaatgcaccagcctaatttatccatagctatatgtctgctttgtgtggccagtgatattgccgtgagtatttttggatcctattcgagtcgaatgtaccagtaccagagttaatttgctttaattcgaaacaccgttccagttggaatgcg

SEQ ID NO: 28706 - DNA, 966 bp, Zea mays
  Clone ID: LIB4762-069-C12_FLI
tgtccgactcccagccgtcgtctgctgcggactccgcctccattttgctctgtttcttgcaagttgctcttgcggtagttcccccaactgccaccatgcagaacgaggagggtaagactgtggacctctatgtccccaggaagtgctcggccacaaacaggatcatcactgccaaggaccatgcctctgtccagatcaacattggccacttggatgcgaatggcctgtatgatggtcacttcacaacgtttgctctctctgggtttgtccgtgctcagggcgacgcagacagctccttggacaggttgtggcagaagaagaaggttgatatcaagcagtagattttacatctagtttaccaagaattggacactgccttagctatgttttgaattcatgtcactatatgcaatgttgtgatttcagctggtaccttaaatctgaagatttagtatctttgttgggtaaaaaaaaaaaaaaaaaaactcgcccctctccctctctcccaccccgcagccgccgcgcaggtagccctagcacccgcgacgagcaggatctgcccagttgctcttgcggtagttcccccaactgtcaccatgcagaacgaggagggtaagactgtggacctctatgtccccaggaagtgctcggccacaaacaggatcatcactgccaaggaccatgcctctgtccagatcaacattggccacttggatgcgaatggcctgtatgatggtcacttcacaacgtttgctctctctgggtttgtccgtgctcagggcgacgcagacagctccttggacaggttgtggcagaagaagaaggttgatatcaagcagtagattttacatctagtttaccaagaattggacactgccttagctatgttttgaattcatgtcactatatgcaatgttgtgatttcagctggtaccttaaatctgaagatttagtatctttgttggg

SEQ ID NO: 28707 - DNA, 761 bp, Zea mays
  Clone ID: LIB4762-070-B4_FLI
ctcgaggccggccgggccaaccgagacaccgcgtgcgaaccaagcagaccacaacaagaagaagcgtagtcgtcgccggaaggaaaggcgcggagcaagatgtcgtggcaggcgtacgtcgacgagcacctgatgtgcgagatcgaaggacagcatctcagcgccgccgccatcgtcggtcacgacggcagcgtttgggcgcagtccgagagcttccccgagttaaagcctgaggaggttgctggtatcataaaggactttgatgaacctggtactcttgcaccaactggtcttttcgttggaggtacaaagtacatggtgatccaaggtgaacctggagttgtcatccgaggaaagaagggcactgggggcattactatcaagaaaaccggcatgtccttgattattggtgtctacgacgagccaatgactccagggcaatgcaacatggtggtggagaggctcggcgattacctgattgagcagggcttctaaaagttcgctatatgctgttttggtcatttgggcaccaaagtttgcgcctcatttggttctgtaatccgtgggctcgtgcatgtacttggcgtattgcatgcagtgaataatttagcttgggtttgtttgttgggggcagtgttggggaccgatttggattggggtttatgcttggcatcgcgtcgtatcgatactcagctgctgtttcgctgagtaatgtacatttccctggtaatggtacttgtggactctgctgcttttatgcg

SEQ ID NO: 28708 - DNA, 644 bp, Zea mays
  Clone ID: LIB4762-071-B6_FLI
ctcgaggccggccgggaccgcaatcttcaatctccccagcaatccctagcagaagccttccatcctcactcgctcgatggcccgcacgaagcagacggcgaggaagtccaccggcggcaaggcgccgaggaagcagctggcgactaaggcggcccgcaagtctgcccctgcgaccggcggagtgaagaagccccaccgcttccgccccggcaccgtcgcgctccgggagatccgcaagtaccagaagagcacggagctgctgatccgcaagctgccgttccagcgcctggtgcgggagatcgcgcaggacttcaagaccgacctacgcttccagagctctgctgtctccgcgctgcaggaggcggctgaggcctaccttgtcgggctcttcgaggacaccaacctctgcgccatccacgccaagcgcgtcaccatcatgcccaaggacatccagcttgcccgccgcatccgcggggagagggcctaagcgtcatattttctgtcatcagtgcccgatcagaagatgtagagatatgctgggttctgtagtttgggttactgtcgaatcatcgagtgttggctgttcactgctgtaacttaattatcatgatgcatatgaaatggcaatgaactctgttatcaag

SEQ ID NO: 28709 - DNA, 963 bp, Zea mays
  Clone ID: LIB4762-071-H9_FLI
ctcacactcccatccagccgccaccaggtgcagagtctttcgtcatctcttctccggcgaagaacccccagtcgcccaccagatcacttgttaaactttgttgaggggtgatggcggtttctttcgcaaacctcagctccgaggcagggcttaaaaagcttgatgagtaccttctcactcgcagctacatcactggctaccaagcttccaaggatgacttggctgtctacacttcgttttcgtctgctccctcgtccaagtatatcaacgtagcaaggtggtttaatcacattgatgcgctcgtgaggctgagcggaattactgcagagggccaaggtgtgaaggttgaatcgtcagcagttccttcagccccaactccagatgttgctgaagcacaggccccagttgctgaggaggacgacgacgatgatgttgacctttttggtgaggagaccgaagatgagaagaaggctgctgaagagcgtgctgcagctgccaaggcttctggcaagaagaaagaatctgggaagtcatcagttttacttgatgtgaagccatgggacgatgagactgacatggccaagctcgaggaagctgttaggagtgtccagatggaagggttgctctggggcgcatccaagcttgtcccagttggatatggtatcaagaagctgcaaatcatgatgaccatcgtcgacgaccttgtctctgtcgacactctcattgaggactatctgtgcgctgagccagttaacgagtacgtacagagttgcgacatagtcgccttcaacaagatctaggcgtgactttcgatcagtccttcccctggggtgctggcgatggtggtggctgggcaatgcaccagcctaatttatccatagctctatgtctgctttgtgtggccagtgatattgccgtgagtatttttggatcctattcgagtcgaatgtaccagtaccagag

SEQ ID NO: 28710 - DNA, 895 bp, Zea mays
  Clone ID: LIB4762-074-F4_FLI
aaaacgataaaccagagcccggcctaaatgtgacggccgctctagtggaagcgcgtataaattgggggaaggaaaattccagcggacgagcgctctagccgtttttcctcgtcctcgatccagcccctgccgcttccagctccgatcgatctgatccctccccaccaccacgcccatggcggaccaactcaccgacgaccagatcgccgagttcaaggaggccttcagcctcttcgacaaggacggggatggttgcatcacgaccaaggagctgggaactgtcatgcgttcactggggcaaaaccttacagaggctgagctccaggacatgatcaatgaggtcgatgccgatggcaacggcaccatcgattttccagagtttctgaaccttatggctcgcaagatgaaggacaccgactctgaggaagagctcaaggaggcctttcgtgtgtttgacaaggaccagaacggcttcatctctgccgccgagctccgccatgtcatgacaaatcttggggagaagctaactgatgaggaggtagacgagatgatccgtgaggctgatgtcgatggtgatggccagattaactacgaggagtttgttaaggtcatgatggccaagtgagccacagaagcataagctcaaggcagagaggattgtgcattgcatattagtcaagatgcaatgcaactcttatttcatcgacttccagtgaaacattctgctagttgtagtttttgaaaggcaatgcagttgctgctttgttcttccctccagtgtgttttcagaactgttgattcacgtgaaactgtaatgattgccctccctgctgtgtcttggttgcagttgaaaccatatgtagctacattccccctcccaccacctccacacacc

SEQ ID NO: 28711 - DNA, 1076 bp, Zea mays
  Clone ID: LIB4762-075-C2_FLI
gagacccctcgcaaccgccggccgattcgagcagcgccccagcagcctctgctccgctgcctctggcgaccgccggagcccgaggaggaggaggagggaagatctcgctcgatccaaggaggtgagtacaagatggtgagctcctcgtcgccggtggtcaacgtgtacccgctcgccaactacacgttcggcaccaaggagcccaagatggagaaggacacctccgtcgccgaccgcctcgcccgtatgaaggtcaactacatgaaagaaggaatgcgtacaagtgttgaagcaatcctattggtgcaagagcacaaccatcctcacatactgctcctgcaaatcggtaatacattctgcaaacttcctggtggacggttgaagcctggagaaaatgaaatcgagggtttgaaaagaaagttatgcagcaaacttgctgtgaactcgccttcctttccacctaactggcaggttggagagtgcgttgctgtgtggtggaggccgaactttgagactgtgatgtatccttactgtcctccacatatcactaagcccaaggagtgcaagaaacttttcattgttcacctatccgaaagagagtattttgctgttccaaggaatctgaaactgcttgctgttccactgtttgaactctacgacaatgttcagaggtacgggcctgtcatctctaccatcccgcagcagctttctaggttccagttcaacatggttagctcttagggtgatgatacaagaaaaccaatgtggccaaggcagctcttcggttgctgagctagctgatcaacgtaccctgactgattttatttcattgtgctggatttttttatatagactactactatctagacatgcatttctgattgtattgttgttgaattatcctgttatgtcgcatcccatgggcagatccagtctaggatatgtacacctgataacttagttaaaaaaaagaaaagaaaaccgaaggtagtgtgtgtatagatcgtactgtagtatgcatgtaaccggatcagatccgttttcaggtagattgctctaggttgggttatttatcg

SEQ ID NO: 28712 - DNA, 752 bp, Zea mays
  Clone ID: LIB4762-076-H12_FLI
ctcgaggccggccgggcttgctcgctgcgccgccgcctccgacatcgtcccttcgtccccacgagcaaccgataatccgccggcgttgagatgttggtttatcaggatctcctatctggcgacgagctcctgtcggattcattcacctacaaggagctcgagaacggcgtcctgtgggaggtcgagggaaagtgggtcacccaaggtcctgttgatgtggacattggtgccaatccatccgccgagggtggtgaggacgaaagcgttgatgacacagctgtgaaggtggttgatattgttgacacattccgtctacaggagcaacctccttttgacaagaaatcatttgtgtcttacatcaaaaaatacatcaagaatctcactgctgtgttggagccagagaaagcggatgagttcaaaaagggtgtcgagggtgcaaccaagtttctccttagcaagctgaaggacctccaattttttgttggtgagtccatgaaggaggatgcgtctgtggtattcgcctattacaaggatggtgccactaatccgacattcctctatttctctcatggtcttaaggagatcaagtgctaggcgtgcggcgaaattagttacccatgttgggtactatctatgtactattattatatccaaaactatagttgtcctggctgaattgaactcaaaagggtttgtttgagaaaaaattgtcccaagattggattgcttgttaaagctcaatattgttatcg

SEQ ID NO: 28713 - DNA, 842 bp, Zea mays
  Clone ID: LIB4762-077-E4_FLI
ctcgaggccggccgggacattccttagctctgccctccgcccctcccaaatccattcactaccgccggcgccggatccaataggaggaggaggaagatgactgtgggcatgatcaacgcaaacccggtggtgcacgagcggccggagcgcgcctcgcacccccacgccgccgatgtgctcgaccctctcgatgtctttggcgggctttcgtggtgcggtgcgtcagatacggtgcgggacatcaaggacccggagcacccgtactccctggagcagctcagcgtgctgtcggaggagtccgtctccgttgacgagacgctcggacgcatccagataaccttcactccaactgtgcagcactgcagtatggccacagtcattggcctgtgcctccgacttaagttgatgcagaacttccctccacatttcaaggttgacatcaaagttgctccaggatctcttgctaatgaagaatcagtaaacaagcaactgaacgacaaggagagggttgcagcagccttggagaaccccaacctacgccagctggtcgatgaatgcttatgcttcaatgatccatactcacgttaacttgttccatgctgcttcacaagtcgcaaccctgcctgctgtacagtagtaaccatgcatgctgtagtctgccctatatgttgacgctgtcgttgtacctggcaacgtgtaattaactgccccggagacatctgtttttgccatctttaaaacgtatggatctcaataatatgacaagagttgcctgcttatgtgacattagcatccaaaagcaagtgtcatttaatgtaaaatcttggtctttgttggtcatg

SEQ ID NO: 28714 - DNA, 1299 bp, Zea mays
  Clone ID: LIB4762-079-A12_FLI
gcaagaaccgaacagagcagctgcgacgagcccaaccagtgagggggagagatggcccgtcgcgccgtcgccttgctcgtcgccgtcgcgctcgcgaccgtgctcctgcatacggcggaggttgcggcggggcagaagaagccggcgacggccgcgaggcgggaggacatcccctacatccggtgccaggtgtgcgagcggatcgcgcgcgagatctccgcgcaggtcgccaagaagcaccaggctctcccgccctccaagaaggtaccggagatcgagatcatcgaggtcgcggagaatgtctgcaacctaaagaagcaggaggcggattggatgcttcggatcgatatcgtcgagaaaggcgacaagctcgagcttgttgagcaagatgaggaagggcattgcaatgcagaatgcaagaccattgagcgtgcatgtcaggaggtgataggatatgctgataccgatgttgctgagtttgtatacaaaaataacccctcggtcgatcagcttatgaaatttctctgcaaagatctttcgaaagcatgtgccaaggacccaccgccagttccaaaagatcgtgtccctggggaaccatttgcaaggaagccatcaaaggatgctgagatggaaaagatattgagatcaatggagggtatgccgggagccccaagcatgaaaatgtactccagggacgatctgatgaaaaataactttggtactgaagacgacgacgaggaggatgatgaagatgaggatgacaacttcccaaagaacttggggaaagctctgaaaaacaagggctctcaaaagaaagatttgaaacagcaagtcgtgcagcagttcaaggataccagcaagaagttgaaagggcatgtaaacaaggtgtccggtatggtaaagaaatggtggaaaggggcaaagaagcctgccaaatccagcaaaagcaaaactgagctctgaagcattgttgaatcacgtcagtaaatctcatccgtcttccacttctcctggagcaaagttttagatggttatcggaagataaaagttacagcaacgcaaccagggcttttgttagagagtttagctacataaaacgtgtacaattgtttgtttttaacttctgttatttgcagtgtacactagtaaaagaactgaactccgatgatagtttttttccagattagtcgtgtcccaattggtcgttatagtgtttgatactctataaaactaaacagctggtgacgccagggaattagtttattggctatgcataatcgaacttttcactaattaatg

SEQ ID NO: 28715 - DNA, 1000 bp, Zea mays
  Clone ID: LIB4762-080-B9_FLI
ctcgaggccggccgggaaaaaaaaaaaaaaatgagaggatcgatgttctgcggcggagatctccggtggtggatgttggccatcttcttcctctgcacactaattgctgccgcggaggagcgcgtcgtcacccatctccccggcttccagggaccactccccttccagctccgaactgggtacgtggaggtggacgaggacaatggcgtccgcctcttctactacttcaccctctccgagggctcctcagccgacgacccggtcatgctctggctcagcggcggccccggatgcacttccttcaccggcctcgtctatcagattggccctctcagtttcgaccttgacagctacatgggtggcctgcctaagctggtgtacagacctgagtcctggaccaaggtgagcaatatcatttttcttgattccccggttggagctggattttcatactctgtcaaagagcaaggatacaattcaagtgacacaaaagctgtcagccatattctggtctttctcaagaagtggtttgacgagcacccagagttcttgtcaaatccactttacattggcggtgattcatacgctggtatgattgtgcctaccgtcacttctgaaattgctaagggtttgaaaattgttggtagtaaacctacaatgaatctaaaggtttgaaaattatactgtcagcagcaaaaacatatagagggatactttgagttcccaaactgctatcctatttttggaggacagaattcccctgttaattttgcatacggtgttcagggctgcctcgttggaaatccattcacagatcaatcaaactttgatgggccatcgaaaattccatttgctcataggatggctctcatatctgaccaaatgtacaaggtaacaagggtagacttaattatagccattaaatattcttgttgtaacctgcatgattttctgtgtttgttgggtatgcactgaatattttaagactgactataagggc

SEQ ID NO: 28716 - DNA, 772 bp, Zea mays
  Clone ID: LIB4762-083-D2_FLI
ctcgaggccggccgggaaaaaacgaggatccgccatccggctccgcttatgtgatagcccggcccaacactacaactgcctctcctcggcgtcgccactactccttgcctcacgccgccgctcaaacagcagaagggagaagagaagcacgcccaaaaattccaaggtttttcacctcttggagcgcaccaacaccacccggagaccggagcgactcgccaccggcgcggaaaaggagggcggaggctcgatggcggatgagaatcaggctggaaagaaagaggaggaggaatttagcacaggccctctgtcagtcctaatgatgagtgttaagaacaacacccaggtcctcatcaattgccgcaacaacaagaagctacttggccgtgttcgtgcttttgatcgccactgtaacatggtgctcgagaacgtgcgtgagatgtggacagagatccccaagactggcaagggcaaaaagaaggctctgcctgtgaacaaggatagattcatcagtaagatgttcctcaggggcgactcggtcatcatagtgttgaggaacccgaagtgatcgcccaaccagtcaccttgcagcagttatgccctttctctgggttcacggaatccgtgcctctgttgaaaaaactgtagcttatgtgtgtcttggcggattagctggttatcttgaactgacgttcatgtgacatggcaatggcacatgaacatacgtttcatgagtttgattgttaattggcgcttgcagcactttgatccc

SEQ ID NO: 28717 - DNA, 780 bp, Zea mays
  Clone ID: LIB4762-083-D3_FLI
aaaaactccgtttcgaattctagggttttgctgctctccgaccccgagctccgaaggccgcagcatcaggcgcggcccccctcgcgtgtgaccgagatggcgctgccgaatcaggggaccgttgattaccccagcttcaagctcgtcatcgtcggcgatggtggaactggtaaaactacatttgtgaagaggcatctcactggagagtttgagaagaaatatgaaccaaccattggtgtggaagttcatccgttggatttcaccactaactgtggtaagatcaggttctactgctgggataccgcagggcaagagaagtttggtggcctcagggatggatactatatccatggccagtgtgcgatcatcatgtttgatgtaacctcaaggcttacttacaagaatgttcctacgtggcatagggacctgtgcagggtctgtgaaaacatccccattgtcctctgcggtaataaggttgatgtgaagaacaggcaggtcaaagccaagcaggttactttccacaggaagaagaatctgcagtactatgaaatttctgccaagagcaactacaactttgagaaacctttcctgtacctcgcaaggaagctggctggtgatccgaaccttcactttgttgaagctgttgctcttaagcctccggaagttaccatcgacatggctatgcagcagcagcatgaagctgagcttgctgcagcagctgcacaacctcttcctgatgacgatgatgatctgattgagtagaaaggatcatgagtctgg

SEQ ID NO: 28718 - DNA, 1612 bp, Zea mays
  Clone ID: LIB4762-083-E4_FLI
ctcgaggccggccgggatacttccccgagtcgccgtcgtctgctccgggctgctgttctgcgcctccacaaggctttggcctctgttgtaagatttaagcttaacctccaaccatgggtaaggagaagtcccacatcaacattgtggttattggccatgtcgactctggcaagtcaaccaccaccggccacctgatctacaagcttggaggcattgacaagcgtgtgattgagaggttcgagaaggaagccgctgaaatgaacaaacggtccttcaagtacgcttgggtgcttgacaagctcaaggctgagcgtgagagaggtatcaccattgatatcgctctgtggaagtttgagaccacaaagtactactgcactgtcattgatgcccctggacatcgcgatttcatcaagaacatgatcacgggtacctcccaggctgactgtgctgttcttatcattgactccaccactggtggttttgaggccggtatctctaaggatggccagacccgtgagcatgctctccttgctttcacccttggggtcaagcagatgatttgctgctgcaacaagatggatgcgactactcccaagtattccaaggcccgttatgatgagattgtgaaggaagtttcatcctacctcaagaaggttggatacaaccctgacaagattgcctttgtccctatctctggttttgagggtgacaacatgattgagaggtccaccaaccttgactggtacaagggtccaaccctgcttgaggctcttgaccagatcacggagcccaagaggccttcagacaagcccctgcgtctgcccctccaggatgtgtacaagattggtggtattggaactgttccggttggtcgtgtggagactggtgtcatcaagcctggaatggttgtcaccttcggtccaactggcctgaccactgaggtgaagtctgttgagatgcaccacgaggctctccaggaggcccttcctggtgacaatgttggcttcaatgtgaagaacgttgctgtgaaggatctcaaacgtgggtacgtggcctccaactctaaggatgaccctgccaaggaggctgctagcttcacctcccaagtcatcatcatgaaccaccctgggcagattggcaatggctatgccccagtgctggactgccacacctcccacattgctgtcaagtttgctgagctcataaccaagatcgataggcggtctggcaaggagcttgagaaggagcccaagttcctgaagaatggtgatgccggtatggtgaagatgattcccactaagcccatggtggttgagaccttctctcagtatcctcctctgggtcgttttgctgtccgtgacatgaggcagacggttgctgttggagtcatcaagagcgtggagaagaaggacccaactggtgccaaggtgaccaaggctgcaataaagaagaaatgatgcgtcctcccatgtgccctcgtttattttgtacttgtgcccgtatacttcgatctgttaaaatctattggttgtgtgccctgtgtctgttgtttgggtatctatactgttattttgagacacggttgatttgcatggtcatctggattgggtac

SEQ ID NO: 28719 - DNA, 1151 bp, Zea mays
  Clone ID: LIB4763-001-F1_FLI
atgagatttggggtcggtggcccatggtctagtcccgaaatttgcagcctgcatccacgagagctacgaccagcggccagccccccctttcggcctttccctcccatatactcgccgtcggccagcggatctaatcggggcgggcgcgatggctgggcagaaccagcggctcaacgtcgtgccgacggtgacgatgctcggcgtcatgaaggcccggctcgtcggcgcgacccgcggccacgcgctgctgaagaagaagtccgacgcgctgacggtccagttccgcgccatcctcaagaagatcgtcgccgccaaggagtcgatgggcgagacgatgcgcgcctcctccttctccctcgccgaggccaagtacgtcgctggcgacggcgtccgccacgtcatcctccagtccgtccgcgcggcatccgtccgcgtccgctcccaccaggagaacgtggccggggtcaagctccccaagttcacccacttcgtcgaccccgccgcggcctccggggccccctccaacgcgtccccgagcctcacgggcctggcccgcggcgggcagcaggtcgccgcctgccgctccgcgcacgtcaaggccatcggggtgctcgtcgagctcgcctctctgcagacctccttcctcacgctcgacgaggccatcaagaccaccaaccgccgcgccaacgcgctcgagaacgtcgtcaagcccaggatcgagaacaccatcagctacatcaagggggagctcgacgagctcgagcgcgaggacttcttcaggctcaagaagatccagggctacaagaagagggagatcgagcgccagatggccgccgccaggctatttgcggaggaacagcttgccgaggatctcgcgcttaagaggggtatctccgtgggggctgcggcaaacccgctggttgctggtggggataaggacgacgacatcatcttctgaccactccttccatggccatccagtcattcaatcgtggcagaaacaataagttgatgctggagctccagaattgtatctgtttatagaatgatggagattttgattcagtaagtagtctggagtctagccatccgagaccctcaataatctgtacctggaaaccaaacagtgccaaataacttttacggagcgc

SEQ ID NO: 28720 - DNA, 1839 bp, Zea mays
  Clone ID: LIB4763-001-G4_FLI
acagaccgcactttctctggcagaccgtgttctcccgctccgatccgcaagagcaaaccctagccaatggacgccgccgccgttcacaagcgcaagcgacctgaagaggccgacccaagcgcgggggagctcgacctctccgccgccgacgccgtcgaggtactcgacctccgggccgccaaacgcctccttctggccttcgagcgccgcctccgtgacaacctcgaggcgcgcatgaaataccccgacgaccctgcccgctttgcagactccgagatcgcgctccacgccgagaccgaccgcctccgcctccttgccggcgcgcctgagctcttccccgacctcgtccccatcggcctcgcctcttccctcgcctcccttctcacccacgacaatgtcgatctcgcagctgccgccgcatcactcctcgccgacctcaccgactccgaggacccctccgacctcgccgctgtccaggccctcgccgacgcgctcgtcgacgccaacgcgctcgacctcctcgtccacaatctctcccgcttttccgagaccgaccccgatgaggccgaggccgtgcacaacaccctcgccgtcctcgagaacctcctcgacctccgccccaacctcgccgacaaagtctgcggcggaaccaagcttctacgatggctcctctcgcgcgtcaaggcacgcgagttcgacgccaacaagcagtacgcctccgaaatcctcgcgatactcctgcagaacagccccgccaatcagaagcgcctcggccagatcaacggagtcgacgccctgcttcaggcggttgccatgtacaaatcaagggacccaaagacgtctgacgaggaggagatgctcgagaacctcttcgactgtctctgctgcgtgctcatgcccctggagaacaaggagaggtttgtcaaggctgaaggtgttgagctcatgatcatcattatgaaacagaagaagctggcatacagctctgcgacccgcaccctcgattttgccatgaccaagttcccgcctgcgtgcgaacgatttgttgatgtgcttggccttaagactgcttttgcggccttcatgggcaagattcccgtgaacaagaaaaacaagaaagagagttaccaggaggagctagaagagcgtatcatttcacttattgcttcattgtttggtggtattaccaaaggctcacgaaggatgaggctactaggaaaatttgttgagaatgaatgtgaaaagatagaccgccttatggagttatacacaaggtattcagacagagtgaaagaagagactgaaagacttgatagtcttgatttggaagatttagagatggacgatgatgagcggtataaccgaaaactcgaagctgggctttacacactgcagttaattgcgcttattctgggacacatctggcactctgggaattcccagatgagagcaagagtagaattacttcttaagcagaacaaacttacaaagcaagatgtgaagagcatacttgaggagtaccatgacaacattggagatttggatggacctgaagagaaggaaagagcacaagtgcggaccaaggaaattattgacgcgttgtgatgtgcatgggcctagggtagttggttgtggagcaagacagaggctggtagatattttgagtatgttgagtgaatttatatccgcagtcagcaaagctgtgtaacttactaggttgtagatgatggatgtcagaaacaagggtgcattaattagttctgttgtattctatttttgtgtaaacttgctagttactatttgtcgttatatgctttgggaaggaatttgtaacaccac

SEQ ID NO: 28721 - DNA, 1315 bp, Zea mays
  Clone ID: LIB4763-002-A5_FLI
ctcgaggccggccgggattccccgtcttccttgtttaccattcctccccaaaacacatcctgcgatcctcgaagcctccgccgagcatcgatcatgtcggcctactgcggcaagtacgcggatgagctcatcaagaatgctgcctacatcggcacccctggcaagggtatccttgctgctgatgagtcaactggcaccattggcaagcgcctttccagcatcaatgtcgagaacgtggaggagaaccggcgggctctccgtgagctcctgttctgctgccctggtgccctccagtacatcagcggtgtgatcctcttcgaggagaccctctaccagaagaccaaggatggcaagccttttgtcgatgtcctcaaggagggaggcgtcctccctggcatcaaggtcgacaagggcaccattgaggttgttggcaccgacaaggagaccaccacccagggccacgatgacctcggcaagcgctgcgctaagtactacgaggccggtgcccgctttgccaagtggcgtgctgttctcaagattggccccaacgagccgtcacagcttgccattgacctgaatgctcagggtctggctcgctacgccatcatctgccaggagaacggtctggtgccaattgttgagcctgagatccttgttgatggccctcatgacattgatcgctgcgcttacgtcactgagacagtccttgctgcctgctacaaggctctcaacgagcaccatgtcctcctggagggtaccctcctgaagcccaacatggtgactcctggctccgactctaagaaggtgacacctgaggtgatcgcccagtacaccgtccgtaccctccagaggaccgtccctgctgctgtgcctgctgttgtcttcctctctggtggacagagcgaggaggaggccaccctgaatctcaatgccatgaacaagctcagcaccaagaagccatgggccctgtccttctccttcggccgtgccctccaggcgagtaccctcaaagcctgggctggcaaggtggagaacgtggagaaggctagagcggccttcctcgccaggtgcaaggccaactccgaggctaccctcggcacctacaagggtgatgctgccgccgacaccgagagccttcacgtcaaggactacaagtattgagttgcttctctttgcgatcccgttgttttgaaactcctgcctgcgagtaggttgctgagtgttgtttgcttgttagagcttttatattcgaacataaaaaaaacatgcttcctatgtggatgatggttatctttatattcgtatattaactact

SEQ ID NO: 28722 - DNA, 1622 bp, Zea mays
  Clone ID: LIB4763-002-H6_FLI
ccgggctctgaccactgacgcgtggcccattcttcccttcatcaaccacgcggcgccggagcgagcctcctctagtctagcgccgcctagggtttctcctccgccgtgtcgtcaccgtccacgcgccattgcaccatctcgatcgcgcgtcctccctgccaacttgcagctttcactgattcaggaccaggtacccgtcactattatgctcccgccgagcgatgcgtagaagtcgccgctcgcaggtctcgctcttccctacttttcccgccggcccgctgttccaggcaatggccaaacttccgttccatcaggtcgaagcctaacgaaaacatgaggctcgttgtagtaacgatcgttggtgcggtatttggattccttatcggaatctcgttcccgacagttaacataacaaaacttcactttccatctagcatcgtctcctacatagaggacaagaactctggcatctcagctcaagctatacttaaccatgcttggactgcggccaggaacgcaaggggaaatggctcccaaccaatctcacttgacaacttcaaggtctatgtaccaacaaaccccaggggtgcagagagcctagcgccaggtattgttgtgccagagtctgattttcatcagcacaggttatgggggaacccagatgaggacttacccttcaagccaaagtaccttgttacttttactgttggcatttcacagaaagataacataaacagggctgtcaagaagttttcgaaggattttgcaatcctgttgtttcactatgatggccgggtgactgaatgggatgaatttgagtggtcaaagcgagctatccatgtaagcgtccggaaacaagcaaagtggtggtatgctaaaagattcttgcaccctgatatcgtggcagcctatgagtacatatttatctgggatgaggaccttggagctgatcattttaatggagaggagtacattaaacttgtgaagaaatatagactagaaatctcacaacctggtctagagccagataggggattgacatggcagatgaccaagagaagaggtgatcgtcaagttcacatggttacagaggagagagaaggctggtgctctgatcctcatgtccccccgtgcgctgggtttgttgaaataatggctccagttttctccagagatgcgtggagatgtgtctggcatatgattcagaatgacttagttcatggatggggtctcgatttcgctctccggaaatgtgtggagcctgctcacgagaaaatcggtgtcgttgattcccaatggattgtacaccaagtgattccttctctcgggaaccaggggcagtcggagaatgggagggcgccatgggaaggggtaagagagcgttgccggagagagtgggggcttttccagacaagaatggcagaagctgagaaagcatattacgagatgatggggattacacctccgaatgtaacatttgtctcctaggataaaagtttcaacccacatttttttttcctttgtgtccagcagtggctcttcgaatagagttagctattgatgaatggcacaagtagatcatacgtgacgatatatatacatatagatcctttgatccttcg

SEQ ID NO: 28723 - DNA, 1615 bp, Zea mays
  Clone ID: LIB4763-003-A10_FLI
tggagatccacactttcctccctccatcgtttctcgatctctcgaccgggcgagggcgacgccgcccgcgcgcgcgccatggatgtggagtacgacgtgatcgtgctgggcaccgggctcaaggagtgcatcctcagcggcctcctctctgtggaccgcctcaaggtgttgcacatggacaggaatgactactacggcggagactccacatcgctcaatctcaatcagctctggaaacggttcaagggtgaagaaacaccgcctgcgcacataggagctagcagagactacaacgttgatatggttccaaagtttatgatggcaaatggtaccttggttcgtgtgctcattcatactggtgtcaccaagtacatgtccttcaaagctgtggatggaagctatgttttcaacaagggaaagatccacaaggttccttctactgacatggaagctctcaagtctcccctgatgggattgtttgagaagcgaagagctgggaaattcttcctttatgtccaagattataaggaaaatgacccaagtactcataagggttacaaccttactaaactaacgacaaaagaacttatctcaaaatatggtttggatgataatacgatagacttcattgggcatgcagtggctcttcatagagatgatagctacttgacagaacctgcaattgacactgtaaaacggatgaagctttatgcagaatcagtggctcgctttcaaggaggatcaccatatatttatcccttgtatggtttaggagaactgccacagggttttgcaagacttagcgctgtttatggtgggacctacatgttgagtaagccagagtgcaaggtcgaatttgatgatgaaggcaaagtttgtggtgttacctcagaaggggagactgcaaaatgcaaaaaggttgtctgtgatccttcctacctacctgacaaggttaaaaatattggaaaagtttttcgggcaattgctatcatgagccatcccatcccaaatactgctgaatctcactcagtacagatcatattaccacagaagcaacttggccgcagatcagacatgtatgttttctgctgttcctactctcataatgtcgcatcaaaaggcaaattcatcgcattcgtgtcagcacaagcggagactgataatccagagaaggaactaaagccagggatcgatcttcttgggaaggtggacgagttatttatcgacatatatgacagatatgaacctaccaatgactcatcagcagacaattgtttcatctcaacaagttatgatgccacaacacactttgagtccactgttatggatgtactttccctttacacaaagatcaccggaaagactgttgatctcagcgtggatctaagcgctgctagtgctgctgaagatgatatgtgttacttatcgtagtgctatgtggcgtagtgtggaaaatatttaattaagctttgctttggcaacgattattaggttcacctttatttttccaattgttgttattagctgtgttgtgaccatgattaaagattgcatgctgtaaatttgaaggcatttttttttatcaaaagttgttaacgcggtgatccgtgtttag

SEQ ID NO: 28724 - DNA, 1617 bp, Zea mays
  Clone ID: LIB4763-003-C11_FLI
ctcgaggccggccggggtccaggcgtccaccccaaaacaatcatgactcgtctctgtccccttcacctcctcctcatcgctgccgcggcggcgtctgccagcggtgccgacgaggcgcacgtctccatcgcggtcgcggagaagggcctggccttcgccaaggacgtgcttatcagcgaggccgtgcggtcgctgacccctcttcgcctccccggggtggagaaggccgtccgcgtgcccttccttggcggcatccgcgttgccgcctccaacatcacgctattccacctagacgtcggggacaactccactatcttccccggagactcgggccttctcgtcgtcgcctccggcatcaccgccaacatcagtatgcattggagctactgctacgattcgtggttgtttcccatagagatcaccgacagcggaacggcctcaatcctggttcaaggaatggaagttgggataaccatggttataaagaacaagaatgggagtttggctctgtctgtttcacagtgtggttgttatgtgaaggacctagtgatatccctggatggtggagcatcttggttttatcaagggtttataaatgcttttgaagatcatattaaagctgcagttgagaaggcagtacctgaaaatatcattgaaggcgctgggaaactggactcctttctgcaaggtctccccaggaccatcagtttggacgacgtcgcggccttcaacttgactttcattaatgatccacactatggcaattcttcaattgagttcgatatcaatgggttgattacttcagcggttgctgagacagccaatctgcagaagcatccacaactttctttggcttgtggtggtgcatcaaaaatgcttttgctctcacttgatgaagatgtattcaattcagcactagaagttcattttaaggctggttcaatgcattgggttgttgacaaagtccctgatcaatctctactgaacacagctaattggaaatttatcattcctcgtttatactggaattacccaaatgacgatatactgctaaatatctcaatggcctcatccccggtgataagggttacatcagaaaaaattgaagctaccattaatggagacatgataattgatgttgtagataacaaggagatagttccagttgcatgcatctcagtgattgtcagtgcttcaggtgttgtggatgcatcaggcaataaagtatatggtagagttggattagataatttctcccttgcgttgaagtggagtaaaattggcaacttccatatgtctttgattcagggagtgattcgggttctcctgaacacagtatgcatgccgtatttgaactcacggcttgggaatggattgatcttgcccgtggtccatggtttcacacttcaagacgtctacgttttaacctctgctgagcagctgacgctttgttcggatgtcaccttcaacgcaagcagcatggcgagtttattatgatacagggaagtgcgtgtctggcgtatttcatttagcgttgaagtacaacactcgcacatatgtgtacattatattgtacatactacacaacatctcgttataaatattgtttacattcag

SEQ ID NO: 28725 - DNA, 1660 bp, Zea mays
  Clone ID: LIB4763-003-D5_FLI
ccgggacactatactatagtagccaaagcatcaacttcggcaatcatggaccacagtgtgtactactgccttgtagctcttcttccacttgtgtacttccttctcaagtcgtcgtggaagaaagctcccttcggatctggtagccgccatggactaaagctccctccaggcccatggcagctccctgtcatcggcagcatccaccatctccgtggctttctcgcgcaccacgctctgagggacctatcgctccgctatgggcctctcatgttcctcaagctgggcgagctcccagtggtcgtagcatccacgccggaggctgcgaaagaggtgatgaagacccacgacgccatcttctcgaccaggccactgagctcaaccattaggacggtctccaaggatggcctaggcatcgtctgggctccgtacggcgaccactggcggcagctccgcaagatctgcaccatgcagctgctcggcgcgcggcgcgtccagtccctgcggcccgcgcgcgaggaggaggcgttccggctggtccgagccgtcatgtcctcgtccaccgcggcaggaggagctgcgccgccgccgctcgtggacctcggcaagctggccgccgtgtacgtcgccgaggcgtcgttgcgcgccatcttgggcagacggttcaaggtcgaggaccgggacacgctgctgcgctacgtggatgacggcgtccggctggccggcgggttcacgcccagagacctgttcccgtcgtcgtggctcgtccgcgccctgacccaccgggccgtgcgcgaggtggatgcctaccgagactccttgttcgccttcatggatgtagtggtaggtgagcgcttggatcgacgaaggtcaactgaagaagaggaggaggagggagaggatctgattgacgttctcctccggagccacaaggaaggaaacctcccgttccctctcaccatgaggacaatcgaagcggtcatatttgatctgatcggagggggtatcgagacagcaacaacaacgctgcagtgggcgatggcggagctgatgaggaatccaggcatcatggccaaggcacaggccgaggtcaggggattgttcatgggccaaaccaaggtaaccgaagaccggctaggcgagctaccctacctgcagctggtcatcaaggagacgctgaggctgcatgtcccggggccgctgctgatcccaagggagtgccaggagcagtgccggatactgggctacgacgtgcccaggggagccatggtgctcgtgaacgcctgggccatcgctcggagcccggatcactgggaggagccggacgcgttcgtccctgagaggttcgtcggtgacgcgagggatttcaagggcaacgacctggagttcatcccgtttggcgccgggaggaggatctgccctgggatgtcgttcgggctggccaacgtcgagctcggtctcgccagcttgctcttctacttcgactggagtctcccggcgggcgtccttcctgctgagatggacatggccgagaccatggggatcactgctaggaggaaagcagacctcttcttgtctgctactctgagtgtcaaactgccttaattttcatctgatctgatggtactctatgcctatgagatatgcagtgactgttacggcg

SEQ ID NO: 28726 - DNA, 1573 bp, Zea mays
  Clone ID: LIB4763-005-B11_FLI
ccgggataccaccttctctctttccttcacacacgcagctcacgtacacgatgaccacaccgcgtcgcgacgggcagcaccacggcgacaagcgcaccgtgacacgagcagcctcccgaaacagcgacggacacggcgcaggcgacttgagcttcgggtccacggcggggcctcggttcgccgtcgccccgccgcgcccttgggcgccgccgcctgagcacgcggccgtcttcgtgcagccaccagacgatccgtcgacgttgatcatgctgtggggaccgcccggcgaggtgcccgttgccggcttcgctgcggcaccggaagggctaccggatgcgttcgctggcagcgcgtcgtgcctgccgctcgcgaggcaggtcggcctgcaagcggccggcggccagcagggggcgcgcaacttcgtggtgtcgccgctgtcgttccacgcggcgctcgcgctggtggccgcgggcgcgcggggcgagacgcagcgggagctcctgcgcttcttggactccgagtcgctgggcgagctgcaccgcgccgcggcgacggcgctggtcgccaggctcagcgacctcccgcagacgtccttcgcgtgcggcgtctgggtggaccggagccgcgcgctcacgccggagttcatggacaccgccgcgtcgcgctacgcggcggtcgcggagtccgtcgacttcttgaagaactccgaggcggcaaggcagcaaatcaacgccttcgtgaaaggggcaacgaaagggctcatcgacgacgtcctgcctcccggctccgtcgactcgtccacggcgctcgtcctcgccaacgccatctacttcaagggggcgtgggctcggccgttcgatccgtcgagaaccatcttcgcgccgttccatctccccgacggcggcaccgtgcgcgtgccgttcatgactacgactacgagtggtttcgaggaccagcgggttgccgtgttccccggattcaaggcgctcaagctgccctacaagaacgacggcggcgcgcagcaggacgcgttctacatgcttctactcctccccgacggtgagaccctaaccctcaatgatctctatgataaggtcgtgtcgtcgccgggattcatcaggaagcacacgccggtggacgaggtcccggtcgggcggttcatggtgccgaagttcaagttcacgttcgagtttgaggcgtctcacgatatccagaagctgggagtcaaccgagcctttcaaagcggtgacttctccggcatggtctccggtggaaacgggctcatcatctcaggagtgtaccacaaagccaccgtagaggtggacgaggccggcaccgttgccgccgcggccacggccgagttcatgtttatgtgtgcaagaatgcatccaccgccggtggatttcgtggcggaccggccgtttttgttcgccatcgtggagagaagtggcgtcgtgctgtttcttgggcatgtggtgaaccctctagttgggtgatgatatcagtgacagtgttggagacctttctcttccgaatatccttaaaaatatgattaattatctgtttttagtat

SEQ ID NO: 28727 - DNA, 1765 bp, Zea mays
  Clone ID: LIB4763-005-C8_FLI
ccgggatcatcgagtcatccatctaaacatccgatccgaccatggcggcagacgcacttcggggccttctccccggcgtttacgccgtgctgatggtaatcgccgtcacaagcgccgcctccagcgacgcgtcctcggtggtcgtcggcctcgccaaatgcgccgactgcaccaggaagaacttgaaggccgaggcggcattcaagggtcttgaggtggcgatcaagtgcaagaacagcaaaggcgagtacgagagcaaggccatgggcaagcttgatggcttcggcgccttcagcatcccacttagcacggacctccacggcgctgactgcgttgcacagctccacagcgctgcggggaacccgtgccccggtcaagaaccttccagaattgtgccacaatcgtcaaagggcaacttcgtcgtggtccctggaaagacagactacccatcgaaggaatgtgcgtccgcaaccctgtgtgggtcgatcaagaagcacctactagaccatttccacaagaaacctgtgccaccaaagccaaagccagaacctaagccagagccggagccgaagccagaacctaagccagagccagagaaccacccacctacaccaacatatggatcctcaactccgatctaccatcctccatctaggcagttgtttgacaagaaacacatgtttgatcacttccacaagcaccacgactaccatcacttctttgaccacttccacaagaaaccagttccaccaaagccaaaaccagaacctaagccagaaccaaaacccaagccccagccagagtaccactctccaactccaacatatgggtcgcccacaccgatctaccaccctccggctaggcatttgtttgataagaagcccttgctagatcacttccataaggaccatgactatcaccacttcttagaccacttccacaagaaacccgtgccacaaaagccaaagccagaacccaagccagaacccaagccacagcctaagcccgagtaccaccctccgacacccacatatgtttctccaactcccatctatcacccgcccgctgagacagaaatgaagtatgacaagaagcacttctttgatcactttcacaaggaccatgactaccaccacttctttgaccacttccacaagaagcctgtgccacccaagccaaaaccagagccagagccaaagccaaagccacaacctaagccagagtacaagccccccatgcccacatacgggtctccaactcctatctaccatcctccagccaagaaagaagtggcatttgacaagaagcacttccttgatcacttccacaaagaccatgactaccaccacttctttgaccacttccacaagaagcctgtgccaccaaagcctaagccggagcccaagccagagcccaaaccacaacctgagcctgagtaccacccacctacaccgacctatggatcaccgactcccatctaccaccctccggccaagcattgatcgatggagttgaatggtggtcagtgatcgacgttgctagctaagagttgcatgtgtggtctagccaacgtggtttgcagtcctgcttttttgtttctacagaataaattatagctttatttgggtatgtatacttatttgtgtatcggttagtatcatataaatgtatgatttgagtgtgcgttgtttttaatatgcatgttctatgatgtactttattccttttaaaatattattatttatatgtagaagttaaaaggctg

SEQ ID NO: 28728 - DNA, 1379 bp, Zea mays
  Clone ID: LIB4763-005-G4_FLI
ccgggccatgtcagacgacgcgccatcgcgcctccaccaccccgaccctgaccccgaactcgccgtcgcaacaggccaagacgcagcagtagaagcaccaccaccaccaccaccggcacacgaccccggcggcagcgagtgccggttctgcgagatgacgcggcagcaccagccgcagtgcgcgcggcggctgccgaagcgcatcatcctggtgcggcacggcgagagccagggcaacctggacatgtcggcctacaccaccacgcccgactaccgcatcccgctgacggcgctgggcgcggagcaggcgcgcgccgcggggcagcgcatccgcgacgtggtggcgggcagcggcaactggaaggtctacttctacgtgtccccctacgcgcgcacccgcgccacgctgcgcgagatcggccgcgccttcccgcgggaccgcgtcatcggcgcccgcgaggagtgccgcgtccgggagcaggacttcggcaacttccaggtggaggagcgcatgcgcgccgtcaaggagacgcgccagcgcttcggccgcttcttcttccgcttcccagagggcgagtccgccgccgacgtcttcgaccgcgtcgccagcttccttgagtcgctgtggcgggacatcgacatggggcggctggaccaggaccccagctgcgagacgaacctggtgatcgtctcccacggcctcacctcgcgggtgttcctgatgaagtggttcaagtggacggtggcccagttcgagcgcctcaacaacttcgacaactgcgagttcagggtcatgcagctgggccccggcggggagtactccctcctcgtccaccacacccaggaggagctccagcagtggggcatgtcgccggagatgatcgccgaccagcagtggcgcgcctccgccaaccgccgctgctgggccgaggagtgctcctccttcatcgacaccttcttcgaggagccctacggctcgtcggagacctcctcctcggacgaagacgaagcagaggacaaggaggaggagaccaagctgctggagcaactataactggtttcatccacatccaatccacccattcgcctcgtcctttgaaattctctccattggattggatcttataccatgtgggaagagcggagcagtgatgctgcattcagtcatcgctgatccctctcttattcgaaaacagtctgtagcatgttcataatagctattagctagaactagaaatgattcgagggcaatttcagaaaatgctaaagaaacatatgctgtatctcaaggttttagctctgacatgattctgtatgttcctagatataagaacgcatactattcaaaataaaatgctcagaggagataaatttgtctc

SEQ ID NO: 28729 - DNA, 1576 bp, Zea mays
  Clone ID: LIB4763-006-A5_FLI
ccggggagactattgttttcgagattgctagcgaaaagcatctcaatccctgaatcgcacacccagccagaacgaacgccagaaggcccagaaccgctacctcctccaatacactttcgtggctccgccgcagcacgaaaccctagcttctgcatctccgccccctccacctcccctccgcgaagcaggcgagatgtcgtcgggcggcggtggggggcagcagttccgctacacgcagaaaaaaaaaaaaaagacttgttcggcctcttcgacggcgtgcccgtctccccgggctcattcgccatgcattcctcagcctccgcgagaggaggacgagggctcctcttgccggcggctgcggcggcggttgtggtgctactgttgggtgcagtggcgccagcggcgggttgctatccgcgcgtgttcaacttcggggactctctggcggacacgggcaactacccgttcgtctatggcaacgactcagccaagctccggccaccctacggcgagaccttcttccaccgcgccaccgggcgcgcctccaacgggcgcctcgtggtcgacttcatcgcggacacgctcggcctcccgttcgtgcgaccgtatctgagcggacggagcgcggaggacttcgcgggcggggccaacttcgccgtgggcggcgccacggcgctcagcccggacttcttccgtgcaagggggttccacaacatgggaaaccgagtggacctcgacatggagatgaagtggttccgcggcctgctcgacctactctgccccggcaacctcgccggttgctcggatatgatgaaccaatctctcttcttagttggagaaatcgggggcaatgactacaacggacctcttctttctggagttcccttcgaggaaattcgcgccatcactccgagtgttgttgcgaaaatttcttctacaatcagcgaattgattcagctaggagccaagactcttgtggttccaggaaaccttcctattggatgtgtcccaaaatatctgatgatattcaagagcaataagaaagaggattatgatccacagacaggttgtcttagatggatgaacgagttctcacagtaccacaacaagcttcttgtggagcagctcaagaagcttcgcaggctccatcctggagtaaccatcatctatgctgattactatggagctgctatggaaatattcctttcccctgaacatgggatcgaatatcccctagtggcttgctgtggtgcagaaggaccctacggtgtgtccccaactacaagctgtggattgggagaatataagctgtgcgataatccagaaaggtatggatcatgggatggcctccatccaacagaatctgcatacaaggtcatcgctatgggcctgctactaggttcctatacaagaccgccaatcgcttccaccaccacttcatgtccacagcttatggagctcggctcttctgctgaatacaaacgcctctacgacctgtaataatttatgtaattatattttattgtatgtactccctcgcccacttcaataagtcccattttgcgagtaaaaaaag

SEQ ID NO: 28730 - DNA, 1428 bp, Zea mays
  Clone ID: LIB4763-006-D11_FLI
ccgggatacgcacgtactcctgtatcgcatagccgctgccccgaagccacctctttgtgcctccacttgcgtgccgctagccacagccgctcgtcgatctgagctgccgccgccgccgtcgttcgccgattggagccaccgccgtcacccagtcagtggccgattggagccgcctccgcgaggcctgtggtcgtcagcccgtcagccgccgattggagccgccgctgcgagagaagcatgcagtcgtgcaagtcctgtgatcctaactgattatgcactccaatgggctgcggagcacaaaggggagaaaaacaaaaacgagtgggaggtggccgtgggccatgttgctgctgctgacgaggcggcgcgacccatagtaaaggcgtacaacagctcacctccctcgtccagctccagccgccgtcaggcttctgacgcaacttctaactccgttcgcctccaggcgacaccgtcgcccgctggcacgccgccactgcaggttaacacaatttgacccggagcttagttaaatcctgcttccgccactgcggacaaccatggcgtcgtcgaagctgcagctgcctgctgacgacagcgtcctcctgctcatcacccactccaatctcaccaccttcgcagcggacatccgcgtctcgcaacagaccaccgtggaggcgctcaaggacaagctctggcgcaagaccggcaccaccgtcgcttccatgcgcctccagctccgcgacgactccggcaccaagatcgccgacctcgacgacgacgccgcgccactcgcggcctacgccccctacaacggctaccggatccatgtcgttgatctcgacccttcctcactcacctcagggggttggttggaagacacttcccttgtcgacaagtacaaaatgtccgatgaaacatacgataagctcgacactaactttcgaaaattcaaagaaaagatggtcccgaaaaactctccgtcagaggataaagaagaatcagaaaagcatatggaggaactatgctccaaaatcaaggtgggtgatagatgtgaagttgagcctggtgccaagaggggcactgtaaaattcgttggtagagctgaagcccttggacgtggattctgggttggagtgcaatatgatgagccacttgggaagcatgacggcatggtgaaaggcattcgcttctttgagtgccctcaaggtcatggggcaattgtgaggccagaaaaagtaaaggttggcgacttcccggagagagcatttgaagacgaggacgatgacgagatttgagtgcgtgtgcgtttggaaaagcaaggggaatgtccttgttgaattgcattcgaaacgtgtgtaaaatgaattcggagatttgagtgtgcgcgcttgcttgcatcttcttgggcaatcatattgatcacattcc

SEQ ID NO: 28731 - DNA, 1016 bp, Zea mays
  Clone ID: LIB4763-007-C11_FLI
ccggggacaagtgaaaatacccgttgggctcggctcgcgcggcgccgtcctctcccactctctacgcacgaacacagcacgcgccgcaccccgctctctctctcctgcgttcccatctgcggcggggagtgagcacattgaggacggtctactcctcgttcgcgtgcggttcgtcccgagcgatccggcaaccatgaacatcttcaagaagaaggtcgaccccaaagaggctctcaggaccagcaaacgtgaaatggcggtcgccacgcggggagttgagagagagattggttccctgcaaatggaggagaaaaagctggttgcagagataaagaagactgccaagactggaaatgaggctgcaaccaaaatattagctcggcaacttgtcaggctgaggcaacaaatcctcaatttgcaaggcacacgggcacagattcgtggagtagctactcacacacaggcaatgtatgctggcacttcaatctctgctggaatgaaaggtgcaagcaaagctatgtcagcaatgaacaagcaaatggaaccggcgaaacagataaaggtcatgaaagaattccagaaacaatcaacacagttggacatgacgcttgagatgatgtctgatgctattgatgaaacacttgacaaagatgaggcggaggaggaaacagaagagcttacaaaccaggtccttgacgagattggcgtcgatgtggcttctcagctctcttcggctcctaaagggcgcatcggagctactaacaagaaagtcgataatggtcaagcacgtcctgcaaggaacgtggcggctcctgctctagaaccctcctctgctgaagttgaggatctggagaggcgactggcatctctgcgccgtacctgagtctgagctgttgaagaaagaacttgtttgtaatactagcagttattcatctatatatgtaaagttggtttatatgtgtagggaaaacagcgagctgcacatgatacggttgaacctacttaatgttttattc

SEQ ID NO: 28732 - DNA, 1417 bp, Zea mays
  Clone ID: LIB4763-007-E6_FLI
ccgggggtttgactattttgcccccgccgcgtgagttgccaaacgatttccgagtcttctgacactccttgccgccgccgccgccgcctgccgcctgctgccgacggcaatagatttggggatggatttgggctcgtgctacctcggtgggaacgccgacgcggtggagttctgtccgcaccgcccgttccgccacgtgctggccgccgccacctacacgctgcaggagcaggagcgcgaccgggcgggcagcatatccctcttctcagttgacgttgcctcggaggacgcgtcccggaggctccagctgctgcatactgtggagaccgccggcatcttcgatatgaagtggagccccaagtcgccgctgctcgcgcaggccgacgcccacggccgcctcgcgctccggcgcttggagcaggaggacggctcggacacaggcattctcctcacagatgtctctgctgaagatatttcttcttcaatgtgcttatatgtggactggaaccaaactgcggagtctctgtctgttggattatcagatggctcactgtctctggtttcagtgagagaggaccggctggagatatcacaacagtggactgcacatcagttcgaagtctggacatgctattttgatcgtacaagtccacacttgctgtacagtggatcagatgactgttgtttcagttgctgggacttgagagaaagcccaccaaacattgtttttcaaaacaaaaaatctcataagatgggtgtctgttgtattacacagaatccgttggagtggaacatgctacttactgggagttatgatgaatttctcagagtttgggacatgagatttatggcaaaacctgtcaatgaaaagttgataaatctaggaggtggtgtgtggaggatgaagtatcatcctagtattgcagatgttgtattggctgcgtgcatgcacaatgggtttgccattgtaaaagtaggttctggagatgctacgataatggaaacatattgcaagcatgagtccttagcatacggtgcagattggcagaaaagtgaagaggtggagcaaaatggaaattcttcagttgttgctacttgttcgttttatgatcgcctcctccgcgtgtggcaaccagagaacctagctgagctttaaagacttaaagcttttttgaattgaattcaagcatgactaggccatgaatctatttcctgaatgaaccagtataatttcattcaggtagttctttgaacttatgcttacatattcaagacttcaagtcatgcatgagcttatagggactttatgtttattttcaattagtctcattgatatatttgttaccgacttccttaccgcaaaaccttgagttttccttttgatgccaagctattagaagatcttttgtgttggtct

SEQ ID NO: 28733 - DNA, 1211 bp, Zea mays
  Clone ID: LIB4763-007-H7_FLI
ggagatccgtccctgtttgccgctgtgtttagctctcttccccgcaaggatccatcgatcggtcggacaggataagacatgggtcagattttgggtttagttcaggttgatcagtcaactgtagccatcaaagaaaattttggcaagttcagcgaggtcctggagcctggttgccacttcctgccctggtgcatagggcagcagattgctggttacctctccttgcgtgtgcgccagctggatgtccgctgcgaaacaaagacaaaggacaatgtctttgtcactgttgttgcatctgttcaatatcgcgctcttgctgataaggcatctgacgccttctacaagctgagcaacaccagggaacaaatccagtcatacgtatttgatgtcatcagagctactgttccgaagctgggcttggacgatgcatttgagcagaagaatgagatcgcaaaagcagtggaagaggagcttgaaaaggcaatgtctacttatggctatcagatcgtgcaaacgctaattgttgatattgagcctgacgaccgcgtcaagagagcaatgaacgagatcaatgcagctgctaggatgagggtggcagccagtgagaaagctgaggctgagaagatactccagatcaagaaagccgagggagaggcggaatccaagtacctggctggcgtgggtattgcaaggcagcgccaggccattgtggatgggctgagggacagtgtgctcgccttctcagagaacgttccaggcaccactgccaaggacatcatggacatggtcctggtcacccagtactttgacaccatgagggagattggggcctcctccaagtcctcttcggtgttcatcccccacggtcctggagctgtcaaggatgtctcggcgcagataagagatggcctcctgcaggctaatctgcactgagggtaccctgagaaaacgaaggattcagagggatgagggcatcggtcctatgatgctataaaattgtcaattatagactatatatgatatatagaggcaggcttgattgatttgtaaaagcatagttaagcaccgattgagctataagtgcacttgtgagtgagcctgggtatccaaacctgtcagctatttggtatgtatatgttctgcgtgcaaaatcctactgtagccatagcgttgaacaggaagaattgtaaatggatttggtgagtttatcg

SEQ ID NO: 28734 - DNA, 1563 bp, Zea mays
  Clone ID: LIB4763-008-H12_FLI
aaatccgcctcgcccgcagcgcccctccacttcctctctctctctctcacggcggcggcgagaccgcgagatgaaggttacggtaatgaccggcgacgagcagatcgtcaccctcgacgtcgaccgcgacgaatccgtggaaaatctcaaggcgctactcgaagtggagactcgggtgccgctgcggcagcagcagattcacttcaatgggaaggagatgcagaacacggagaagctcagcgccgctggggtccaggacggcgaccttgtgatgatgttttccaccagcgaaaggccatctcaggatggcttaagggtaaatcctgatggaactgctgtgaatcctcaagcttttcaacaacatgctcgaggtgattcacaacttatggcacagctccttcagaatgatcctcaactagcacaagctatccttggggatgacaccactgagctacagaatatcctgcggtcccgccaccaacaaagaacagaactaaaacgtaaacaagaagaagagcttgctttattgtatgctgatccttttgatgtggaagcccagaagaaaattgaagctgcaatccggcagaaaggcatagatgaaaattgggaggctgcattagagcacaatcctgaagcatttgcccgagtggtaatgctatatgtggatatggaggtcaatggtgtacctttgaaggcttttgttgacagcggagcgcaatcgactatcatatcaaaaagttgcgctgaacgttgcgggttgctgaggcttcttgatcagcggttccgagggattgctgttggagtcggtcaatcagagatactaggaagaatacatgtagccccaataaagattgggaatatattctatccttgttctttcaccgtattggatgctcctaatatggagttcctattcggacttgacatgctgcgaaagcatcagtgcatgattgacctaaaggacaatgttctcagagtggggggtggcgaagtttcagtgcccttcttacaagagaaagacatccctgcacacatacgcaatgaagagaaactgtctaagttagggtctctcagccaagcaactggagagtcatcaaggacacgtgagggtactcccaatgcgctacaacaaacccctcctccaggagctccagctgcaaaccctccacagcagggaggcgattttgaagcgaaagtcacgaagcttgtggagctcggttttgacagggcgtcggtgacacaagcgctcaagttgttcaacgggaatgaggagcaagctgctgcgttcttgtttggtggttagactggtgggagcagccgttcctggctttgtgttcgctcaaccccttccagggttgagtacttgaatatttgatacgaaagtgattaaagtatttggatactgtttgtccagtgaaaggacttacttttagaggttttatgttttctcttgtttctgagaacaaacatttgttttctgtacctgatacatagactgatagacaccagaattgagacagaactgtgaagattttttttttattaagagtgtttatttgagct

SEQ ID NO: 28735 - DNA, 2841 bp, Zea mays
  Clone ID: LIB4763-010-C6_FLI
ccgggatcccatcccacccttcccatatcccaccaccacctcctctctcactacctatctgccatcccgagtgattgtctgtgcgaccaagacatggcttctgacggcggcggcagctcccctcctcccgcatcgtcgccctatggtcggccgtcaagcccactcgcggttactaactcctccccatctcagcccacacgccgccccggcggtcgccgtcgccgtggttccgctagtccttatgcttcgtccccttctctcggggggttcgagacgccgccgcaccctggccgccgcacgccgtccggagctggggctggcgcccctcggcagccgcgtcagaactcgactggccggttcccgccgacgccctccactccaatgtccaccgatgacgtccctccatcctccgaagctggggacgacgagaccgacggcggcggcggcgtcgacgccaccccggtcttcgtctggggcaccaacataagcgtgcaggacgtcaacgccgccattctccggttcttgcgccacttccgggacccgcgcgacgctggccgcgtcgacccggtcatggacgagggcaagtacatgcgcgccatccaccgcatcctcgagctcgagggcggggagtcgctcgacgtcgatgcgcacgacgtgtttgaccacgacccagacctctacagcaagatggttcgctatccgctcgaggtgctcgccatcttcgacatcgtgctcatggacctcgtcgcgcgcatcgagccgctcttcgagaagcacatccagaccaggatctacaacctcaagtcgtccatttgcttgaggaatctcaacccatctgatattgagaagatggtatccatcaagggtatgataattagatgcagctcggtcataccggagctcaaggaggctgtgttccgctgcctggtttgtggtttctactcagagcccgtcatggttgatagaggaagagtaactgaaccacacatttgtcagaaagaacaatgtaaagccacaaattctatgaccctagtgcacaacagatgcagattttcagacaagcagatcataaagttgcaggaaacaccagacgagataccagaaggtggcactccacatacagttagtgtcttgatgcatgataagcttgttgatgctggaaagcctggagatagggttgagataactggaatatacagagctatgagtattcgaattggaccaactcaaaggacagtgaagtctatattcaagacatatattgattgccttcacataaagaagacagacaagtctaggcttcatgtggaggacaccatggatattgataattctaacgctagcaaatctactgaagaggattttcttagtgataaggttgagaaactaaaagagctttcgaagttgcctgatatctatgaaagattgactagatcattagctccaaacatatgggagttggatgatgtcaaaagaggtctcctttgccagcttttcggcggtaatcccttgaagcttccttctggagctagtttccggggtgacatcaatattttacttgtgggggaccctggaacaagtaaatcccagcttctccagtacatgcataaactgtctcctcgtggtatctatacgagtggtagaggaagttctgctgttggtcttactgcttatgttaccaaagaccctgagactggcgaaactgttctagaaagtggagcacttgttttgagtgacaaaggtgtttgttgcatagatgagtttgataagatgtctgataatgcccgaagcatgttacacgaggtgatggaacagcagacagtatccattgcgaaggctggaataattgcatctttaaacgctaggacatctgtcctggcatgtgccaatcctactgaatcacgttacaatccaaggctctctgtaattgacaacatccacttagcgccaacgctactttcaagattcgacctgatttatcttatcttggacaaggcggatgagcaaactgataggcgcctggcaaagcatattgtttcgttgcattttgagaatccaaatttagaggagctcgaggtcttggacttgcagacactagtttcctacataagctatgcaaggaagtatattcagccacagttatctgatgaagctgcagaagagttaactcgtggctatgtcgagatgagaaaaagagggaatagccctgggagcagaaagaaggtcataacagcaaccgctagacaaatagagagtttgatccgtctcagcgaagcattagcccgaatgcggttctctgaagtggtcgaggtgcgggatgttgtggaggcattcaggcttcttgaagtcgccatgcagcagtctgcgacggatcatgcaactggtacgattgatatggatctgatcatgacggggatatccgcaagcgaaaggcagaggcgggagaacctcgttgccgcaacccgtaacctgattgcggagaaaatgcagcttggaggcccctcgatgcgcatgattgagttgctggaggaactgaggaagcagagctcaatggaaattcatatgcacgaactccgcggtgctcttggcaccctgatgactgaaggcgcggtggttatccatggagacaacgtgaggagagtttgatgtcttgacggccatctgcggtgatgcttctataaggctccaacccgccacttccttgaacagacaaggttccgaagataactgtagcacttagccgtaacttgtggtccgaggtctaaactggtccagatttgtagcagtattgctagttgtagatttttttttaaaaaattgttatcagaattttgttctctg

SEQ ID NO: 28736 - DNA, 1380 bp, Zea mays
  Clone ID: LIB4763-010-E1_FLI
ccgggcatgtagtttttagggtgcgaagtctccaccattcgaaagatccctccaggaaagatttttcttccctcctccgacgccccagcccaccaacacactctataaagcagcccccagtcacacacagaacgcacaagcgcaagcagggcaagaaaactccgcaggccagtctgcgagttggatggccttcttcttggccctcgtgtgcatcctcgtcttcctagccaccgcctcctacgtccagtacactcgctggcagaaggggaaaggccgcttcggcggccatgggaggtctgctcctttgaagctgcctcctggctccatgggctggccttaccttggcgagaccctccagctttactcccaggaccccagcgtcttcttcgcttccaaacagaagaggtacggcgagatcttcaagacgcaccttctgggctgcccgtgcgtgatgctggcgagcccggaggcggcgcggttcgtgccggtgacgcaggcgcacctgttcaagccgacctacccgcggagcaaggagcgcatgatcgggccgtcggctctcttcttccaccagggcgactaccacctccgcctccgcaggctcgtccagggcgcgctcggccccgacgcgctgcgcgcgctcgttcctgaggtggaggccgccgtgcggtccactctcgcttcctgggacgccggccacgtcagaagcacgttccacgccatgaagacgctgtcgtttgatgtgggcatcgtgacgatcttcggcggccggctggacgagcggcgcaaggcggagctgaggaagaattactccgtcgtggagaaggggtacaactccttccccaacagcctgccggggacgctccattacaaggcgatgcaggcgcggcggcggctgcacggcgtgctgtgcgacatcatgcgggagcgtcgtggccaggcccaggcggcgggcaccggcctgctgggctgcctgatgcggtcccggggcgacgacggcgcgccgctcctgagcgacgagcagatcgccgacaacgtcatcggcgtgctgttcgcggcgcaggacacgacggccagcgcgctcacctggatcgtcaagtacctccacgaccaccccaagctcctcgaggccgtccgggcggagcaggcggcggtccgcgatgccaccggcggcgggaggcagccgctggcgtgggcgcacacgaagagcatggcgctaacgcatagggtacgcgcgtgcgtgctgggaaacgcaaaactggctctttattattattactagatcaggaggcgcacttcgtgcgccctacagtaaccatagttatgataaggcatatcaaattggaactataataaaatcttaatctgcggtaacaattagat

SEQ ID NO: 28737 - DNA, 1440 bp, Zea mays
  Clone ID: LIB4763-011-D12_FLI
ccgggacggccacgccccgatatcgccatggctatcctcgccgttgcctctccactcaaaaccctaaaccctagccccggggaccacagccgctgccgcctctcctcttccctcctccaccttccgctaccagtgccacgatggcgccgcctccggtgctccgctcagtacagtgaggcggcggcgcagcccacgtcgacaacgacggcgcgtccagcggacataccctggagcaaggagctctgcaactcggtgcggctcattgggactgtaggcaccgacgtagagctgcggcagctgcccagcggctccgccgttgcgaggggtcgcctcgccgtatggaagtcagccaccgagactacatgggtaactctacaattctgggacgatcttgctattgtggcctctgagcatgttaagaagggtgaccggatatttgtttctggacggcttgagtcagatactgttgatgaggggcctgagaagcggcatgtttactacaagcttgcagttcaacagttgaatttcatcgagtcccagccagttcgattatatgaaccagaggcaagccaggatgccctaggtggaaggcgtgctgattattttaactctatctctaattcaactgaggataagaatagggataatatgagctcatctcgatcaaccgaagagctgtggcaagtgttctttgccaatcctcttgactggtgggataacagggcaaataagaagaacccaaggtatccagacttcaagcataagcagactggcgaagcactatgggttgacgggaggaacaaccccaactgggttatatctcagctggcggttttggactcgagaatgagttcgctgcaagacaatgagaggaaaccagtctcctatatgtatgctgacgagttcatgacattggacggcaaccgatagtcgttatggaggagggaagcttcgctcgtgccgattggctggctgttatggcgagcgagatcatgctgtcgacctgtcttagtagctagctcatgcttgctgtctcagttttgttgagcggctctggagggttgcgtgttatgagcgtcgtccgtagtatggtttgtgacataaggtagctatgatgagcctagaacaaacataaacaaagtgcgggggaaacccttgcttttagtgactccattagtagtgctatgtggtttgtgacatggtttttaactatgatgttacgccgaatggtaatatattgaagaacgtgccgtggccctacacaacttagttattatttagactagatggagcacttaccaatgttggacttgttaaatctgggttttctgaatgtaaatgatactagtaattgtggttaagattaatctatggtaggcctggaataccaggactagggctttgaagggggaaggttgatgatgccttctaggccgagtt

SEQ ID NO: 28738 - DNA, 1455 bp, Zea mays
  Clone ID: LIB4763-012-A11_FLI
gcctgccttaaccattcctcccaacaccacctcgcctgcgatcttcgtagcctccgtcgcgtcgagcatcgatcatgtcggcctactgcggaaagtacaaggatgagctcatcaagaatgctgcctacattggcacccccggcaagggtatccttgctgctgatgagtccactggcaccattggcaagcgcctttccagcatcaatgtcgagaacgttgaggagaaccgccgtgccctccgtgagctcctattctgctgccctggtgctctccagtacatcagcggtgtgatcctcttcgaggagaccctgtaccagaagaccaaggatggcaagccttttgttgatgtcctcaaggagggaggcgtcctccctggcatcaaggttgacaagggcaccattgaggttgttggcactgataaggagaccaccacccaaggccatgacgaccttggcaagcgttgcgccaagtactacgaggcaggtgcccgctttgccaagtggcgcgctgttctcaagattggccctaatgagccatcacagcttgccatcgacctgaacgctcagggtctggctcgctatgccatcatctgccaggagaatggtctggtgccaattgttgagcctgagatccttgttgatggccctcatgacattgatcgctgcgcttacgtcactgagaccgtccttgctgcctgctacaaggcgctcaacgagcaccatgtcctcctggagggtaccctcctgaagcccaacatggtgactccaggctccgactccaagaaggtgacccctgaggtgattgctgagtacaccgtccgtaccctccagaggaccgtccctgctgctgtgcctgctgttgtcttcctctctggtggacagagcgaggaggaggccacccgcaacctcaatgccatgaacaagctcagcaccaagaagccgtggtccctgtctttctccttcggccgtgccctccaggcgagcaccctcaaggcctgggctggcaaggtggagaacctggagaaggctagagctgccttcctcgccaggtgcaaggccaactctgaggctaccctcggcacctacaagggtgatgctgccgccgacaccgagagcctccacgtcaaggactacaagtactgagttgcttctctttgcgtgcccgttttggaactcctgcctacgagctaggttgcggagtgtggtttgctcgttagagcttattttcggacatccaaaaaacatgcttcctatgtgggatgatggttatctttatatttgtatgttaattagtctctttgctgttaaatttcgtgtaagttggtcctgccgatggagaatcgagcagctccctttttttgttctatcaactatgctgtaattctggctatgtatcggcaaaaacaattctatatgctgagttggagtcggcaaaaattcatatatgctgagttgg

SEQ ID NO: 28739 - DNA, 2149 bp, Zea mays
  Clone ID: LIB4763-012-B1_FLI
ccgggaacaaacccacggactaacacacgcgcacgcgtacagcaaagaaatggcgatggcgatgcagccatcttagccccccctcccctctccctaccctccatggccgtccctcctctgctgctcgtcgccgttgccgtagccgcgctctccatcctcgtcctcgtcgtcttcgccttccggcgatgcaggcggcggcggcaacgccacccgctgcaggccgcggcggtggccccgaccccggtcgctgtccaggatgaggacatagataggcctcttctttctgaaaatcagagcgatcactctagacagaatattagttttcttggaagttctgtaggagaaccttcgaagattcaaacaaataggagtaacacttcgcctagaagtcatgcaattgctgatacagggaggatttatcctgctgaatgttgtgttacacaaggagaaactcatgtaatcaatgttgaaaatgatacttctgaagagttccaattaggaagcacactaagacgtacaccgccaccaaaatggccaacacctgaccagaagcacagaagaagggtttctggagatgacaatcataatggaagtgttcctttgaaggataatacatatcatagccgcctggatttagaggttatagctggtccatctcatggaataagctgttctcggcagtcaagtagaccttctatgctcccaataactcttggaagggttcccccaagtgatttagtgttgaaggactctgaagtatcagggaaacatgctcagataaactggaatggaaagacattaaaatgggaacttgtggacatgggcagcttgaatggaactttcttgaactcccaggcggttcaccatccaagtgctgggtctaggcattggggtgaacctgctgaacttgcacatggtgatattataactctagggacttcatctaaactgtctgttcaaattttactgcaaaatcaacgagttcctgctggtgttggtatggcatccgatccaatggtggcacgtagaagtggaaagaaacttccaatggaagacataagcttttgccagtgtcctctgcagggtgttgaacattttgggctctttggaatttttgatggacacggtggggatggagctgctaaagctgtcagcaagattcttccagaaaatctgggatacattttatctcatcctgaaacaaaagatcgagtgcaatcatgttctgatgcttctgatgttcttagatatgcttttactttgacagaagacacaattgatcatcagtacgagggatgtacaggcacagcacttcttatttggtttgaccagaataaagattgttttgcccagtgcgctaatcttggtgactctgcatgcgtcatgagtgtcaacggcaagacgatcgatatgactgaagatcaccgggtaactagcgcgaccgaaagagctaggatagcaagaactgggcagcccctgagagacggtgaagctcgtcttagcggactaaatcttgctaggatgtttggtgacaagtttctcaaggagcaggacccgcgcttcagctcagaaccatacgtgagccaagccgttcgcatcaccaaagcgtgcacagccttcgcagtcattgctagcgacgggctctgggacgtcatcagcacgaaaagggcggtacagcttgtcgtcgagggaaaggggaggaggagctctggcgacgccacctcagcggcggccagagtagccagccgtgtgctggacgaagctcggagtctgcgaaccaaggacaacacatccgtaatattcgtagattttgacgtcctgagaagggttccctgtatctcgccggttgattgacatggcagattccggaggcagctccccatggatcgtcgtcttcctggctgctctattaattatagctcccaagttttgttgtgttttcagtgagatgatgtggtgtaggaggcagagtgcgtgcataccgtgtaatctggtgcatgccttttagagtctcctctctctctctctctctctctctctctctctctctctctctctgttaccctagttgatgaaccgatgatcacccatcatccaggaatggcttaacaaatctccattaactgtgaagtcattcgcgatttttggg

SEQ ID NO: 28740 - DNA, 1412 bp, Zea mays
  Clone ID: LIB4763-012-D7_FLI
ccggggatcgtatagtatagcagtaggaaatagaagagactatgaaggtgaggagatcggaaccagttctagtccatgcgaccggagccgcgaccacccaagagtactacttcctctcgaacctggataggaatgtcgccgtgctcatgaaaacagtccacatcttcagcgtgtcatgtgacgatgtggcaacgctgctcagggattccctgagcagggtgctctcgcagtactaccccttcgagggtcggctggccgtacgcgaggacgggaggctcgccgtgcggaacgaccgccgcggtgtccccttcgttgacgcggtgtccgattacgagctgcaggtggtctgtgacgcaacggccccgggttctgagcttctcggtgacctcgtctacgtcagcatgcagcacgagaacgccctggaagcgccgatgctgaccgtgcaggtgaccacgttcaagtgcggcggctttgtcctcgggctcgccatgaaccactgcttggcagacggccagtccgccgccgagttcatctgctcctgggcggagaccgcgcgtggtgtggccatgtcgacgccgccgtacctcgaccgcacggtgcagcgcgccaggccgatcccgacggttgacttcgcacatgacgagttcgcagagatcgaggacgtctccggcctcgccggcacattcggcaaggagccgtgcgtttaccgctccttcactttcgacgcaggcaagctgcacaggctgaagcaagccgcaagcgagcaagggcaaggaggcaccaagagctccgtcttcgtcgcgctcacggctttcgtgtgggtatcaaggacgcgggccctgcggatgctccccgatcagaagagcaagctgctgttcgcggtggacgcccgtctgcgcgtcgacccgcccttgccgcccggcttctggggtaacgccatcatcttcgcctgctgcatctccactgccagggatctcctcagcaaaccactgtccgcggctgcccgttccatcagagaagccatcgtccgcaccgacgacgcgttcatccgttccgccgttgactacatcgagttgaacagcggtgctcgcccgtcgctaatggcaaccaccctggtcactgcttggaatcgactcaggtttcgcgcggcggacttcggatggggtgaagcaatctactcggggccggcggagctgccgcagaaggaggtggccatgtttctgcgcggcgtgagtgacagccagagcacagtgctggttattgggatgcctgtgtcatgtatgcaagcattccaagaaacggtagatctgctgtgaaatgtgtgtcttcacaagttaaaaaaaacagaagccttctgactgtatgagggaggaaaatttggtgatttatattctgcagtgatctattgtacg

SEQ ID NO: 28741 - DNA, 1710 bp, Zea mays
  Clone ID: LIB4763-012-H1_FLI
ccgggacgttttattttgtccggcattgactgggtcagtactcagtagccactagccagtaccgtccagtcatccacgctgatttgccggaaggcgcctcggcggaagctgctatctagttgaagccagccatggccgccgagcccccggcgtacttgctgctccttcccctcatcgccataccgctcatcgtcttcctcgtcctgtcccgccgaagggatgaccagcggcgcttcccaccggcgccgtgggcgctgccggtcatcggccacctgcaccacctcgccggcgcgccaccgcaccgtgccctgcgggaccttgcgaggcgccacggcccgctcatgacgctccgcttctgcgagctccgggtcgtggtcgcctcgtcgccggacgccgcgcgggagatcttgaggacccacgacgtggacttcgcgtcgcggcccatcgggccgatgctgcagctcgtgttccggggcgccgagggcctcatcttcgcgccctacggcgacgggtggcggcagctccgcaagatctgcaccctcgaactcctcagcgcccgccgcgtccactccttccggcccgtccgcgaggacgaggtcggccgcctcctcggctcggtcgcgtccgccgcggcggcggggttgcccgtgaacctgagtgagaggatcacggcgttcgtcgcggacgcagcggtgcgcgccatcatcggcagccggagcgagcaccgcgacgagttcttgcgcctgctgatggacgggctcaagataattccgggattgagcctgccggacctcttcccgtcgtcacgcctcgcgatgctcgtcagcagcgttcccggtaaaatcgagcgccgccggaaaggcctccttgacatcgtcgaccccatcattctggagcatcaggagaagagagcggccggtggcatagacgaagatgaggacttgcttgacgtgctcttgagactccagaaagacatggactcccagtaccctctcaccaccgacaacatcaaatccgtcctcatcgacatgtttggagcaagcagcgagacgtcggcgacgacgctgaagtggacaatggccgagctgatgcggaacccggcggtgatgcggaaggcgcaagatgaggtcaggggagcactcgccggccacgacgaggtggcggaggacagcctggtcaatctgcggtacctgcagctagtcataaaggagacgctgcggctgcacccgccggcgccattgctgctgccgcgggagtgccgcagcccgtgccaggtgctcggctacgacgtgcctcgtggcaccatggtgctggtgaacgcgtgggcaataggcagggacccagcgctgtgggacgcgccggaggatttcgtgccggaaaggttcgaggagagtggacgagacttcaagggcatggattttgagttcatcccgttcggtgcgggaaggaggatgtgccccggcatggcgttcgggctggcgcacattgagctcgctctcgcggcgttgctgtttcacttcgactggaagctaccggaaggggtggtcgccgaggagatagacatggccgaggcggtcgcgatcacggcccctccgcgatctgatttagtggtgctccctgttactaggctaccggtgtcaatataatgtgcttcggcccaaaagcttattttctttcagtatgctagaaatagaacaacaacttttcttt

SEQ ID NO: 28742 - DNA, 1414 bp, Zea mays
  Clone ID: LIB4763-012-H3_FLI
ctcgaggccggccggggtagcaatctcgctctcgctcgatgtctgacgccttctgattctcgcgctctgctcttctcgatttttgtcatcgattcagagctcacgagtcacgatccaaatcccttttccactccgccggacgtcgagagaggcggtgggtgcgggacgcgaaggcgaagccctagccccctccctgccgcggacgccgatggacccacctcgcgccgtcgcctttcttctcatactcctgcccgtgctcgccccggtggcctccggtgtacctttcgtcgtcctacacgggattggcgacgagtgcgggaacgatgggctgtcatccttcaccaagatgcttggggagtggtcaggctccaagggttactgcattgaaattggaagaggagcatgggactcttggttaatgccacttcaagagcaggcaaatacggtttgtaagaaggtcaagaaaatgaaagagctcagtgaaggttacaatatagttggcctgtctcagggaaacttaattggcagggctgtaatcgagtactgtgattgtggacctccggtcaagaatttcatatcaattgggggtcctcatgctggtacagcttcagtgccactttgtggttctgggtttctttgtattcttattgatgatctgattaaatcagagatatattcagactatgtgcaggatatggaagattatttgaagggttgcaaatttcttccaaaacttaacaatgagatcccaagtgcaagaaatactacctataaagaaagattcagcagcttggaaaacttggtactgatcatgtttgagggcgatgcagtattaatacctcgggaaacagcgtggtttggttattaccctgatggagcctttagcccagtgctgccccctcaagagacgaagctgtatacagaagattggattggcttgaagaccctggacgaggctgggcgtgttaaattcgtgtctgtgccaggaggtcacctgcgtatcaccagaagcgacatgaagaagtacattgtgccttacttgacgccggaggcgtcatccaagaagaacatacacatacaccggatgctgtcgctttgagcgagtatctaacaaggtttgtatcggtggccattgtgccctgacacgtgggccatgtgttgacgccttgtaaatacgctgaacacgaagggaggaaatgatagctccttggaagagtggatccgaacttgtgaagtgaagcgtgtttggtcctttccgtttcctatctgacaaacaaatatgtccatgccgtggccacaacacgcataaatcattatgcacatttcctattgagtaaaatacaattccggtctgtaaacttgtcgaaccatgtcatgccggttcataaacctttaaaatatgtttcttaaatgc

SEQ ID NO: 28743 - DNA, 1448 bp, Zea mays
  Clone ID: LIB4763-013-A1_FLI
ccgggttttttccccaaaaccaaaaccaaaaagaagggttgctcccaacgcaacgaactgcctttcccgtcagcagcagcagcagctgctgcctgctgctgtccatcttcatcctccccatcgcccgactggatttctccctcgaattcgcacctccggcctcccccctcacttcgctgtgtctcatcaacgccggcatcaccgcgaggactgggccagcgctccctccctttctcctccctccgcctttattgctgacggcgacgactgggcgagctctgccgccgctctgcgctaggtgcccaggtcttcctcgggcacttcaccggcgacgagcacccatcaggagcgaaatggacgaggctgttcctgctttggctactggccaagcttcaaccgacggcgtgacagagcagcctgtgaatgtgtacatatgggacatggatgagacactcattttgctcaagtcacttctggatggctcatatgctggggcttttgatggcctcaaggatcatgagaaaagtactgaaataggaaagcgatgggagaacctcattcttgaactctgtgatgagcacttcttttatgaggagattgagaactacaatgaaccctatctcaatgccttgaatgaatatgacgatgggagagacttgacctcatatgattttgaggctgactgttttagttcaccctatgatgatgcgaacaaaaagaagcttgcttacaggcatcgtgctattggagagaaatatgcaaagggtttggaaaaggttctggacggacacatggtcaaagtctgcaatgatcagtacagtttgactgacaaatatactgatggctggctgtcttcagctcataagttactggaagaagcattgggcaaatcagcatcagcaccttcagccaactcttcaagcatcaactgcatagttacatcagggtcactgattccaagccttgccaaatgtttgctgtatcacctggatgatgtggtctcatctgagaacgtctacagctcatgggaagtgggtaagctgcagtgcttcaaatggatcaaggagcgcttcgacggtccaaacgtccgcttctgtgcaatcggtgatggccacgaggagtgcagtgctgcgcaggtcatgaaatggccattcatcaagatcgagttccgccctgaagcccatcacaggttccctggcctagacttgcccacagtgcagacctacatggatgtgatatacgagtcatccagcaaagatggttgaccgacgattgatgtcgattctgttttctcctctgacctccaccacccatggagctattgtttgaggaaactgtaagcaaagagatgtcgtgggaaaggaacgtgtcgtcctccctagatctttcactttggcgaattaggaggcaggtgtgataaataagagtcttgctagttcgtcgtcgcg

SEQ ID NO: 28744 - DNA, 1827 bp, Zea mays
  Clone ID: LIB4763-013-A10_FLI
atcccatcccatcccatcccatcccatccgcaaccggacaaccgtcacttccccacatcgcaccgcacccaataaaacgccacaccacgccaccggggtccagggtccatccatcactcacgagcaggatcgagtcgaggcctcagctccctcctcggcgtcctcgcaacgaagggaaggaacaatgtcagcggctcgtcgtcggtccccaatccccgttctcctcttcttcctcctcctccactccgcgtcgccgagccccatcaagacggtggtggtgctggtgatggagaaccgctccttcgaccacatgctggggtggatgaagcggctgaacccggagatcgacggcgtgacggggcgggagtggaacccggccaacgcgtcggacccggcggcggggcgcgtctacttccgcgacggcgccgcgtacgtggacccggacccgggccactcgttccaggagatccggcagcaggtcttcggctccgacgacgacgccgcggacaacccgccccgcatggacggcttcgcgcagcaggcgcgctccatcggcggcggcgccatgtccgacgccgtcatgcgcggcttcaaccccgccgacgtcgccgtctaccgcgagctcgtctcgcagttcgccgtctgcgaccgatggttcgcgtccgtgccgtcgtccacgcagcccaaccgcctgttcgtccactccggaacgtccggcggcgccaccagcaacaacccgacgctgctggcggagggctacccgcagcggaccatcttcgacaacctccacgacgccggcctctccttcggcgtctacttccaggacgtgccggcggtgctcttctaccggaacctccgcaagctcaagtaccttctggacttccacccgctgcgcccctccttcgccgaccacgcccgccgcgggacgctccccaactacgccgtcatcgagcagcactacctggactccaagctggacccggccaacgacgaccacccgtcgcacgacgtgtaccagggccagatgctcgtcaagtacgtctacgagacgctgcgcgccagcccgcagtggaaccagacgctgctcgtcatcacctacgacgagcacggcggcttcttcgaccacgtgcccacgcccgtcgccggcgtgcccagccccgacggcatcgtcggcccgccgccctacaacttcaccttcgaccgcctcggcgtccgcgtcccggccatcctcgtgtccccctggatcgacaggggcaccgtcgtccacgggccccacggccccacgcccacgtcgcagtacgagcactcgtccatcccggccaccgtcaagaagatcttcggcctgccgcaggacttcctcacgaggcgggacgcgtgggcggggaccttcgagggcgtggtgcaggggaggaccgagccacgcaccgactgccccgagcagctgcccacgccgacgaggatcaggcagacggaggcggacgaggaggccaagcttagcgagttccagcaggagatcatccagctcgcctccgtgctcaacggcgaccaccacctcgccaccctgcaggaccggatcaagaacgacatgaacgtcagggaaggcatcgactacatgaaggccgccgtcaaacgctacttccaggccggcgcgtccgccagaaggatgggcgtcgacggcgaccagatcgtcaagatgagaccctccctcaccaccaggatccaacgcccatagacagactgtctaatcaaagcgggatcggttatgttcacaaacaggattggactacatatatatatattctaaaaatacagatcacattcagtgcc

SEQ ID NO: 28745 - DNA, 2466 bp, Zea mays
  Clone ID: LIB4763-013-A11_FLI
aggagttcctcctcgccccgcgtcgagttgccagcacggcccctccctctcgttctcctcgactcctccccgtcgcggcagccagccagcaggcatcgtgatcgtctgccctggttcccgccctcgctccatcccccggcacccccgcacgggacgcgcgtgtggacgttcttcgcctccgcgacaggcttgcgccccggctcggctcgggtctgcctccactgcggccttcctggatctcggccgccgctcctccatattataacaggtcacagaactatcagacaaggatggcgacttacgagcccaagaacattctcatcaccggtgctgctggttttattgcatcgcatgtcaccaactgtctggtgaggaactacccgcactacaagattgttgtcctcgacaagctcgattactgctccagcctaaagaacctcaacccctcacgggcttcaccaaatttgaagtttgtcaagggtgacattgcaagtgctgatctggtgaaccaccttctggtcacagagtcgattgacaccatcatgcactttgctgctcagactcatgtagataattcatttggcaattcatttgagttcacaaaaaacaatatatatggtacccacgtccttcttgaggcttgcaaggtcactggccagatcaggaggtttattcatgtcagtactgatgaggtctatggagaaactgatgaagatgctgtggttggtaatcatgaggcctcacagctgcttccaacaaatccgtattcagctacaaaagctggggctgaaatgcttgtgatggcatatggaagatcttatggtcttcctgtgataaccactcggggcaacaacgtgtatgggccaaatcagttccctgagaaacttattcccaaattcattcttttggccatgagaggtctgcctcttccaattcatggagatggttccaatgtcaggagctacctatattgtgaggatgtggctgaagcttttgaggttgttcttcacaaaggggaggttggacatgtgtataatattggtactgtgaaggagaggagggtgattgatgtggccaaagacatttgcaggctctttggcttggatactgaaaaagtaatcaggtttgttgagaacaggcccttcaatgaccagaggtacttcttggatgatcagaagcttaagagactgggatgggcagagcgcacaccatgggaagagggcttgaagaagacaatcgagtggtacaccaccaatcctgattactggggagatgtcactggtgctttgctccctcacccaaggatgttgatgattcctggagttgaaaggcataactggactgaggatatcaaatctctgacttcttcaccagctgaagctagcacaacagctcctgcaaccagtgccaaaaggaccactgctgcccctcaaaagcctttgtacaagttcttaatctatggcaggactggatggattggtggcctccttgggaagatttgtgacaagcaagggataccatatgaatatgggaaaggacgcttggaggagcgctctcagctgttggaggacattagaaatgtgaagccaactcaagtttttaatgctgccggagtcactgggagaccaaatgttgattggtgtgagacccataaacaggacaccatccgcaccaatgttgtaggcatattgaatcttgctgatgtctgtcgcgagcagggtctgctaatgattaattatgctacaggttgtatatttgagtatgatgccaagcaccccgaagggtctggtattggctttaaagaggaagacacacccaactttacgggttccttttattccaaaacaaaagcaatggtggaagagctgttgaaggagtatgataatgtctgtactcttagggtcaggatgcctatatcatcagatctaaacaatcctcgtaacttcatcacaaagatagctcgttacgacaaggtggtgaacattcccaacagcatgacaattttggatgagcttctgcccatctccattgagatggcaaaacgggactgcaggggcatatggaacttcaccaaccctggcgttgtcagccacaatgagattctggagatgtacaagaaatacatcaatcctgattttaagtggaccaacttcacactcgaagagcaatccaaggtcatagtcgcacctagaagcaacaatgagatggatgcgtcgaaattgaaggccgagttctctcaactgatgtccatcaaggattctttgatcaaatatgtctttgagcctaacaggaaggttccagctaattgaggatttaggataagaagggcatcgaggtattagttactattaaacattaaattagctataatgtttgtcaatttttttatgcatcgtattttaacagaacgcgtagatgtcctttgttctatatagtggatgatgtgttgagatgtggttatggacg

SEQ ID NO: 28746 - DNA, 1381 bp, Zea mays
  Clone ID: LIB4763-013-C11_FLI
ctcgaggccggccgggaccatcccactctccctattcttcttctcttcaagtgccactcccatccaccacaaggcttggcttggtgggaagaagacaaacgccggcacgcgcacgcagacacgatggcgatctgcagcgcgcacactaccacctccctgcgctccccatgcacgaccgtctcgaacgcaggtctgaggcagaagcaagtcatcttcgtcaccagcaacaggaggagcggcggcggcaggaggcacggaggggcaaggagcttccaggtctcgtgctccgtcgacaagccggtggtgattggcctggcggcagactcagggtgcggcaagagcaccttcatgcgccggctcaccagcgtcttcggtggcgccgcggagccgcccaagggcgggaacccggactccaacacgctcatcagtgacaccacgacagtgatatgcctcgacgactaccattccctggacaggaacggcaggaaggagaaaggtgtgaccgccctcgaccctagggccaacaactttgatctcatgtatgagcaggtgaaggcgatcaaggaaggccaggcagtcgagaagcccatctacaaccatgtcactggcctcctcgaccctccggagcttatcgcgccaccaaagattttcgtcattgaaggtctgcacccaatgttcgatgagcgagtgagggacctcttagagaaggaaaggtgctgcgtgttaagctcatcatgaaagaaggggtgaagaacttcaacccggtttatctctttgacgaaggatcgaccatcagctgggtgccttgtggaagaaagctcacatgctcttaccctggcatcaaattttcctatggcccggacacttacttcggaaacgaggtatctgttctggagatggacgggcaattcgacagactagatgagctcatctacgtggagagccatctaagcaacctttcaaccaagttctacggagaggtgacacaacaaatgctaaagcatgcagacttcccaggtagcaacaacgggacaggtctcttccagaccatcattggactgaagattagagacctctatgaacagattgttgctgagagggctggtgtaccagcggaagcagcaaaagtttaacgatctatgcattcagatgtcctaaaactacagctctccgaactcaatgggagtaacaaccttcgcatctgttgggatatatggcgagctaggaggtatagaaatgtcattgcagaactcaggaaaacgtgcaatggaatttcttgaaatccctcttgaagagagtgagaactcgatagatcaagaatcaccacacgttgtattaatcgtatggtataatatttatacatgtacaggatgagctacgc

SEQ ID NO: 28747 - DNA, 1772 bp, Zea mays
  Clone ID: LIB4763-013-G7_FLI
ccggagggcagcaagatccgagcagcaggagtggcaagcagcatttgtagccacagctcgctcactcaattgcagctagccgcggttgcggttggactggatcggcggcagggcagggcagggcagggcgcgcggcggtggtggtagttgcagaagtgacggtcaagttttcctcgctccttgcttcggccgagactccgcctgacgctactaccaacatctccacctgaatccatctctatctacctcgcacgaacgaacagagacaggggaggggagggggggaattgaagtgtaacccaaggaaaggaaccatgatggtgtggcaggcggaggaggaggattgatccatccgtcaacccatcagacccgtccatccatcggtggtggtggtggtggctgctgttactcgctatcaccatctgctgctgcctgctttagtcttttgcttcacttctcttctttctatccttcctccccctgtctgtttgtctgtcttattgccctccctgttcttgttgctgcttgcattgagaaaagagagagagagagacagagagagatagaaagtggttgctagttgtatggtcgtccggtgggcgcgatgaccatggagcacggcgaggattgctgcgtcaaggtggcggtccacgcgcgccccctcatcggcgacgagaagctgcagggctgtaaggactgcgtcgccgtcgtgccgggcaagccgcaggttcagatcggcagccactccttcaccttcgaccatgtctacggcagcacaggcacgccgtcggcggccatgttcgacgagtgcgtggcgccgctggtcgacggcctcttccagggctacaacgctacggtgctggcatacggccagaccggatcagggaagacgtacaccatgggcactgcctgcaaggaggggtcgcatatcgggatcatcccacgagccatggccgcgctgtttgacaaaattgagaacctgaaaacccaagtggagttccagttacgagtatcgttcatcgagattctgaaagaagaggtgagggatctacttgaccccactgctggtaccgtgggcaaagcagagaatggcaatggccacgcaaaactgtctgtgccagggaaaccccctgtgcagatccgagaggcgtcgaatggagtcataacgctagctggatccactgaggtgcatgtcaccactcagaaggaaatggccgcatgcctcgaacaaggttccctcagtcgcgcaactggaagtaccaacatgaacaaccagtcaagtcgttcccatgccatcttcacaatcacattggagcagatgcgcaaaatagaccccatcatgactgcagatggaatgcctattgaagagatgaatgaagactatctctgtgccaaactacacttagtagatcttgctggatcagaacgggctaagagaactggttcagatggcctgcgcttcaaggaaggtgttcacatcaaccgaggacttctcgctctcggcaatgtcataagtgctcttggagatgagaaaaaaagaaaagaaggtgctcacgttccttatcgggacagcaagctcacccgtcttttgcaggactccctaggtggaaatagtaagactgtcatgatagcttgcataagtccagcagatattaatgctgaagagacattaaacactttgaaatatgctaaccgggcacgtaatatccaaaacaagccgattgtcaatagaaatcctatcgctgatgagatgaaaagaatgcgccagcagg

SEQ ID NO: 28748 - DNA, 1627 bp, Zea mays
  Clone ID: LIB4763-014-A1_FLI
ccggggcttcgccaaagtctgaaattaagctggacaccgctcccgcaccaaaccaaatcacctgttcccgcgacctcctccccggcgtacctccagtctccagagatccacacgaccacaccgacccaccaccatctgcatcggcaatggacgccgcgccacccaccataaccaagtccccgccgtccctggttccaccagcggggcccactcccggtggttccctcccgctctcctccatcgacaagaccgccgccgtccgtgtctccgtcgacttcatccaggtcttccccgcccctacgtcggggaaggaggactggagcccctcatctgcgatcgcggccatgcgcgagggctttgccagggcgctcgtgccgtactaccctatcgccggccgcatcgccgagcccgtgcctggtgagcctgagattgagtgcacgggggaaggggtgtggttcgtggaggctgaggcaagctgctccctcgaggaggcgcgtaacctcgagcgcccgctgtgcatcccgaaggaggagctgctcccgcgtccgccggccggtgtgcgcgtggaggacaccctgctgctcgcgcaggttacaaagttcacatgtggtgggttttctgtgggcatttgcttcagtcacttggtgttcgacgggcagggtgctgcgcaatttctgaaagcagttggtgagatggctaggggcctccctgagccatcgatcaagccaatctgggctcgtgatgccatccccaacccacctaagccacccctaggcccgccaccgtcattcaccgcattcaacttcgagaaatcagtcgtcgagatcgctctggacagcatcaagcgcgtgaaggatcaagttgcaagcgaaaccaaccagaagtcttccactttcgacgtggtcaccgccatgatcttcaaatgtcgcgccttggcagtcgacttcgcacctgacgctgaggttcgcctgggctttgcagccagcactcgccacctgctgagcaatgtgctgccctccgtcgatggctactacgggaactgtgtgtacccaggtggtctcaccaagaccagccaggaggtgaaggaagcttcactggtggagatcgtgaccgcgatcagggaggccaaggaggctctgtcgtcgaggttcctcgactggttgagcggcggcgccaaggagaaccactacaacgtgtcgctggactacggcaccctcgtcgtgaccgactggagccacgtgggtttcaacgacgttgactacgggttcggtgagccaagctacgtgttcaccctgaacgacgacgtgaacatcgttccctccgttgtgtacctgaagcctcccaagccgaagcagggcatcaggctggtgctgcagtgcgtggaagggcggcactctgccgtgttcagcgaggagctgcagaagcacgcatagagcgagtgtattccatcccacagtggagattgttgtattttgttgtgtcgaattgctgcccccggaatttgcttgcaataagatagggttggcacgtgtttatactctgtactgttatctcagcacgttacattatacatgtattgagtgagtattgacagtggtgaaagaataatagtgttccatttgaaacg

SEQ ID NO: 28749 - DNA, 1526 bp, Zea mays
  Clone ID: LIB4763-014-D2_FLI
ctcgaggccggccgggatcgactctctcctgagtcctgactcctgacatctccgatcgtcaccgtccccgtccccggcgccgtccctctcgctcttgtcctcggtgccgcacctcctacatctctgtctcaccgctttagcacggccaccacgcccgcctgcgctagatcccatctgaagccggcggccatcatacccgtgagcgctagctgggctgcatctctcacctccacagccagcaagcgagcgtggttagcgccgcagtggtttcaccgaccttagatcgggccatatcgagctgttgacatctgcgggtgcatctgcggacagccttgacgaggctgccgacgatgtcgtctctcaactcgctcttcaaccgctccaccttcggcacaaaatgcaaaacatgtttaaatcttgtcatttcaagaatcaagctgctgcgcaacaggagggagttacaactaataaatatgcgcaaagaaatggttcaatatcttcagactggccaggaatcaatcgcgaggattcgagtggagcacattattcgggagcaaaatatattggctgcctatgaggtcgttgagcttttctgtgaatttgttctggcaagagtccctattgttgaggtccaaaaggaatgccccttagaactgcgtgaagccattgctagtataatctttgcatcaggaaggtgttcagacttgcctgagctaatgcatctccgtaatttgtttaccaccaagtatggaaaggagtttgttgctggtgctatggaattgcgccccgacagcagtgtcaaccgcacaataattgaaaagctctcggtgaaggctccatcaggtgattcaaagctaaaagtcttgaaagctattgcccaagagtaaatattgaatgggattcatctaatactgaagcagaattcaacaagaaatatgaagatctactggacggctcgggatcttcggtccaccagatccagacacctatcattgagggctcagtgagctcaccagttgtttctgctccaagagataagacgccagcattgaattcacctgtcattgatgccgaaaaacaccaagttcgcgaatctccgacttcaccagctggaggtgcaagagctggtgttgtcactaagggcaatgtggtaaccatgggccatcactcccccgctgaggagatgccctccaccagcccaagttcatcagacgcgctggagaaagcccgagctgctattgcagctgccacccgcgcatctgctgctgctcgcgccgcagctgaacttgcaaaagttaaaattacaaatcaatgacacctccagttcgggcaaggcgtgtcaggaagtttaatctggcaactgatcaccaggacagactgaaatgtatttcattgaataaattgttactgtatattccctttgtgagcacttggcacatcatataaggagcgtggctcctcgcctttcttcgaatgtactcaaagagaactacctggaatgcataatgttgcatttactgttcacc

SEQ ID NO: 28750 - DNA, 1384 bp, Zea mays
  Clone ID: LIB4763-014-E4_FLI
ctcgaggccggccgggacaagctcgaccaccaacccagctcgctcgtcccagctgatcaggtcgagcacctagtagcgacctgctcgatcatcagtgtagagtgtcggtaggtgtctgtctctcttggtggctggttgcaacggtcatggcgacgtcgtctcgtcgggtgcccttgctgctgctgtgcctgggcgtgctggtgtcctgctccttcgcggcgggcagcttggaccaggagctggacatcacgtggggcgacgggcggggcaaggtccttgacaacgggcggctgctgacgctgtcgctggaccgcacgtccggctccgggttccagtcccggcacgagtacctgttcggcaagatcgacatgcagctgcggctggtgccgggcaactccgccggcaccgtcaccgcctactacctgtcgtcgcagggcggcgcgcacgacgagatcgacttcgagttcctgggcaacgtgtccggcgagccctacacgctgcacaccaacgtgttcacgcgggggcaggggcagcgggagcagcagttccgcctctggttcgaccccaccgccgacttccacacctactccatcctctggaaccccaagcacgtcatcttcatggtggacgacatgcccatcagggacttccgcaacctggagagcaagggggtggcgttccccaagagccagccgatgcggctctactccagcctgtggaacgcggacgactgggcgacgcagggcgggcgcgtcaagacggactggtcccacgcccccttctccgcctcctaccgcgggttcaaggccgacgcttgcgtcgccgtcgcgggcggccggacccgctgcggcgccaccgtcggcaccgagggcaccggcgcccccgcctccgccgccggcgccggggactggtacaaccaggagctggacctcaccctgcagcagcggatgcgctgggtgcagcgcaagtacatgatctacaactactgcaccgaccccaagcgctaccagcagggcctccccgccgagtgctccatgcagtagcgcccggttattcctcgcccgtccaacaatggcgcgcgcgcgcgtgtgtgtgcatgtggtccgctctactgctaccgctacgacgatcggtgtcgatcaccggatcaaggcaagacgaaaggcatcgaaacatggtagataaataaaggacttgacgatttgtaacgcagtagctggtgcgtgcgtggtgtggtggtaagaaattcttctgctgcctgtgttcttgtagcctcctcgtcctcgcccaccctgttggtacgtgtacggtgtacgtagtctgccgccgcgcgctgttcgtgttcgtcgtgtctcgtgtctgtattatactcgtcctccccatc

SEQ ID NO: 28751 - DNA, 1059 bp, Zea mays
  Clone ID: LIB4763-014-F5_FLI
cgtccgccgccttcgccgcgccgcctccgcctcctccatcgcacgccggctccgctgcctccatccgcgcacgtccgcctccactgtctccatccgctcgggagccgccgccctccgcgctaggcctcgcctccgtctggtctggattcttcgacacctgggcgctccgcgtcgccgacttctcgcaggcggagagtgaagagctgtgttgatgcggtggtcatggagatggtagcagtctactgcggtggcctctacaccgccaaaccagagcttgctgcccgccgcatcgaggccatcggcttccaagtcgggcaccagctctctgagagatataccatggagcgccctcgatttagtgatcatcttgaagcaatcaagtttatctgcaaagatttttggtcagagctgttcaagaagcagattgacaatctgaaaacaaatcacaggggtacctttgtccttcaagataaccgttttcggtggcttactcgtgtttctctagatccacgtatagagaacacagattcaactgaaaatgattctgcagcattgggtgatactgcagcccaaacgactaccatgcttctgtatttcccatgcgggttgataagaggtgccttgaccaacttaggaatttcgtgttctgtctctgctgacatgtcaaaccttccagcatgttcgtttgtggtgcgcataaagacatgaactgtgaggaatgatacaagtacagtacgaagattcgacagtatctgcttgtggttcaagccgggttgaacattgaagatagcagagtttgggcatgcattagatgtattgtggtactgcagaaatattctgtgtagctgttggtttctgtttccgttacttccagcagttacctgttttcactacctcaattgtttccccacctcttcgtgaccgtattccagagtttaggttggccattcctgcactctaggtagccgccactggcaccatttgtgagagttaaactatggttgttggttgcattatctctgtggcctgtgatagcacccttaaagcatgattcttgcc

SEQ ID NO: 28752 - DNA, 1654 bp, Zea mays
  Clone ID: LIB4763-016-F7_FLI
tgcattcccctttcgtccactgcattttatccttcctggtgctctgtccacctctctcgctctgggccgccgccgccgccctaagccacgtgctgaggctttcgttggtctcttcgccggcgacgagcacccagcagttctgtagaaatggctggtggtgaggacatccagcctcttgtctgcgacaatggcactggaatggtcaaggctggttttgctggcaatgatgcaccaagggcggttttccctagcattgttggccgtcctcgccacactggtgtcatggtagggatgggacagaaggacgcatatgttggcgatgaggcacagtccaagagaggtattcttacgctcaagtacccgattgagcacggtattgtgagcaactgggatgacatggagaaaatctggcatcatactttctacaacgagcttcgtgttgccccagaggagcaccctgtgttgctcaccgaggctcctttgaacccaaaggccaacagggagaagatgacccaaattatgtttgagactttcaatgttcctgccatgtatgttgcaatccaagcggtgctctcactctatgctagtgggcgtactactggtattgtactcgactctggtgatggtgtgagccacactgtgcccatttacgaaggatatgcccttcctcatgccattcttcgtttggatcttgctggtcgggacctcacagactccctcatgaaaattctcactgagaggggttactccttcacaacctcagccgagcgagaaactgtaagggacatcaaggagaagctagcatatatagcccttgactatgagcaagagttggaaactgccaagaacagctcttcagttgaaaagagctatgagctacctgatggacaagtaatcaccattggtgcagagagattcaggtgccctgaggtcctcttccagccgtcgatgattggtatggaggctgctggaatccatgagacaacatacaattcaatcatgaagtgtgacgtggatatcaggaaggacctctatggtaacattgtgctcagtggtggttcgactatgttcccgggtatcgctgatcgtatgagcaaggagatcacttcccttgcaccaagcagcatgaagatcaaggtcgttgcaccgcctgagaggaagtacagtgtctggataggagggtcgatcctagcctcgctcagcactttccaacagatgtggatatcgaaggaggagtacgacgagtctggcccggcaattgttcaccggaagtgcttctagggtttcacaagttcctcgtcgttacctagtctcaaattatgtcccctccatttctcgagatatgtgtggcagatttgcatgatacgtttgtttgtttccatcggacctgaagtcttcttggggataggctcccccctttgtatgttgtggctccaatccatgtgcgagcacgctgtgtctgtcgtgacacctggttcgtgagatgggttgtcaaacttgattggtttgttgtgcgtggctggaagagctgatagttatatatttggcttggactgtgccgcttgtatgtatctgaattctgaaagcgttgtaatctgagcatccgtgcaaagtatgaatggcccttttatatgggctggattttccggttttg

SEQ ID NO: 28753 - DNA, 1883 bp, Zea mays
  Clone ID: LIB4763-017-B1_FLI
ccgggaagcagaacagaggttattcgttttagctacccgttttgaagagaagccgattttggaggagacgatgatgagtccggcgtcggagcgcagcctcatcatccagagcgacgacgacgacgacgcccgatccggccacgacgtggaggagccggagcaggactccgactcctcctcgtcgtcctcatcctgcgccaccccacgccgcggcccaagctcacccccctacatccagcaatggccgcagagttacaggcaatcgatcgacattctcagcagcgtgcagtcacccaacctgagctttctggggactccaactctgagcaggctgtcgaactctttcctcgccatcacagattctttccggagcaaggcccccgaaacgatctctagctttatcaagccactccttggccccgcgccaagtgacgatcagcagcagcagcatgaaggcacccgaaagagttccgagtaccttgtgccctcgagaagatcatctctgcagcagatcccagaggatcaaaagccacctgtaggtggccatggggcatctcatgaccagaactgctcttacacccagggagtgatgaatggaataaatgttctatgtggtgtggggatcctatcgacaccttatgccatcaaacaggggggctggattgggctggcgatactctgtacatttgctcttctcgcatggtacacaggtgtgctcctgcgccattgcctggacagcaaggagggcctcaagacatacccagatattggccatgcagcctttggcagcacaggccgcatagttatctcgataatactgtacgtggagttgtatgcatgttgcatcgagtatttgatattggagggtgacaatttgtcaaaattattccccaatgctcacctgaccattgggagcatgacactgaactcacatgtattttttgcaatcttgactaccatcatagtcatgccaaccacctggctccgtgacctgagctggctgagctacatttcagctgggggtgtcattgcatcaatccttgtggtcatctgcctattcttggttggggttgtcaatgatgtcggctttgagaatgaagggactgcactgaacgccccaggaattcctattgcaattggattatatggttactgctactcagggcatggggtttttccaaatatctattcctccctgaagaatcgcaaccagtttccttcaattctttttacttgtattgggctgtctacctttttgtatgctggtgctgcagtgatgggatacaaaatgtttggtgaagccacagagtcccaattcacactcaatttaccagataattctgtcatttctaagattgctgtttggacaacggtggcaaatccaataaccaaatatgcattaactattattccattggctatgagtttggaagagctgctgccaccaaaccaacaaaagtattctacaataatcatgcttagatcatctctggtgatatcaaccctcctgattgctctatctgtgcctttctttggacttgtgatggccttggttggttctttgtttgccatgcttgtgacctacattttgccttgcacgtgttttttggcgatcctcaagacaaaagtggggtggcatcagatagcagcttgctcgttcatcatagttgtcagggtttgctgtgcctacgtgggaacatactcgtccctgtcgaagataatccagaactacgcatagcacagctgttcctgtgatcctgtatatgcatctgcccgacaaaatcatgtgtgcgctatttgggccaaacatatgtacaagatgaaaagtttaccattcaattcactcgatgtataataaattattggtgccttatcatagggct

SEQ ID NO: 28754 - DNA, 1492 bp, Zea mays
  Clone ID: LIB4763-017-E11_FLI
ctcgaggccggccgggatcgcttctcttctccacacgaactcactcttgagagatagagcgaaacacaaagcaggcaaaaaaaaaaggatagagagaaaaaatcattctcgtttctctcactccgctatacccccgcccgaatcgatggagattagggctccgccaacgagcctcagtctcgcgccgccgcccgcctccgccagcttccgccgaacaccgcttaggaccttcttccttaacggcagcgtttcacttaaagttgtgcaagtacgacaatcaaatgtcaacagatttaagtgcaatagcatacaaagtaacctctttgatagactaacgagggttgccaggtcctacgcaaatgcagttctaagttcatttgaggaccctgagaagattctcgagcaggcagttctcgagatgaacgatgacttgacaaagatgaggcaggccacagcacaggtcttggcgtctcaaaagcggcttgagaataaatacaaagctgcagaacaagcttctgctgattggtatcgaagggctcaacttgctcttcaaaagggtgacgaggatcttgctcgcgaagcccttaagcggcgtaaatcatatgctgacaatgcaagctccttaaggtcccagcttgatcagcagaagggtgtagttgaaaatctgatttcaaatacccgggttcttgagagcaagatagcagaggccaagcagaaaaaggatacgcttaaagctcgtgctcaatcagcaaagactgccacaaaagtgagcgaaatgttgggcaacgtgaatacaagtagcgccctttctgcatttgagaaaatggaggaaaaagttatggcgatggaatcccaagcggaggcactcggccaattagcaactgacgatctagaaggaaagtttgcactgctcgagaattcatctgtcgatgatgatctttcacagctgaaaaaagaactctcgggaagctctttgaaaggggagctcccatcaggcagaagagcggccagcaactcaggcgccgggcgccctttccccgacctagagattgagagcgagctaaacgagctgcggaggaaggccaaagaatactagagagtagagactctccaccaaccatccttcccgggcctgacagaatctctcatttccaagtacatatagcacagctgcagatttgctccatcgcgccttggaaagttggaacagaggtgcgcctttgactgtcactgtcaaagggtatatggagtcgccgagtttctcggcattttcccgtcgacggacatttgtacagctagccataaattgttgtaaatcactacgctccctagagcccttttttttgcgtactacgtatatagtcaaagtttgaagtttccgcgtcgtggtttttacccccattttttccgtgccataacatgtgttttgtgactggagacttgggatcctcagccaggtcgatcaaatactccctttttttcttcttcttat

SEQ ID NO: 28755 - DNA, 1416 bp, Zea mays
  Clone ID: LIB4763-017-F1_FLI
ctcgaggccggccgggttcgtagcctccgtcgcgtcgagcatcgatcatgtcggcctactgcggaaagtacaaggatgagctcatcaagaatgctgcctacattggcacccccggcaagggtatccttgctgctgatgagtccactggcaccattggcaagcgcctttccagcatcaatgtcgagaacgttgaggagaaccgccgtgccctccgtgagctcctattctgctgccctggtgctctccagtacatcagcggtgtgatcctcttcgaggagaccctgtaccagaagaccaaggatggcaagccttttgttgatgtcctcaaggagggaggcgtcctccctggcatcaaggttgacaagggcaccattgaggttgttggcactgataaggagaccaccacccaaggccatgacgaccttggcaagcgttgcgccaagtactacgaggcaggtgcccgctttgccaagtggcgcgctgttctcaagattggccctaatgagccatcacagcttgccatcgacctgaacgctcagggtctggctcgctatgccatcatctgccaggagaatggtctggtgccaattgttgagcctgagatccttgttgatggccctcatgacattgatcgctgcgcttacgtcactgagaccgtccttgctgcctgctacaaggcgctcaacgagcaccatgtcctcctggagggtaccctcctgaagcccaacatggtgactccaggctccgactccaagaaggtgacccctgaggtgattgctgagtacaccgtccgtaccctccagaggaccgtccctgctgctgtgcctgctgttgtcttcctctctggtggacagagcgaggaggaggccacccgcaacctcaatgccatgaacaagctcagcaccaagaagccgtggtccctgtctttctccttcggccgtgccctccaggcgagcaccctcaaggcctgggctggcaaggtggagaacctggagaaggctagagctgccttcctcgccaggcgcaaggccaactctgaggctaccctcggcacctacaagggtgatgctgccgccgacaccgagagcctccacgtcaaggactacaagtactgagttgcttctctttgcgtgcccgttttggaactcctgcctacgagctaggttgcggagtgtggtttgctcgttagagcttattttcggacatccaaaaaacatgcttcctatgtggggtgatggttatctttatatttgtatgttaattagtctctttgctgttaaatttcgtgtaagttggtcctgccgatggagaatcgagcagctccctttttttgttctatcaactatgctgtaattctggctatgtatcggcaaaaacaattctatatgctgagttggagtcggcaaaaattcatcg

SEQ ID NO: 28756 - DNA, 1423 bp, Zea mays
  Clone ID: LIB4763-017-F8_FLI
ccggggcttctgctgcttgcttcagacacttgagagttgagactcactcagtcactagcaagtgcctcctcacatggcagcggcagcgctagcggcgtggtggtggtctctgtcgctcctgctggctaccatcgtcggcggaggcagcgcctcaccgtcgccggtgcccggctgctacacgcgcatcttcagcttcggcgactcgctgaccgacacgggcaactacgtccacctgacggcgagcagccacagcccctacggcgcgccgccatacgggaggacgttcttcggcaagcctaccggccgcgccagcgacggacgcctcgtcatcgacttcatcgcggaagagttcgggctggcgaaggtgacggcgatccaggcgggcacggcgcccggggacttccagaacggcgccaacttcgccatcatctcggccaccgccaacaacggctccttcttcgcgggcaacggcatggacatcaggcccttctcgctggacacgcagatgctgtggttcagaacccacctccgcgagctcgtgcaggcggcggcggcggcggcacagcatcagaacggcagcggcagcgtgggcgcgctgctgagcggcgcgctggtggcgctgggcgagatcggagggaacgactacaacttcgccttctcgcggggcgtgccgcgggacgcggtgcgcaggttcgtgccggccgtggtggacaagctggcgggcgccatggaggagctcatcgcgatgggggcgcgcgccttcgtggtgcccgggaacctgcccttcggctgcacgccgctgtacctgcagcggttccgcgccaacggcgggtggtgggactacgacccggcgacgggctgcctcgcctggttcaaccgcttcgcgcagtaccacaaccgggtgctcgcggcgcggctcgacaggctccggcgcctgcacccggacgtgaccatcgtctacgccgactggtacgaggccacgatgagcatcttccaggaccccgggaagctagggttcacaaacgctctgcggacttgctgcgggaaccagaccgtgccgtgtggcaggcccgggtgctccgtctgcaaggacccgtccacgtacgggtcctgggacgggacgcacccgacggaggcggtgtacaaggtgatcgccgacggggtgctgcacgggccgcacgcgtcccctgttcctctcgccgacacctgccctccgacatgacccttagaagatttataattggcagcttttaagagcggtggtaacatctgaaccatactagcttgtgtgattttaagggcggcacggtaatagctttgtttaagaatacaggtgaggttggcatatttcgatagcatacacacgaagctctcaagtgattgagtttgtataaatatcatggcaacaacgatccttcactcc

SEQ ID NO: 28757 - DNA, 854 bp, Zea mays
  Clone ID: LIB4763-017-H10_FLI
ctcgaggccggccgggctagcctctatctcattccactccgacattcacgtgcagctgtcgggagcaggcaatggcgccggatctaagcgaactcgccgccgccgctccagcccgtggcgcctacctcgccggcgtcggtgtcgcggtcctcctcgctgcctccttcctcccagtagccgagtcgtcctgcgtgcgagataactcattggtgagagacataagccaaatgccgcaaagcagctatgggattgaaggattgtcacatataacagttgctggtgcgctcaatcatgggatgaaggaggtggaagtgtggcttcagacaataagtccaggtcaaaggacgccaatccacaggcattcctgtgaagaagttttcactgtcctcaaagggaagggtacgctcttgatgggatcaagctcactaaagtacccagggcagccacaggaaattcctttctttcagaataccacattttcaatccctgtaaatgatccacaccaggtttggaattctgacgagcacgaagatttgcaagttcttgtgatcatatcgagaccgcctgctaagatatttttatatgatgattggagcatgcctcatacagccgcggtactgaaattccccttcgtctgggatgaggactgcttcgaagcagcaaaagacgaactctaggtcacaagtgtttcctgcaatttatctgcttcatccatgatcctgctggtgctggactactacaattctcagcactagttgtaataaagccagtgcgcttttcatgtataattctgtattgtggctcgcgaaaataaaatttggcaacggtttatgaacttatgcgcttgtggagtt

SEQ ID NO: 28758 - DNA, 1711 bp, Zea mays
  Clone ID: LIB4763-018-E10_FLI
aaaggccgagttttagctccggttccagaaaaaaactcggaaccagatctcaaaccacacaatccacggctgctccttcgctggacaccgagaaaccgtcaaggcgcaacgaacgaacttgcagcaaaatttcccggagaccctcgagcaaaaatctggtctggttcaaactcgccttttgcctgcgggcggcgggcgttcttacgggccatgtcgcagcgcgacggcgacctcaccggagctcatccggaagaaggagaccgccacgccgttcgaatggatggctccgacgacgatgagctggaccaacctacgagtaaagcgactgagcacatcacggctatggacgtgaggaaggggaaggatatgcaagggatcccctggaacgtgatgccgactacaagggacaagtacaggcagtcacggctgcaggggtacgccaactttgagaacgtgcctaattccggaaggctttctgagaaggaatgcatgcctgcagagaaaggccaactctactacgagtttcagcacagcacgaggtcggtgaaaccgaccatccgtcatttccagttgaggaatttagtgtgggcaacaacaaggcacgatgtgtatcttatgtcaaacttttctgtgcttcattggtcggcaatgacttgtaagaagcaagaagtcattaatcttctaggacatgtgacaccgtgcgagaagcaccatcggaattactacgaggggttttatcggactccagtcagtactttggcggtgaagcataacttgcttgttactggtggatttcatggggagataatatgcaagtttctggatcgtcaaggagtaagctactgttgcaagacaacaaatgatgacgacggtattactaattctctggagatatttgagaagcctagtggttctctgcacttccttgcgtcaaacaatgattgtggacttagagactttgacatggaaaaatttcgaatatgcaaccacttccattttgcttggcctgtgaatcatacatcgttgagcccagatggtaaacttgctgctattgtgggggacagtcctgatggacttctgattgacgctaattcaggaaagacggttcacaaactccatggccatttggattactcctttgcgtcggcatggaatccagacggccgaacattcgccacggggaaccaagacaagacgtgcagggtctgggacgtccgcaatctctccagatcagttgttgtattgggtggcaacatcggagccgtcaggtcgattcgctacacgccagacgggaagttcatggcgatgactgaacccgcggacttcatccacatcttcgatgttgagagtgggtacagcaggaagcaggagctggacttctttggtgagatcgcaggcatatcgttcagtcctgacactgaagctctctttgtcggtgtgcatgatcgcttcttcagctgctgcctcctctagttcaatcggcgacggttctactcgtaccttgattcaacactgtgagcttgtgctggtgtagacctgtgaggtcgacatcacaggctgtagaagcaagaaagttgtggctaatgttcataggtgttgctgtgaagaaactggagaacggtgcgtttacttttgctgaacaagctgtagatattcagcgacccatcttttctgggtgatcagagtttaagattcccgctttctgttaaag

SEQ ID NO: 28759 - DNA, 1060 bp, Zea mays
  Clone ID: LIB4764-001-A11_FLI
ccggggcaaggattagagtggaaaccccttttgtcttgagggaaaaaaaataaagggagaagctctcctgagaagcatatagcaccagcggaacacgggaacggcggaagcaaacaactagaaattccccagcccggttctttgcgtgcggttgatctcgtcggaggcccggccgcggttccccaatccgccatcgaattcgatggcggccaacgccgggaataagatccgcaacgccaagctggttcttcttggagatgtgggcgctggcaaatctagcttggttcttcggtttgttaagggacagtttgttgaattccaggaatcaacaattggagcagccttcttttcccagaccttagcggtcaatgatgagactgttaagttcgaaatctgggatactgccgggcaggagaggtatcatagcttggctcccatgtactataggggtgcagctgctgccattgttgtctatgacatcacaaatccggcctccttcacccgtgccaagaaatgggttcaagaacttcaagctcaaggaaatcagaataccatagtggctcttgctggaaacaaggctgatatgctagatgcgaggcaggtgccagcagaggaagcaaaggcgtatgctcaggagaatgggctcttcttcatggagacatctgctaaaactgcaatcaatgtgaatgacatattttatgagattgcaaagaaattgcttcaagggcaacaagctccaagcccacaggctggaatggttctgaatcagagaccaaatgagaggacggtcagcagttcttcatgctgctcttgagctgtgtttcaacctcgtagtgccgttatcaaatgtatcagaggaggtttatggaaaatatcccatgtcgcttgtgtggctgcctttcaggctgacgtgctcccattctgctcctcatttcctttcacatgttcgtcatgtaaatgccaatactaaagtgtcactgcatgggcagaagtgttaccaaagtgttgattgtgctcttatcatttgattaagcccctgcttaagttctcaattttgcat

SEQ ID NO: 28760 - DNA, 993 bp, Zea mays
  Clone ID: LIB4764-001-D2_FLI
ctcgaggccggccgggagcgcccgtcgcctccctttccccttccctccctccctctccccgcgggccgccagaggcaatttcgccctcgattcgaccccgattcgtccgcccgcgaccgggattccctccgccaagcgcggatctgaacgctgcgctccgtgtcgccgctcgaatccgccatgaagggggccaaatccaagggcgccgccaaggccgatgccaagctggcggtgaagagcaagggggcggagaagcccgccaagggcaggaaagggaaggccggcaaggaccccaacaagcctaagagggctcccagcgctttcttcgtgttcatggaggaatttcgcaaggagttcaaggagaagaaccctaagaacaagtctgtcgctgcggtggggaaagctgctggcgacaggtggaaatccctgagcgagtcggacaaggctccctatgtagccaaggctaacaagctcaagctcgagtacaacaaggccatcgctgcctacaacaagggcgagagcactgcagctaagaaggctcctgccaaggaggaagaggaggaagatgaagaggagtctgacaagtccaagtcggaggtcaatgacgaggatgatgaagagggtagtgaggaggatgaagatgatgacgagtgatggagctcctcgagacaatggaccgtgcttcatccaacaatggagcggctacacaaggccccgtggcgatcacaaaaaaggagcctatatccatgtactagaattattcagtttcactccacatcgtgatgttttatttttacttttgtcgtgctataacggatagcgctcctcgttggcgccactggcgggtggttctgcctctggtctggtgtgtttgtgtgtggtcacacttgccagccagcagaggcgcctgcttgtacctagattactgtttccattgtcgtcatcatcggctaacattgtcataatgtcagtttgggtaatgttagattaaat

SEQ ID NO: 28761 - DNA, 1413 bp, Zea mays
  Clone ID: LIB4764-002-C7_FLI
ccgggggcccagcgccgaccaaacagggtcctcgtcacagaacacgcgccccacccgtctcgtcgcgccgatccagcccggcgctcggccccgcggcgtgtgcaatggccctcgacaccgccgacgccgacgcgccgcgcttgcgcctcgatgccagcgccgccgtgcacccgctcctctccgacgacggctccacggccgcgggggagacagcggagcagctggacgccaggtacgcgccctacgcgcgccgggacgcgtacggaaccatgggccgcggcccgctgcccgcggcgcaggcggtgcggctggcgctggccgccgccgtgctcctcccgctccgcttcgtcgcggggatgctcgtgctcctgctctactacttggtgtgccgcgcgtgcacgctgttcgtggatgcagatggggggcggccgaggttggcggggtggaggaggaaggccgtgctgcgatcggggtgcgcgctctcacgggtgatgctcttcgtcttcgggttctactggatccgcgagacccgcagaaggtccactaatgctaagggtttaaatcaggaccaatttgaagaatcccaaaggccaggggcaattgtatctaatcatgtctcttatgtggatattctttatcacatgtcagcatcctttccaagttttgttgctaaggagtcagtgtccaggttgccacttattggtctcataagcaattgtcttggatgcatttttgttcaacgagaatcgaagtcttcagaagctaaaggtgtctcaggcgctgtaactgaaaggatccaagacgtttgtcaagataagaataccccaatgatgttgttgtttcccgagggaactactacaaatggggattaccttcttccatttaagactggagcctttcttgcaggtgcaccagtgcagccagtcattttgaaatacccttacaggagatttagtccagcatgggattcaatggatggagcacgtcatgtgtttttgctgctctgtcaatttgtaaatcacatggaggtggtccggttgcctgtatactatccttctcaactagaaaaagaagatcctaagctctacgcaaataatgtcagaaaactaatagcaatggagggcaatttagttctttctaatattgggctggcagagaagcgcgtgtaccatgcagcactgactggtagtagtctacctggcgctagacatgagaaagatgattgaaagacgttgcgtcgctttttctgtaacagacagccgaggaacacttaaaaatgtaactgtgtgcgtgtttttatacctgtaatgtggcagtttatttgtttgaggaggctgttgagtacccttctcatactacattgtacaaaaacaatgtccaatgtccattatagtttgatgaggttcgtgctcc

SEQ ID NO: 28762 - DNA, 563 bp, Zea mays
  Clone ID: LIB4764-002-E11_FLI
ctcgaggccggccgcgcggtgacgctctcgctgctgggtctgacgggcgccgtcgcagccagtgctgtcagcgacctctccgtcttcctctcatgctccagccaggcaatagagaaggccacccagaaccagcagatagtcaatgctatcggtaaaccaatcatgcggggaccctggtacagtgcttccattgctgtgaatcacgcgaagcattctgtctcctgcactttcccggtgtcaggaccccaaggaaatggtctgctcaagctcaaagctgtgcgcttgggagatgaatcttggtattcgtatgtgcagcccaccgagtgggagatactgataatggatgccatccttgatgtccatacggaagatggtaagcacacgacaatgcgggtaacaattccagacaacacacctgctccgccaccagcagactgcaccgcgtgcaagtcccatgcagcggagaagtgaatccattgacagatgttctttccacagtttcttacgaaaataatttattcacacatttctgatgcaaccggctattatcggaaaataattcc

SEQ ID NO: 28763 - DNA, 716 bp, Zea mays
  Clone ID: LIB4764-002-G4_FLI
cctcgaggccggccgggacaccccctccagctctccgccgtcggccatgggtcaagcctggggtaatctccaagataggctccaagggcggcggtggaaggagcaccaggtgaggaagatcaccgacaaggtgttcgaccgcctcacggaggacgcccagaagcgcgacaaggaggccctcagattcgaggagtgacatcaataagtacttgccggggccgcaccacgaccccccgtccaaggagaagctcagggccatgatggaggagtacgacgtgaacctggacgggctcctggaccgcgaggagttcgcggagttcatccggaagctgaccgcggactcgctgtgctcgatcagcgtgaagctgctgatcacgctggtggcggcgccggcgctggcgatggcgaccaagcgggcgacggagggcgtccccggcgtgggcaaggtggtacgcaaggtgcccaacgcgctctacgcctccgccatcaccctgggcgttgtgctgttgcagagatcaaccgagggcgtcgagtgactcgcgctgctgaaactgcaatgtcgtcggctgtgtagatggagcagcgtatctaggataggtgttggttctttacggcttgtgcggtgaattgatctgtgtatcaattcgatgtgatttatcctggatttgggacaaatagttgtggatccttgtgaattgtcttgcttttttaccttt

SEQ ID NO: 28764 - DNA, 1581 bp, Zea mays
  Clone ID: LIB4764-002-H12_FLI
tcgaggccggccgggagttgcttctagagaacgcaaccatgcgcgctctagaagaaacgaccggatccatctccctcgactgcgttgtgtcgcgccgcagctatccaatccaacaccgatgttgtgccgtgccgccgccattgggagtcaggaccacgtccgccgagtggctatggcaaggcgacgacccagcgcatgacgagcagaggagcagccgccgaccgccgtccgccgaggcaatcgccgccatcgggagtcgggaccgtgtccgccgagtggctgtggcaacgacccagcgcaggacgagcagaggagcagccgccgaccggcgttcaccgaggtaacgacacaaccatgcagtaagccttcttgtgtctggacagtaaacgcttggaggaagaatttggatccatgtcccatgcgtgcaaagtgaaattcttaattattggttaacggaaatgttgactcaaattactagaaattaaaaataaattgctaaacgcattgttttttacagtcatacgttaaaaataaaataaatgaaaaaagaggtagttgaagttagttggaatgaaatgtgtattttatatttaaggtaggagataggggaatatgtagaggtaactgttgtgggatgagtgttgtgggatgagtgaatatagagaagaaaattttgctaacgtgacatatagagggaaaaatttagaaggaaccgctgcagacagcctaagcaagcaataccttcctctatatttgcatgcccaagagtcacctgcacgtgtcacacggacccatcgccatttggataatgggtgccacgtgtgcaaagcccagccaatgggatggaagtagagcctcgccctcacgccctatccatacggcaaccacaacccccctcccgcctcagtttcctccaccggacacctgctgccacccacacgatcaaaaacaaaaccaagctccaagcacccatagccacacaccacaccaagtcaagcaaggagctcgatcgacagcaacagcggccttcatgaactccagcttcatcgggctcaagcccgctgcggcagcagcccaggccaccgcggctgcctcatcgccgatgaagcagcaggtgcaggtcgcgcccgagggccgccgcgccgcgctgctcggcctggcggccgtcttcgccgccgtcaccgccaccacggccggatcagccaaggctgaggtcttcgacgagtacctcgacaagagcaaggctaacaaggagctgaacgacaagaagaggctggccaccagcgctgccaactttgcgcgcgcctacacagtcgagttcggcagctgccagttcccctacaacttcactgggtgccaggacctcgccaagcagaagaaagtacccttcctcagcgacgacctcgagatcgagtgcgaggggaaggagaagttcaagtgcggctccaacgttttctggaagtggtgaagcagcgtgcgtctgatatgatggaggagacctggtgtacatgtacgtgtgtatctagatgcatgtgcccagactgcaggaaacatgatatcaaatttgactgtcattctgtc

SEQ ID NO: 28765 - DNA, 1178 bp, Zea mays
  Clone ID: LIB4764-003-A1_FLI
caagcaccagaccaattaactagcttcttctagctctagctaggctcgtctgctgcaagaaggtaacagcgcaggcatggaggggaaggaggaggacgtccgcctgggcgccaacaagttctcggagcgccagcccatcggcacggcggcgcagggcacggacgacaaggactacaaggagcccccgccggcgccgctcttcgagcccggggagctcaagtcctggtccttctaccgcgccggcatcgccgagttcgtcgccaccttcctcttcctctacatctccatcctcaccgtcatgggcgtctccaagtccacctccaagtgcgccaccgtcggcatccagggcatcgcctggtccttcggcggcatgatcttcgccctcgtctactgcaccgccggcatctccggcgggcacatcaacccggcggtgaccttcgggctgttcctggcgaggaagttgtccctcaccagggcggtgttttacatcatcatgcagtgcctgggcgccatctgcggcgcgggcgtcgtcaaggggttccagcaggggctgtacatgggcaacggcggcggcgccaacgtcgtcgcgcccggctacaccaagggcgacggcctcggcgccgagatcgtcggcaccttcatcctcgtctacaccgtcttctccgccaccgacgccaagaggaacgccagggactcccatgtgccgatcctcgcccctcttccaatcgggtttgccgtgttcctcgtccacctggccaccatccctatcaccggcaccggcatcaaccccgcgcggagccttggcgccgccgtaatttacaaccagcaccatgcctgggctgaccactggatcttctgggtcggccccttcatcggcgctgcgctggctgccatctaccaccaggtgatcatcagggcgatcccgttcaagagtaggtcttaaaggagccgatgctgctgcttcgagatgctgccggtcttgaaaggatggattcgtggctgtttcaaatgatcccctactatgttacgtgcagttccattccattcctctttcaaagttcggagctgcttttatccgaacccagacttgtaattcatctgtaccaattgtgtaatatgccgcgcctctgttatgtgcaattcaaaattatgagacagcgagtcaagctttaagagcg

SEQ ID NO: 28766 - DNA, 1054 bp, Zea mays
  Clone ID: LIB4764-003-B12_FLI
ctcgaggccggccgggagtagcaattggagcaaaagaaggcccaaccagcacgtcacactgctgcgaaggacaccaggcccgccgaaaattgtgtgaacgcccctttcttctaccccaagacgaactcggtgaactctttccggttcgttcccctacgcccgtttctctctcgtcgcgcaacatcagagcacaagcgaggaacccagtccagtcccgggaatggagtgcgtattgggcgtggttggccgcgacttcgcgctggtggcggccgacacctccgccgtgcagagtattctcgtccacaagaccgacgaggacaaggtgatggtgctcgactcgcaaaagctgatgggcgcttcaggggagcctggtgatcgggtgcaatttacggagttcatacagaagaacctccacctgtaccagttccggaacaccatcccgctctcaaccgccgccgccgccaacttcacacgcggcgaactcgccacagcccttcgcaagaatccatatatggtcaatattattcttggtggttatgataaggatgttggtgcttccctctactacatcgactacattgcaaccttgcacaaaattgacaaaggtgcttttgggtacggatcatacttctgtttgtctcttatggacaagttgtaccacccggacatgactgttgaggaagcagtagatcttgttgacaagtgcatcaaggagattcggctgcgattggttgtcgcgcctcagaactttgttatcaagattgttgacaaggacggggcgagggagtacgccaggcgtgaactcgtcggtgacaatgcacctgctgaagctgcaaccgcagttgttgctgcctgaggcatgaactcgtttgaggttggaatgtgttagttgtttctcagcgatgctacttatgcgatcacaggatactggtggggggcccacaactgttttatcaattttagcccagtcgtgtaattctgtttctgcactattcatgtctgctgagtacaagtagtgtttcacgcttgaacaaatacaatactgttgctgtgc

SEQ ID NO: 28767 - DNA, 875 bp, Zea mays
  Clone ID: LIB4764-003-F11_FLI
cctcgcgcaggacatatattcagtgatggaacacaaggaggccggctgccagcagccggagggcccaatcctatgcatcaataactgtggtttctttggaagcgctgccaccatgaacatgtgctccaagtgccacaaggagatgataatgaagcaggagcaggcccagttggctgcctcctccatcgatagcattgtcaatggcggtgataatgggaaaggacctgcaattgctgcaactgtaggtgtggcagttcctcaagtcgaggagaagactatcgccgtgcagcctatgcatgtcgctgaaaccagcgaggctgctgctgttatcgcgaaggccaaggaaggcccaaaccggtgcgcaacctgtaggaagcgtgttgggttgacgggttttaactgccgatgcgggaacacgtactgttcgatgcaccgctactccgacaaacacgactgccagttcgactatcgaactgcagctagggacgctatcgccaaggccaatccagtggtgaaggcggagaagcttgacaagatctgaggcgggggcattgggtaacgaaaaatggttgcgatctgcaagaattcagcatgtctctttgctgctttatcattgaacttcccattcttgtcttgctgtcacgtcccctggggttcaatactatgatgcacacagcatcctggcagctgcaagaattcatccccagtcgagtcacgaaaatggtttgcgtgttggctatgtcgtgtaagcttattcagttattcttggtggtttgggtcggtatcgtgtcattccccgtttaggtagctctgtaatctactattctcatgtgtgttgccttccaatcagtaatagtaatcagcaattgtctgcc

SEQ ID NO: 28768 - DNA, 868 bp, Zea mays
  Clone ID: LIB4764-003-F2_FLI
ctcgaggccggccggggaagcccaccgaattccctgcgattcctctcccctcgcctcctcgtctccccctaggggatcgtcggagaggaatcgcaaagagggccgtctcatccgagttaaggaagccatggagcacaaggaggctgggtgccaggcccccgagggacccatcctctgcatcaataactgtggcttcttcggcagcgcggcgaccatgaacatgtgctctaagtgccacaaggagatgataacgaagcaggatcaggccaagctggctgcctcctctatcgacagcatcgtgaacggcagcgacgccgtcatggagccggttgttgctggcagcaacacggtagtagctgttgcccaagtcgagttgcaaacaatgaacgtgcagcagcccgctgatgttgccggacccagcgagggggtggcggcgatctccaaaggggggaaggtagggccgaaccggtgcagcgcctgcaggaagagggttgggctcacgggattcaactgccggtgtgggaacttgtactgcgcgctccaccgctactccgacaagcacgactgcaagttcgactaccggactgctgccagggacgccattgccaaggctaatccggtggtgaaggcagacaagctcgacaagatctagggggggttccctacggttggtgtcaggaagattgtaaaccgcggtaactcgtcatgcggaactgctgccttgccccccgcgcctttctcttccatgtttgctgctacaatcttgttgttgggcattgcagtgcacggtgcacacttgtgtagcccgcctccgagaattctcctgcctctgcatctggtcagttcaaaaatgatttgcatgttggcc

SEQ ID NO: 28769 - DNA, 654 bp, Zea mays
  Clone ID: LIB4764-003-G6_FLI
taccctcgaggccggccgggaaaaaaccctacagttcatccctctcgacgcgccgccgccgtctcgccgctgcccacccagattgacggctccaattggcgcccatggcggaagaaaccaacataaaaaaggaggaagaggagttcagcaccggtcctctctcggtgctcatgatgagcgtcaagaataatacccaggttcttatcaactgcaggaacaacaagaagttgcttggccgcgtgcgagccttcgatcggcactgcaacatggttcttgagaacgttcgtgagatgtggaccgaggtaccaaagaccggtaaaggcaagaagaaggctctcccggtgaacaaggacaggttcataagcaagatgttcctccgcggggattcggtcatcatcgtcctcaggaacccgaaatgagtagcctgtacacgtagagagtctgtttgctagcagtacgttgtgctattgggtgtaaggtgtatgccaaatgctcaaagcatgggagtgtaagtcgcggcagaattcgccatgtgtgttgatggtgggggattcagcttaagacaggatgctagggctgggttttgcttcttgtagcagacttgaacatgatgctcggcaatctcttgtcccccgtcagctcggcaatctctcc

SEQ ID NO: 28770 - DNA, 622 bp, Zea mays
  Clone ID: LIB4764-004-B12_FLI
taccctcgaggccggccggggctgatgggggttactagctgagaaccccaccacaacccagcgccggcagtcgccgtcatcgatcgatcgccggaaaactaacccctaacgatgtctggagccggcgaggaggacaagaagcccgcggagggcggcgcccacatcaaccttaaggtcaagggacaggatggcaatgaggtgttctttcgcataaagaggtccacccagctgaagaagctgatgaacgcttattgtgaccgccagtctgtggacatgaatgccattgcgttcctgtttgatggccgcaggcttcgcggcgagcagacccctgatgagctggagatggaggacggcgacgagatcgatgccatgcttcaccagaccggaggcagcgttcctagcaccacctaaaagcatcagtcgcggagcttcgttttgctctccgccctgcgtagtagtaaacaaaagggaaaaagtctttttaaggaacttgtgatgctctggctccttgtgccattgctgagggacatccttagcctttgtttagtagtatggtttggtactttgttctgtcatcactcgtttatctatccctaatacatgccgccatgattgtactccc

SEQ ID NO: 28771 - DNA, 963 bp, Zea mays
  Clone ID: LIB4764-004-B6_FLI
ctcgaggccggccgggacgtcatttcgtcaaaatcgagcactgtcgtgttcttatccggtcccgaacaaacaaccccgcttctgccggccgttttggaggcgttgcggccatggcggcttcgaagcccatcttgtatagcgcgtggatcagctcctgctccttccgagtccggatcgccctcaacctcaaaggtgtggattatgagtacagggctgtgacaaggaacgatctagattacgaaaagatcaatccaatcaagtatgttccagcattggttgatggggattttgttgtttctgactccctggcaatcatattgtatcttgaagataaatatcctcaacaccctcttttgcctcaagatctcaaaaagaaagctataaatctgcagattgcaaatatagtttgttcaagcattcaacctcttcaatgttatgctgtaattggtctgcttgatggcaccttaggctctaaccagagccttcagattgttcggaattacaccgacaagggatttaaagcaatcgaaaaacttctggaaggttgtgacagtaaatatgctactggagacgaagtccaactggcagatgtgtttcttgcgccccagatgtatgcaggcgtgacgcgcttcggaattgatatgtcaaagtaccctcttctggagaggttctacaaagcctatatggagatcccagcatttcaagtcgcggttcctgaaaaacagccggatgcgcctgcgtccccatactgaaacggaggcagcaaccatattgatattcaaattgatttggttatcttggaatcatgttgtatgtagcatgacatagaaggccacgatgtatgcctatttgtttcgtacacattctggtttgtccgaagaatttcacagtaaataaggcccgatgatttgtgtagtagtgttaatagaaaaaagaaacagaatgcatggctcctgttgtact

SEQ ID NO: 28772 - DNA, 661 bp, Zea mays
  Clone ID: LIB4764-004-D2_FLI
taccctcgaggccggccgggagcagcagcagcacagtcatccacactaacgaacgaactcttgctccgatcacgagctagctgaggtcgacgatggcggctgtgctgaacagcaggaagacgccgcaggtggtggccgtgctggtggtggtggcgctgctggcttcgtccgcgtcggcggcgatcacctgcgggcaggtggggtcgtcgctggcgccgtgcatcccttacgcgacggggagggccagcgcgctcccctcgtcgtgctgcagcggcgtcaagagcctcaacagcgcggcgcggaccagcgcggaccgccaggcggcgtgccgctgcctcaagagcctcgccaacagcgtcaagagcgtcaacatgggcaccgtcgccaccatccccggcaagtgcggcgtctccgtcggattccccatcagcatgtccaccgactgcaacaagatcagctaagttacgacgaccaagctaataagcctaccgaacgtacacgtacgtcccgcgcgctgcacgagtgatgaagccagggaagaaataaaataaagctagctgtattgccaggagcagcatgcagtatcgatctatatatatactgtactgtagtactctattatatatgtatgtgtggcctgcagtgcgagttgcttcgattc

SEQ ID NO: 28773 - DNA, 783 bp, Zea mays
  Clone ID: LIB4764-004-F5_FLI
ctcgaggccggccgggacttttccggcctcccattcctcgcgcggcgaccacccgattcgaagcgtgcggagagaccgaagaagcgggagagatggctcgtaccaagcagactgctcgcaagtccacgggagggaaggctcccaggaagcagcttgccaccaaggctgcccgtaagtctgcccccaccactggtggagtgaagaagcctcaccgctaccgccctggaactgttgccctccgtgagatccgcaagtatcagaagagcactgagctgctgatcaggaagctgcccttccagaggctcgtcagggaaattgcacaggacttcaaaactgatttgcgtttccagagccatgcggtgcttgccctccaggaggctgctgaggcataccttgttggcctgtttgaggacaccaacctgtgcgccatccatgctaagcgtgtgaccatcatgccaaaggacattcagctggcaaggaggatccgcggcgagagggcctaatcgccacctcaaacatcgtgacaaaaacatgaagtcctggggttattgttaatctggtgccattgtaaggacatatgagtagggtttgttttgtggatcgcaagtttctcttctgctactgttgctgctacctttgctggtgttattgctagggtcgaatacttaagttaactatgcgctgacagtctggactagcagtgttatgtgcgctgctggaccttgcgcgcaatgctgtggccgatttgttcgttaatgtcaagaattgtgttacagtgcgtag

SEQ ID NO: 28774 - DNA, 1087 bp, Zea mays
  Clone ID: LIB4764-006-F4_FLI
ggagcaaaaccccatccaattccaaacaactcttctcgccatttcaccaccgcctcgccccatcctccccccctcccgtcgcgccagtcaacagcctgtctgcctcttccctcgccacccatggccaccgtagcgcgcaccctcgtcgccgcatgcccggcacggtctctcctccgcctccggtctcggcgcctcccgtcctcctcttccatccgtcccgcgcggcaacgtgccggcgtcgggtctgttcgctgcatggctaggcgaccggattcctcctattccccgctgcgttcggggcagggcggtgaccgtgcaccgactgaaatggcgccgctgttccctggttgcgattacgagcactggctcatcgtcatggacaagcccgggggcgagggcgccaccaagcagcaaatgattgattgctacatccagacccttgcccaggtgctagggagtgaagaggaggcgaagaagaagatatacaatgtgtcctgcgagcgctattttggattcggatgcgaaattgatgaagagacctccaacaaactcgaaggtcttccaggggttctttttgtgcttcctgactcttatgttgatgctgagaacaaggattatggtgctgagttattcgtgaacggtgaaatcgttcagcggtcgccagaaaggcagagaagggtggagccagtgcctcagagagctcaggatcggccacggtacagtgaccggacccgctatgtgaagcggagggagaaccaatcttaccagcgatgatgtctccgtttctggagatggaaaatgccagggtttccacaggtgtgccatactggagatgcaggagcaacccccactaccccacatgagaatggcatccgttgtgtttgctgcgctttctaagcttgacaagttgacatgcttatgcgtttgggcttgtacctctggttgatatgacggtgtatccttttaactccgcatagtattgtgtttgaagtcttctttagtcagaaattattgacgattatcagatggcgtactgctactgcattgatcatctcggaaggggcccgcccgttcgaccgttcccccc

SEQ ID NO: 28775 - DNA, 1088 bp, Zea mays
  Clone ID: LIB4764-007-A6_FLI
ctcgaggccggccgggggtgtggccgccacctcatcacaggcgcccaccactaccaggccaccccaaaacgcaacgcatcgcgacggctccccaaccccaacaagtctcttggccaggtctccctctccccggctctccgccttcctcttccagtccccgcgcgcgagatcgccgccccgtgtgggccctagatcccgatggcctcgcgccgccgcaccctgctcaaggtcatcatcctcggcgatagtggggttgggaagacttccttgatgaaccaatatgtgaacaagaagttcagcaatcagtacaaggctacgatcggcgcggatttcctcaccaaggaggtgcagttcgaggacaggctcttcactctgcaaatatgggacactgctggccaggaaaggtttcagagtctcggcgttgcattctaccggggagcagattgttgtgtcctagtctatgatgttaattctatgaaatcatttgacaacctgaataactggcgagaagagtttctaattcaggctagcccatcagatcctgataatttcccttttgctctgttgggtaacaaagttgatgtagatggtggcaacagccgcgtggtatctgagaaaaaggcaaaggcatggtgtgcttccaaagggaacatcccgtactttgagacgtctgctaaggacggaacgaacgtggaagacgccttccagtgtatcgtgaagaatgctctgaagaatgagccagaggaagaactgtatgtgccagataccgtggacgtggtgggtggcaaccgggcccagagatcatccgggtgctgttaaggcacgaggcatcacgaggcgttgtgaccatcatcgtcggttatgcagtgaccaaacaataccttagcattgctgggtctccgtggttatctacgtatccgtattccatttgttacctttccagtctcactgctatgtacccaagggcgcctgtcaattcggtggactttgtgcagtttcatcagtagcgtcataccttgtgaatacaattggccaaaataagaggaagtgtaaactaaagttcatgctttatggttttgtgttgtact

SEQ ID NO: 28776 - DNA, 732 bp, Zea mays
  Clone ID: LIB4764-007-G12_FLI
tcgaggccggccgggccttcgctgcgccgccgcctccgacatcgtctcttcgtccccacgagcaaccgataatccgccggcgctgagatgttggtttatcaagacctcctatctggcgacgagctcctgtcggattcattcacctacaaggagctcgagaacggcgtcctgtgggaggtcgagggaaagtgggtcacccaaggtcctgttgatgtagacattggtgccaatccatccgccgagggtggtgaggatgaaagcgttgatgacacagccgtgaaggtggttgatattgttgacacattccgtctacaggagcaacctccttttgacaagaaatcatttgtctcttacataaaaaaatacatcaagaatctcactgctgtgttggagccagagaaagcggatgagttcaaaaagggtgtcgagggtgcaaccaagtttctccttagcaagctgaaggaccttcaattttttgttggtgagagcatgaaggacgaagcgtccgtggtattcgcctattacaaggatggtgccactaatccgacattcctctatttctctcatggtcttaaggagatcaagtgctagattagttacccatgttgggtactatatatgttctattgttatagccacaactatagctgccctgcctgaactgaactcaggttttttttaagaaaaaactgtccaagattggattgcttgttaaagctaaatattgttaag

SEQ ID NO: 28777 - DNA, 829 bp, Zea mays
  Clone ID: LIB4764-009-B7_FLI
tcgaggccggccgggacacctgtccgccgccgcactctgacccccgcccccgccgcagcgagacgagagcgcccgcaccaaggcaagccgaggcggcgagcgggacaggtagcggctgcctaccaccgccagcctccgcccacccaacaacagcaccaccaccacagtccggtcccgtgccttccaattcggtcgtcccacgcatcgattgcgcccgcgcacgcgcccgtcgctttgccgtcttcgaccacccgcaagcaacctatatagcgcgccgcgaattccgcccggcttcctcgtcgcccgccgcagtgagtgagaggaggaggtcgatggatctcaaggacggcgagaggaggggagcggcggggccggagccggggccgctgtcgaggcaggggtcgatctactcgctcacgttcgacgagttccagaacacgctcggcgggacggggggagggctcggcaaggacttcggctccatgaacatggacgagctgctgcggagcatctggacggcagaggagagccaggccatggcgtcggcctcggcgtccgcggcgggggcggccggcgacggcggggcggcgctgcagaggcaggggtctctcaccctgccgcgcacgctcagcgtcaagacggtggacgaggtctggcgggacttcgcgcgggaggggacggctggcggtccggagtcgcagcccaatcgacagccgaccctcggggagatgacgctggaggacttcctggtcagggcgggggtcgtccgtgacaaccctgccgctgctgctgctgtccccgcgcagccggttgcgacgcggccctcgag

SEQ ID NO: 28778 - DNA, 957 bp, Zea mays
  Clone ID: LIB4764-010-D11_FLI
ccgggaaacggtcccaccccacccggagaaaacgaaacaaaccaaatctcgctgcgagctgggcggcgagggcgcgcggcgccatggcgaggagcaggacgtcgggcggcggcgagtacgagagcggcagcgaccacgacggcgcgctgcagaagccgctgctgcccaacagcgggagctggtaccggatggggatggggtcgcgccagtccagcctcaacgccgccggcacctcctccatggccgtcctgcgcgagtcccacgtctccgccttcctctgcacgctcatcgtcgcgctcggccccatccagttcggcttcaccggcggctactcctccccgacgcaggccagcatcatccgggacctcaacctctccatctccgagttctcggtgttcggctcgctgtccaacgtgggcgccatggtcggggcgatcgccagcggccagatggccgagtacgttggccgcaaagggtcgttgatgattgcagcaattccaaacgtcattggttggcttgcgatctcctttgcaaaagactcttcatttctgtatatgggacgcttgcttgaaggattcggtgtcggtatcatttcctatgtggtaccggtatacatagcagagatatctccacaaaacatgagaggggctcttggctctgtgaaccagttatctgtaacccttggtatcatgtttgcctacttgctcggcttgtttgttccttggaggcttcttgcagtaataggaaccttgccctgcatagtgttgatacctggccttttcttcattccggaatctccaagatggctggcaaagatgaatatgatggatgattgcgagacttctctacaagttctgagaggattcgatgctgacatcactgcagaattgaatgatataaagagagcagtaatgtcagcaaacaaaagggctacaattcgtttccaagagttgaacc

SEQ ID NO: 28779 - DNA, 1468 bp, Zea mays
  Clone ID: LIB4764-010-D5_FLI
ccgggactcgtagtcgtaggcactttcatctgtgccctctgcgttcgagatcgatctcagctggcaccgtcccagttcgccatggcggaggaccggagccccaagcccatccactgcaaagcggcggtgtgccgagccgccggcgagccactcaccatcgaggagatcgtcgtcgacccgccgaaagcgtacgagatccgcatccgggtcgtctgcacctcactctgccacaccgatatcaccttctggaaagctaaggtggcaccggtgtttccaagaatactagggcatgaggcgtacggggtagtggagagcgtgggggagcacgtggagggcttcgcggcgggggacaccgtggtgccgacgttcctggggcagtgcgagcgctgcgccagctgcgcgtcggagcacagcaacgtgtgcgacgcggtgccgttcgtcatcggccccgggatgcggcgcgacggcaccacccggttccgggacgcgcgggggagcccgctgcacgacctcctcgccgtctccagcttcagcgagtacaccgtcgtggacgtgaaccaggtggtcaaggtcgaccccgccgtgccgcccaagctcgcctgcctcctcagctgcggcgccggcaccggggtaggagcagcgtggaggtctgccaaggtggagccaggatccactgttgcaatctttggcctcggatctgtcggtttggcggtggtccaaggcgcgaaaatgtgtggcgcatccaagatcatcggcgttgatctcaaccctgacaaggaggaagtagggagatcgttcggcgtcacagacttcgtcaatccatcgcagctggacaagcgttccgtcgtagaggtgatcgttgagatgaccggcggcggcgtggactacagcttcgagtgcatcggcgtgccgtcggtgatgaccgacgccttcagatgcaccaagatggggaagggcaagacgatcgtgctggggctggggagggacagcgacgaggtgtgcctgccgtcgctggagctgctgttcgggaggtgcgtcatggggtcgctcttcggcggcctgaagcccaagacccacatccccgtcctcgccaagaaatgcatggacaatgagctgcagctggacgcgctggtcacgcatgagcttggactgcaggacatcaacaaggccttcgacctgctcctgcaggggaaaagtctgcgctgcatcctctggatggacaaggacaagtaacggaaggagaggggcggccggaccagtccttcgtgtctctgaataaatttgccctgttttttcagcgaggcgtcgctgaaagctggtgttagcggcgaccaagactatctgttcctgaaagccggtgtatcagtatcgtttcgttgtctgaactgattaaatcctaatatcgatagattagactctccccagcaaccgctgtcccctgaataaagtgattcatcatctctttttt

SEQ ID NO: 28780 - DNA, 1106 bp, Zea mays
  Clone ID: LIB4764-010-E2_FLI
taccctcgaggccggccgggatggaagggagacaggcgaatagaggacagctgagctgcagcatcccgtccaacagcaggaccagcgagggtgtacctccgcctcgcgagtcgggaccatgtggacgggcagcccgctgctccgggacgttggcgccgccgtgctcacgggagtggccgcggctgccgtgctccgcttctgggaagagatcgccaaccgcgccctgctggaccagaaactctgcaggaaactggtgcacataactgtaggattagtgtttttccttatgtggcctttgttcagctcagatgatgtgtttgctccatctctcgctccgcttatcatcatcatcaacatcatgaaagtgacagtgattggacttggtttcgtgaaagctgaaggtgtggttaactccatgactaggcatggagaccgcagagaacttctcaagggcccgctgtattatgcctgtgctataactctgacaacaatagttttctggaggacatctcccatctcaatcgcggtgatctgcaatttgtgtgccggagacggtgttgctgacatagctgggagacgattcgggcatgttaagctccctcacaaccctgaaaaatcatatgccgggagcatcgcaatgttcttggcaggtttcatcgcatcagtactgttcatgtgctacttcaacattttcgggtttgttgagaagagctggagcatggttgctgcctttggtgtgatatccctggctgcagcagttgtggagtcactcccgatcagcacacgccttgacgacaatctgacggtttctgtcgcatcagtgctagttggcgcccttgttttctattccattggagccagaaacctgtgctgcatgagcagcgaagtcaggagaagtatcccagcaaccgttggaatggtgtttgcaggcagcagctgaaacatgtagccacagtccaggagcagagttgagcagaaagtgcagagaaaggagttctcttcaatcctgatgtgtgtgtatcttgtactgtaaccattttcctgtctaagcagacattcttgtaactttattaagaaagaggtaaagcgagaataagttcattacg

SEQ ID NO: 28781 - DNA, 679 bp, Zea mays
  Clone ID: LIB4764-011-D3_FLI
aaaaaaaatacgcctctgctttagcagtagtttccaaccagaggcaggcacctcgagaggcgggtgaacatggagggcgataagaaggcgggcgccgtggcagagaaggaggcggcggcggcggatcagagcaaggaggtggccgctggtgatgtgagcctgaaggagctgtccaggaggctcaacgacttcgccaaggagagggactgggagcagtaccatagcccccggaacctgctgctcgccatgatcgctgaggtcggggagctgtcagagctgttcatgtggaaaggggaggtgcgcaagggcctcgccgactgggacgaggcggagaaggagcacctcggcgaggagctctccgacgtgctgctctacctggtccgcctctccgacatgtgcggcgtcgacctcggcgacgccgccctcaggaagatcgtcaagaacgccgtcaagtacccggcgccgtccaaggaacaaggcgcctgatgatgacgaacaataccacctgtgatgccttctttgatgctttgggatagctggtgcctggtagagaaccaggcagcgagatatatgaactgatgcttggaccctttttccccctttttttgcggtgcatgctcgaaggttaataattgatacaattattgctcggctgatatgatagcttttttttgccttt

SEQ ID NO: 28782 - DNA, 1138 bp, Zea mays
  Clone ID: LIB4764-012-C6_FLI
ccgggaagaggaaccttagtccctagcaacgcctacagcgtcacggaacaccggcgaaccaaacctcggagaaaccctagcaaggccgcttgcccctctcaggcgcgacacagcatcggcgactagcgatgacaggatatcgcagccgcagtccgagccgaagctacagcccacggaggcggtacagccggagccctcctaggcgcaagcgctacgacgatccacgcgaccgctaccgctgggccggggccggcggaggcggggaccgacgtggttacggtcggccgttggcgcagtccggtctcctcatccgtaatatctccctcacagccaggccagaagatattcgagctacatttgagcaattcggccctatcaaggatgtttacctgccaaggaatttccacacaagggaacttcgtggttttggatttgtcagattccgctaccctgaggatgctgcagttgccaagcgtgagatgcatcatcaagtcattggtgggcgagaaatttcaatagtttatgctgaggagaatcgaaaaacgccacaagaaatgcgcatgagaacaagaactagtggtaggtacatggatgaaagatacacaagactgtcaagatctccaaggtctcgttcccactcttattcaccaccgccttctccagttaggcgtgacttcaggggcagggagcgcccggatagttattcccctcagtactcgcactctccacgccctcgggacagcaggcaccacaggtcagatggtcgctctccaactccaagcctagatgaccacaaacctaaggcgacaccagtcaatggtggacatggtccagcagttgcatccagatagtatgatgccattatggatgccttgaattgtgttcggaggctggagactgcagactatcttttcaccaatcttctctaagagatgagtagggttgtagtaaacagatacttggtagttgtattacaggtgatggtttcggttatgaggtgcgctgttgcttttgtgacgctgctttaatgctttcccaaccgagggtagtagggtaccgtcgtggaattttgcgtgtttgttttttggctacaatattactaatactagtaacttgctcgcttcgagcgcgagtctcg

SEQ ID NO: 28783 - DNA, 1711 bp, Zea mays
  Clone ID: LIB4764-013-F2_FLI
ccgggaaacttaaagccctaaacccatcttgctcccccctcgtctccactgctctgctgctcctcgcgccgccgcagcgacgtaatggcttccgccgcggtgctccggaacgccggctcccggcgcctcttctcctaccctactctccgcgccgctgcgatatatgtaccttctgcgctacccgatgcgcccgcggcggcggcagcgccggcccagccgccaccgacggccgggaccctctgggcgaggtctatggccaccttcacgcgcacgaagccccatgtgaacgtcggcaccattgggcacgtcgatcacggcaaaaccactctcactgctgccattaccaaggtcctggccgaggcagggaaggccaaagccgttgctttcgacgagatcgacaaggctccggaggagaaagccagaggaatcaccattgcgacagctcacgtcgagtatgagacggctaaaaggcattatgctcacgttgattgtccaggtcacgcagattatgtcaagaacatgatcactggagctgctcaaatggatggtggtattcttgtcgtgtcagctcctgatggcccgatgccacaaactaaggagcatattcttcttgcccgtcaggttggtgtaccttcccttgtgtgcttcttaaacaaagttgatgctgttgatgatccagagcttctggaacttgtagagatggagcttcgggagctcctcagtttctacaagttccccggtgatgagattccgatcatccgtgggtctgcgttgtctgctttgcaagggaacaatgatgagataggaaagaatgcaattttgaaattaatggacgcagttgatgagtacatccctgatcctgtgaggcagcttgataagcctttcttgatgccgatagaagatgtgttttctattcagggtcgtggaactgttgttactgggcgtgttgaacagggaacaatcaaaactggtgaagatgttgagatcttgggtttggcacagactggtcccttgaagactacagttactggtgttgagatgttcaaaaagatactggaccatggagaggctggtgacaacgttggccttcttctccgtggtcttaagcgtggtgatgttgagcgtggccaggtggtgtgcaaacctggtagtctgaagacatgcaaaaagttcgaggcggaaatatatgtcctgacaaaggatgaaggtggccggcacactgcctttgtcacaaattacagcccccaattctacttcaggacagctgatgtcactggaagggttgagctgcttggggagatgaagatggttttgcccggtgacaatgtaactgcgaattttgagttgatatcacctgttcctcttgaacctgggcaaagatttgcgattagggaaggaggaagaacggtcggtgctggagtcgtctccaaagttcttagctgatcagtttccactttcttctccgtagcaattcagtgaacaaacgagtgttgatatgtccgaccgggttagaaacgagcgcaaagcaccgggttttcttttgcatttttcttggaatgcctgagcaaaggcagagctggcctggccagtggccaccattttattgttgaggcgtggtgctgtgtaacaccacggttagtttggttgacacgcaagttgggcataactttgattgaataatactagtctcatcataaacatattttctagc

SEQ ID NO: 28784 - DNA, 1038 bp, Zea mays
  Clone ID: LIB4764-014-A9_FLI
ccgggaaactcaccgggaagaaggaaccagaagctaaccggcacgtcgtgaagctaaccgggattccgggaagcagagacgtccgcccgtcgcccgtcgtccgtcgtcatggccgccgtggaggtgtgcgtgaaggccgccacggggaagcccgacacgctcggcgactgcccgttctcgcagagggtgctgctcacgctggaggagaagaaggtcccctacgaggtgaagctcgtcgacctcgacaacaagcccgaatggtttctgaagatcagcccagagggtaaggtgcctgtgttcaacggtggtgatggcgaatgcattgctgattctgatgtaatcacccaaaccattgaggagaagttcccaactccatctctggtcactcctgtagaatatgcatcagtgggatcaaagattttcccagccttcatcacattcttgaagagcaaggatgctagtgatggttccgagaaggcgcttctggatgagctgcaggcactggatgagcatctcaaagctcatggcccctacatcaacggggagaacgtatcagcagctgatcttagcctggggccaaagctcttccacctccaggtcgcactggagcatttcaaaggctggaagatcccagaaaacctaaccaacgtccacgcctacaccaaggctcttttcagccgtgaatcttttgtcaagactaagccatccgaggagcacgtgattgcgggatgggcgcccaaggtgaacgcgtaagcacatcgtgatttggtgctaactggtggactccatccatttatctgatcagtcgttgtcagtggtgtgtgtaggtgtcacatctgtagcctagacacatgattcagttggaataaatgcagtgtcgtgtgatcgtgtctcgagtactcagttctggctgttgcaattgtgcgtgtctgttgccggtttcgttcaagaccatgggcatctcttgatctgctatgagagcatgcatatagtgtaacgtgggctcctaataatggaactgcttttatgcttgcggcg

SEQ ID NO: 28785 - DNA, 853 bp, Zea mays
  Clone ID: LIB4764-015-E12_FLI
tcgaggccggccgggcccatttcgaagcccaccgaattccctgcgattcctctcccctcgcctcctcgtctccccctaggggatcgtcggagaggaatcgcaaagagggccgtctcatccgagttaaggaagccatggagcacaaggaggctgggtgccaggcccccgagggacccatcctctgcatcaataactgtggcttcttcggcagcgcggcgaccatgaacatgtgctctaagtgccacaaggagatgataacgaagcaggatcaggccaagctggctgcctcctctatcgacagcatcgtgaacggcagcgacgccgtcatggagccggttgttgctggcagcaacacggtagtagctgttgcccaagtcgagttgcaaacaatgaacgtgcagcagcccgctgatgttgccggacccagcgagggggtggcggcgatctccaaaggggggaaggtagggccgaaccggtgcagcgcctgcaggaagagggttgggctcacgggattcaactgccggtgtgggaacttgtactgcgcgctccaccgctactccgacaagcacgactgcaagttcgactaccggactgctgccagggacgccattgccaaggctaatccggtggtgaaggcagacaagctcgacaagatctagggggggttccctacggttggtgtcaggaagattgtaaaccgcggtaactcgtcatgcggaactgctgccttgccccccgcgcctttctcttccatgtttgctgctacaatcttgttgttgggcattgcagtgcaaggtgcacacttgtgtagcccgcctccgagaattctcctgcctctgcatctggtcagtct

SEQ ID NO: 28786 - DNA, 1270 bp, Zea mays
  Clone ID: LIB4764-015-F6_FLI
gctagcgctagcgcaactcagacgctgcaggcaggtcggcactcggtgcgcacccgcaattcgcaaacccgcacaacctccccaccccccaaacccatccctcccgcgagatctctcaccggagtcaccgccccccagatccgcctcccctcgccggcgcgctcgcgtgttttccgctcgtccgccgccatgtcgcacaaccacggcgacacgatcccgctccacccctcgtcggcgcagtccgacatggacgagatcgagagcctcatccacgccgcgccatctccggccaccgttctccccgcgcggccaccgtctccgacgcgggcctccattcccgtatcctcctctccggcgttggcgccggcgcccgtccccacgaagccgcctctccccgccgcctccattccgatctccgtctctgtctcccccgttctaacgtccgtctccgttcccatcggcgctgacgggtttggacctccacccaacacgctcacagagccggtatgggacaccgtaaagcgagacttagcacgcatcgtcagcaatctcaagctcgtcgtcttccccaatccctaccgcgaggaccccggcaaggcgctcagggactgggacctgtggggtcccttcttcttcatcgtcttccttggcctcacgctctcctggtcagcttccgttaagaagtctgaagtatttgctgttgcatttgctgtcctggcagctggggctataattctgaccttgaatgttctgcttctgggtggacacatcatcttcttccaaagccttagtcttcttggttattgcctgtttccactggacgttggtgctctactttgcatgctgaaggacaacgtgatacttaagattgtcgtggtgacaatcacattggcatggagctcctgggctgcctatccattcatgagtgctgctgttaacccaaggagaaaagctctggccctatatcctgtcttcctcatgtatatctcagttggtttcctcataattgccattgattaacgggggggcaagcttcctagtaacatctgaatagttgtgactttcctcgtggatggttgaaccaccagaaaacatacaagtttgagtagacaatgcttctaccctgtagtctgaatcgtctcgtggggatttcggtctttacatgatccggaggcttaaggttgtaaaattagttgaaaatctatacctgttgtaaagggctgaacttttgaccactgaattgactgccaagcttcttatactgtgtgag

SEQ ID NO: 28787 - DNA, 766 bp, Zea mays
  Clone ID: LIB4764-017-B1_FLI
cccgggaagcagttcaaatgcctctgccgtgttcaaatgaaaacgattcatttcgctttgagacgaagtagttcaaatgcctctgccatgttcgatcgatttccagaccgagacaagcgccgcagcccgcagcagaaggctcgcgacatcagctcgagccagctgacgggatccacacggtgccatgtcttcccggcggccgtcgcatccgtcccaccggaatccacggcgattcccgtccgcctgctatcttctagtactcacccttgccctcctcgtcgtctccgccgccgccaagtcctcccgccgccccatctccgacaacgagatccggcagaagaaggaggcctgctacaccgacgtcgagaacgggctgtggggatgggtgtgcaggtactcgccgacggagaaggagaactgcgtgctgcgctgcctctcgccggagtgctacgacctcatatacggcggggatccgcttgaggaaggggagttggactatgttcgaagccaggagtacaagtattgtatgcacaaatcatcccttggagaaagcttggatggtgtgaagggatccttcagctactcatgaaggaatgagaagaaaaaggttctgttagtctgctgtaaattttatttacaatcttgaacagacatgcatctttttagataatggaattgtaattccagactttgctttttctcaaagcatcaccggtgcatcatcttatattaaacttacaaatgcaaattaaacattggattcaac

SEQ ID NO: 28788 - DNA, 1289 bp, Zea mays
  Clone ID: LIB4764-017-B10_FLI
ctcgaggccggccggggcctgccttaaccattcctcccaacaccacctcgcctgcgatcttcgtagcctccgtcgcgtcgagcatcgatcatgtcggcctactgcggaaagtacaaggatgagctcatcaagaatgctgcctacattggcacccccggcaagggtatccttgctgctgatgagtccactggcaccattggcaagcgcctttccagcatcaatgtcgagaacgttgaggagaaccgccgtgccctccgtgagctcctattctgctgccctggtgctctccagtacatcagcggtgtgatcctcttcgaggagaccctgtaccagaagaccaaggatggcaagccttttgttgatgtcctcaaggagggaggcgtcctccctggcatcaaggttgacaagggcaccattgaggttgttggcactgataaggagaccaccacccaaggccatgacgaccttggcaagcgttgcgccaagtactacgaggcaggtgcccgctttgccaagtggcgcgctgttctcaagattggccctaatgagccatcacagcttgccatcgacctgaacgctcagggtctggctcgctatgccatcatctgccaggagaatggtctggtgccaattgttgagcctgagatccttgttgatggccctcatgacattgatcgctgcgcttacgtcactgagaccgtccttgctgcctgctacaaggcgctcaacgagcaccatgtcctcctggaggtaccctcctgaagcccaacatggtgactccaggctccgactccaagaaggtgacccctgaggtgattgctgagtacaccgtccgtaccctccagaggaccgtccctgctgctgtgcctgctgttgtcttcctctctggtggacagagcgaggaggaggccacccgcaacctcaatgccatgaacaagctcagcaccaagaagccgtggtccctgtctttctccttcggccgtgccctccaggcgagcaccctcaaggcctgggctggcaaggtggagaacctggagaaggctagagctgccttcctcgccaggtgcaaggccaactctgaggctaccctcggcacctacaagggtgatgctgccgccgacaccgagagcctccacgtcaaggactacaagtactgagttgcttctctttgcgtgcccgttttggaactcctgcctacgagctaggttgcggagtgtggtttgctcgttagagcttattttcggacatccaaaaaacatgcttcctatgtgggatgatggttatctttg

SEQ ID NO: 28789 - DNA, 711 bp, Zea mays
  Clone ID: LIB4764-017-B4_FLI
ctcgaggccggccgggcttcgctgcgccgccgcctccgacatcgtctcttcgtccccacgagcaaccgataatccgccggcgctgagatgttggtttatcaagacctcctatctggcgacgagctcctgtcggattcattcacctacaaggagctcgagaacggcgtcctgtgggaggtcgagggaaagtgggtcacccaaggtcctgttgatgtagacattggtgccaatccatccgccgagggtggtgaggatgaaagcgttgatgacacagccgtgaaggtggttgatattgttgacacattccgtctacaggagcaacctccttttgacaagaaatcatttgtctcttacataaaaaaatacatcaagaatctcactgctgtgttggagccagagaaagcggatgagttcaaaaagggtgtcgagggtgcaaccaagtttctccttagcaagctgaaggaccttcaattttttgttggtgagagcatgaaggacgaagcgtccgtggtattcgcctattacaaggatggtgccactaatccgacattcctctatttctctcatggtcttaaggagatcaagtgctagattagttacccatgttgggtactatatatgttctattgttatagccacaactatagctgccctgcctgaactgaactcaaaggttttttttaagaaaaaactgtccaagattggattgct

SEQ ID NO: 28790 - DNA, 1455 bp, Zea mays
  Clone ID: LIB4764-017-F8_FLI
gagggtcatccgagttgccagccaattttgcatccccaccaccaatccaccacccacacccagtgacagagacagaaggccgggcagggccacgcgacgcgacggagatggagcacacgaatcatcgccgccgccgtcaagctttggccaccgtgtcggcgacgacgacgctcctgctgcctctcctatgcctcgcggcgttgacgacggcagaggcgctgcgcgagcacagggacgagggcggcgctagcagcagtagtggcggaagcggaagcggctgcggcaagcaatcgccggccgtgtgggtgttcggggactcgtacgccgacacggggaacctgggcgacctcgggcgggagctgacccgagagtggtacgacccgtacgggaccaccttccccggccgtcccaccggccgcttctccgacggccgcgtcctcaccgacttcatagcctccgcgatgggagtgccaacgccggtggcgtacaagctgcgcaggggcgctgcgcgcgggctcgtggcgcgcggcatgaacttcgccgtcggcggcgcgggcgtgatggacaccggcaacttccagcgcaacatcggcgagcagatcgacctgttccaggcgcagcgcccgccgccgccgccctccgcccgcggctgcgacggcggggtcgcggtcgtcgtcgtctccggcaacgactactcctacgccgccgacaaggacaacagcacaagcgccgcgatcgcctacatcccggcggtggtgcggcagctccgggaacagctgctgcggctgcgcgacgaggcgggcatgcgcaaggtggtggtcaccaacctgcaccccatggggtgcacgccgctcttcacccgcgctctcaactacacggcctgcgacccgctggccaacgcgggcgccgtgcagcacaacgcggcgctccagtccgtgctcgccgcgctcgacccggccaaccgtaccttcctcctcctcgacctcaacacgcccttcgccgccttagtcgacggcgcggcggcggcgacggcggaggagaggttcgcggagccgaggcggccgtgctgcgagagcttcagcgccgacggccactgcgggcagcaggacgacagcggcaggcggcagtacacgctgtgtagcgacccgagcaagcatttttactgggacgacgtccacccgacgcaggccgcgtgggccgccgtctcccgaacgttcaggcccatgattcaagagttccttctgtctacctgatcacagctttgtttcgatcagatgagataaaaactagcactacttatcaaaagaaccaatcaatcaagggtggagagctaaccgagttgttggattagtgaaattctcctgtcattgttactctaaaaatggctggattttttgtattaaaaaaaatccacggtgcgagatgttggaataaaaaagcgatcttcagttcaac

SEQ ID NO: 28791 - DNA, 1003 bp, Zea mays
  Clone ID: LIB4764-017-G1_FLI
ccggggcgttagcaccgggagccaaatcattcgccactccccaaccgtcccaggctcagcactagcagccatgccgcacctcgtcctgcttctcttcctcggcctcggcgggctcctgcccgcggcgtcggccgccgacgagcagttcgtgttcgacggcttcaagggcgcgaacctcagcctcgacgggatggccacggtcacgccggacgggctgctcatgctcaccaacggcaccagccagctcaagggccacgccttctacccggcgccgctgcggttccacggggcgcccgacggcacggcggcagcgatggagtccttctccacggccttcgtcatcggcatcatcggcgcgttcgaggacctcagcagccacggcatggcgttcgtggtcgccaagagcaccaacttcacctccgcgcttccgggccagttcatgggcctcgtcagctccgccaccaacggcaacgccaccaaccacctgttcgccgtcgagttcgacaccatcctcaactccgagttcgacgacatgagcggcaaccacgtcgggatcgacgtcgacggcctcaactccgtcgacgccgacaacgccggctactacgacgacgccaccggcggcgcgttcaggaacatgagcctggtgagccgcaaggcgatgcaggtgtgggtggacttcgacggccggaccatgcaggtcaacgtcaccatggcgcccctggaggctgcccgccggccaaggaggcccctgctctccaccaccgtcaacctctcctccgtcatcgacgacggcaccgcctacgtcggcttctcgtcggccaccggcatcctcttctgccgccactacgtgctgggctggagcttcaggatgaacggcgccgccccgccgctcaacgtctcctccctgcccaccctcccggtcacggcacccaggccgaggtccagggcgctggagatcgtgctgccgatagcgtccgcggcgctcgtcttcgcggcggccctc

SEQ ID NO: 28792 - DNA, 1306 bp, Zea mays
  Clone ID: LIB4764-017-G7_FLI
ctcgaggccggccggggccttaaccattcctcccaacaccacctcgcctgcgatcttcgtagcctccgtcgcgtcgagcatcgatcatgtcggcctactgcggaaagtacaaggatgagctcatcaagaatgctgcctacattggcacccccggcaagggtatccttgctgctgatgagtccactggcaccattggcaagcgcctttccagcatcaatgtcgagaacgttgaggagaaccgccgtgccctccgtgagctcctattctgctgccctggtgctctccagtacatcagcggtgtgatcctcttcgaggagaccctgtaccagaagaccaaggatggcaagccttttgttgatgtcctcaaggagggaggcgtcctccctggcatcaaggttgacaagggcaccattgaggttgttggcactgataaggagaccaccacccaaggccatgacgaccttggcaagcgttgcgccaagtactacgaggcaggtgcccgctttgccaagtggcgcgctgttctcaagattggccctaatgagccatcacagcttgccatcgacctgaacgctcagggtctggctcgctatgccatcatctgccaggagaatggtctggtgccaattgttgagcctgagatccttgttgatggccctcatgacattgatcgctgcgcttacgtcactgagaccgtccttgctgcctgctacaaggcgctcaacgagcaccatgtcctcctggagggtaccctcctgaagcccaacatggtgactccaggctccgactccaagaaggtgacccctgaggtgattgctgagtacaccgtccgtaccctccagaggaccgtccctgctgctgtgcctgctgttgtcttcctctctggtggacagagcgaggaggaggccacccgcaacctcaatgccatgaacaagctcagcaccaagaagccgtggtccctgtctttctccttcggccgtgccctccaggcgagcaccctcaaggcctgggctggcaaggtggagaacctggagaaggctagagctgccttcctcgccaggtgcaaggccaactctgaggctaccctcggcacctacaagggtgatgctgccgccgacaccgagagcctccacgtcaaggactacaagtactgagttgcttctctttgcgtgcccgttttggaactcctgcctacgagctaggttgcggagtgtggtttgctcgttagagcttattttcggacatccaaaaaacatgcttcctatgtgggatgatggttatctttatatttgtatgttaattagtc

SEQ ID NO: 28793 - DNA, 778 bp, Zea mays
  Clone ID: LIB4764-018-B2_FLI
atcgacgacgacaaacagcaagagcaagcaagcaagcaagagaggacgacatggcggcgccacggagcctggcggaccgcgcgctgcgcggcgtggcggacctgatcaagctgctcccgagcggcacggtgttcctgttccagttcctgagcccgctggcgaccaacaacgggcactgcgccacgctgaacaaggcgctgagcggggcgctggtggcgctgtgcggcgcctcctgcgccttctcctgcttcaccgacagctacgtgggcgcggacgggcgcgtgtactacggcgtggtgacgcggcggggcctgcgcaccttcacgcccgacccggacgccgccgcccgggacctgtcggcgtaccgcctccgcgccggcgacttcgcgcacgccgcgctctcgctgctcgtcttcgccaccctcgcgctcctcgacgccgacaccgtcgcctgcctctacccggcgctggagctcgccgagcccaccatgatggccgtgctcccgcccgtggtcggcgccgtcgcgggctacgtcttcatggtgttccccaacaaccgccacggcgtcgggtaccagcccacgcccgccaccgaggacttccagcacaaatactagccagccggttcttcgtcgttgcagagtactgtactgcgcgtgtgcctttgattgtctgattcattcatttgcttggtggtgtggggtgcctgccgtcggtctttgtacgtcgtctctgcttgttcatttgggctttcattaacttacggaatcaggtctgg

SEQ ID NO: 28794 - DNA, 1126 bp, Zea mays
  Clone ID: LIB4764-018-D10_FLI
ccggggttgcgtagccaaatcgagatctccgtctcccccgtgacgaatcccacgcccacctctccccgacccggctggccgcagcaacagcgcatcgcaccgggaggcgggagccgaagaaccaaacaggagatggcgtcggcgctgtcctccctgcgctacggcgacagcctctcggtggtgggcatctccgccgcgacggccgtgctctgcgaggccatctcctggcttctcatctaccgcaccgccacctacgactccctccgcgcctccatcgaacgccactcacgcaagctggacgccatgaagtccggctccaactcctccggcgctgcctcctcctccgcgcaggccgcgtcgtcgcgggctaagaagatggaccgcgtcgagaccagcctcaaggacgccgcgcgggagctctcgcttgccaagctcaagtcgggcgccgtcgtcgccgccgtgctcttcgtcgtcttcggcctgctcaactccctcttcgagggccgcaccgtcgccaagctgcccttcgcgcccatcccgctcgtccagcggatgagccaccgcggactgcccgggaacgatcccaccgactgctccatggtcttcctctacttcctctgctccatgagcatccgaaccaacctccagaaactgctcggcttcgccccgccgcgcgcggttgctgcggccggcgggggtctcttccccatgcccgatccgaaagttaactgaggagaaaaatggaagacttattactgttgatgacaaatccttagcactagctcggactctgatcttctggggacttgagaagtgtctctgatgcatggaaatatgcacactttgaatggttatatctagattaaatctcggtatttcagcagtttaaatgaagggcaggtctggcgtagtggtgagagctgtcctcactcatcaggtctctccgcatttacggggaaagacttgcctcgatttatctcttctctagacccaactcggagtctccgacactaagtctgctctttatttcatcagtttatatgacttctctgttcgatttgttagagcaggaatcacatctacagttctgcaaaattttcatcaagggatatggagctataatctg

SEQ ID NO: 28795 - DNA, 780 bp, Zea mays
  Clone ID: LIB4764-020-C10_FLI
cctggaatttatccagacactcagtactgcacactgccatcgctctcgtcccttcgctgccgctctatctcggccggagccatgggcggcggtggcgcggcgctgctgctggtgatgtgggcgggcgtggcgtcggcggccgtgtacgaggtgggcggcaccattgggtggaccgtcatgggcaaccccgactacgccgcctgggccagctccaagcagatcgtcgtcggcgacactgttgtgttcacgtataacaagcagttccacaacgtgctggcggtgagcaaggcggactacaagaactgcatcgccaccaagccgacggccacctggtccacggggaacgattccgtcgtcctcaacaccacgggccaccactacttcctctgcggctacccgggccactgcgctgccggccagaaggtggacatccgcgtcgcctcctctgctgccccttccgccgcaccgtcgccgaccccctccggctccaagccctccggcggcgccacggccgcgccgtcgccgcaccctaacgccgcgccgaaggccctctccgccagctccgtggccgcggctgtcgccacgtccctgctctccctggccgcggccgtgctggcatgatcacatgatcaggatcgtgtagtgctggccaggggacggcgcctttgtgaattgtgagagctcgtactgtgtctgtgtgactgtgtctgtggccgtatgagcatttagccctggatctgtgtttgttactctgtcttcttcgggaacatcgattatccc

SEQ ID NO: 28796 - DNA, 1352 bp, Zea mays
  Clone ID: LIB4764-020-C6_FLI
ctcgaggccggccggggaggcttagaattcggatccctcccagcacatccatccccttcccttccctcgtgccccgccggctctccagcgcgccgtctctgcccagatccaggagatatgcctcgctatgatgatcgctatggaggcacgcgcttgtatgttggcagattggccccccgtactcgttctcgtgatttagaatatctcttcggcaaatatggaaggcttactgtttgtggcaaccctttccgcagaatacgagaagtggagttgaagcgcgactatgcatttattgagttcagtgaacatcgtgatgccgatgaagctcggtaccaactagatggcagggatgtcgatggaagtcgcattgttgttgagtttgctaaaggggtcccacgtggtccaggtggctcacgtgaatatatgggaagaggccctccaccaggcacaggtcgttgtttcaactgtggaatggatggtcactgggcaagagattgtaaggctggtgactggaaaaataaatgctaccgttgtggagaaagagggcatatagaaagaaattgccagaacagtcctaggagcgtcaggcgtgaaagaagttactcacgctccccatctccacgccgtggaagaggtcgcagtccaagctatagcaggagcaggagtcgtagccggagctatagccgatcgaggtccctatctggatctcctaggggaggccgccgtgaccgtgatgataggagatcgaggagtcttagctacagcaggagccccgtgcggtcgccacctgcaaaggaaaaggagcgcagtcccacacctggcggaagcaggagcccaaggagtcgcagcccacaggatcaggtgatgagcccaccacctaaggataacggcgacaggaatggttcagaccgtggcgacagccccagagggagggaagacagcaggagccgcagccgcagcccatccggtggtaaccgcagccctgcagctaatgggcgtagcccgagccccagaggtgaccgtggcccgagccccatggctgaccgtagcccgagcccaaagggcaatggtaacaacgatggtggtgatgatgatactggccgtggtggttcccccacaggaagcaagtcaccctgaacgctgcaccgtctcagttcttaggtgcttcgtgatgcagtgggcaaacataccaaagacgtgatagctgtatcgtttccctatctgagacgtggacttatttagcttgctttgatcttggactcttattttttctcttatggatatatgatatgatgccttcgggctggcttggatctgaataagtgaatgtggacacgcatgttgtgtcgccg

SEQ ID NO: 28797 - DNA, 1580 bp, Zea mays
  Clone ID: LIB4764-020-D6_FLI
ctcgaggccggccgggctctcactcgcctcgacgcgcctctgaaagttcggagccgccggcccgtccgcctccctctccgcctcccgtccccaaggccaatagttttcaagtggcaatggcggaccaggctaaccaacccactgtccttcataagctcggtggccagttccacctgcgctcgatcatctctgaaggtgtacgggcccgtaacatatgcccatctgtctcatcttatgaaaggagatttgccacaaggaactacatgacccagagccttttgggcccttcgatgtctgttagcggtggcatcaatgtcccagtgatgcggaccccgctctgtgctaatgctcctgctgagaaaggaggcaagaacttcatgatcgatttcatgatgggcggtgtttcagctgctgtttcgaagactgctgctgctcccatcgagcgtgtgaagctgcttattcagaaccaagatgagatgattaagtctggtaggctatcagagccgtacaagggtattgttgactgcttcaaacgtaccattaaggatgagggtttctcttccttgtggaggggtaacactgctaatgttattcgttacttccctactcaggctttgaactttgcatttaaggactacttcaagaggttgtttaacttcaagaaggatagggatggttattggaagtggtttgctggcaacctggcctctggtggtgctgctggtgcttcctctttgttttttgtgtactccttggactacgcgagaacaaggttggccaatgatgcgaaggctgccaagggaggaggtgaaaggcagttcaatgggcttgtggatgtctaccgcaagacactcaagtctgatggtattgctgggctttaccgtggatttaacatctcctgtgttggaatcattgtttatcgtggtctgtactttgggctctatgattccatcaagccagttgtccttactggcaacctccaggacaatttctttgccagtttcgctctgggttggctgatcactaatggtgctggtcttgcatcttaccccattgataccgtccgcagaaggatgatgatgacatctggtgaggctgtcaagtacaagagctccttggatgcgttccagcagattcttaagaaggaagggcccaagtccctgttcaagggtgctggtgctaacattcttcgtgccattgctggtgctggtgtgctttctggctatgaccagctccagatcctcttcttcggaaagaagtacggttccggcggtgcttaaatggagaaatatgatgacgaacaagagcagtgtgtgttcccggtcctttccaatcaggatctggtgaagtttttgcctttcatatcgaagaaattaataattcatgtagagggaggattcttccaacaatttgttttggatggagacttagatctccaaacactcgtaactatcctactaggtggtgacatcagtccccaaaaacgtttatggtcatagagtctgcccttcgtttgtcagtcgggcaatttttcttgcatacaatgccttcgtttaagtatcggatgagttgctgcgacg

SEQ ID NO: 28798 - DNA, 1023 bp, Zea mays
  Clone ID: LIB4764-020-E12_FLI
ccggggttcctgttcccctcggcgacgccagtacggcagtacgccacgccagtgcccagttgcattgactcctccccggtccccacatcttgccgccaatggatgtcgacgggcccgcccccgccgacgcctctgccaggcccgccaccaacggcgaggccccctccggcgcccgcgaggtcgacgtcggcgaggaggacacgctcgccggcgtcctccgcagcttcgtcgacggcgtctggtacccggacgagcctctgctccggcggctccgggcggcgtcctgcgacgccgcgccgcgcctgaggggggcgtcccggaactccgcgcgggacctgcttgagtggaccaggcggggcagcggcctccgcgccatcctcgtcatctcggtcgggacaatcacgcttatagcattgactggccttctgaccttcatgttcttcctattggttgccactgctaatgcgatcattgtctcagtcttgatgtcactggccgctgccggaggattcttggccatcttctttgcttgcttggttgcagtgtatattggagcagtatcagttgctatcttagtcatttctgcgactgttatctcagcagttgttggaattttggttgctaccggttgggttgggttcttctggattatctggttcaccgcaaggaagagcatggtcctgacgaagcactccttcggcatgacgagctcggcaatccaatcgtattccgcgtcccggcaagtgaagcagaagcctgtcgactgaggctagttggttgcgtcctgtatgaagcggatatatctatctatgtgaatcacggttttgctgtttgtttgtttgtaagagtgtagaagacagcttgcttgttgcggcagctctgtttctctcggtgactaggtgtataatgctagctctgaactttggcagcatgtacgttcggcatggcggtcaatgctgttatttaaaggatagtgagcagatgttaatgtttatagcaaataaaagcatgttaatgtttatc

SEQ ID NO: 28799 - DNA, 1573 bp, Zea mays
  Clone ID: LIB4764-020-F7_FLI
gttcaaataaagaagacaaaacacccggccagcacacagaatgacaggaagcagcaaacctttcggtttctcgagcgcaatgcctctcgctgcagtgctccttcccctcctcgtcctcggcgcgtcgtcggtgtgtcaaggtcaaggcgctgcgagccacaacatcacggccatcctggcggcgtacccggagttcaccgacttcagcgctgccctggtcagcaccggcgccgcggcggagatcgaccgccgcagcaccgtcaccgtcctcgccgtcgacaacgccgtcatggcgcggctaaaggcgcagaagctgcagctcgacgacctgcagcgcgtgatctacctccacgtcctcctggactacttcgacgccgccaagctaggcagcatccagggcggtttcgcccaggccgctagcctctaccaggcctccggcaaggcgcaggggagcgacgggatcgtcaacatcaccgtgttccgcgacggccgcgtggcggcgttcacgccgtcgggcccctccaacaggttgccgaccgccttctaccagcgatccatcaaggaacaaccatattacatcgccgtcctgcaggtgagggacctgatctggtctccggcgccggcggacggggtgcaggctccaccgcccgcgccgcagcccgacgcggcgccggggttgacggatctgctgtccaagaacggctgcgggggcttcgccagcctcctcgccgcgacggccgacgcagtcaccaagtacgacagcagcgccgccgggctcaccgtcttctgcccggccgacgaggcggtggaggccttcaactccaccttcaagaacctcaccgccgacgcccagctcgcgctcctgctgtaccacggcgtggcggaacactactccgcgcagtctctcaaggcgatcaatggggacgtaagcacgcttgcctccgacggatccaagaacaacaacgggtacaacctaacgatacgtgccgacggggacacagtgaaaatctcgtccgcatctgccagcgccgccacggtgaccaagacgctgctcgacaaggcgccgctcgccgtctacctcatcgacgcggtgctcctgccaaggcagcagtctaacgacgaccagggacacactgcgcccgcccctgcgccggcctcctcgcctgcacatgcacctacacctgcccttgcgccggtctcgccgtcgcctgcccctgtaccggtctcgccgtcgccgtcgcctgcacatgcacccacacccccacttgcccctgctccggtgactgcacctgcgcccaggagtcgcccagcgccatcgccagagcacactaccccagctccttcgccggacgcggacggccaaccgcttgcagatcagaagaacaacgcagcaagggacactgcatcttggactatcggcgcggtgctggcgatcgtgtgcctcttgtcgtgaagggtttaagcttagatagattgacgccgattgggatccgtcatctcgccgccaataccagtgtacactgaagacaatgtttatgggcatgcattggccaaaataatattattctgctcc

SEQ ID NO: 28800 - DNA, 1053 bp, Zea mays
  Clone ID: LIB4764-020-G11_FLI
ccgggattagtgctggtgtgtgtggtgtggttcgtccatctctcctgctagcttagctcgctcgctggcaacaacaatgaaagccgcaactggctcgtcatcagtcgctcgcgctcttgcgttgctcttggcggcgtgccttctctggaaggaagccgcgtgcttctcggcgtccgggctaaacaaggcgttcgccaccttctatggcggtagcgacgcttcaggaacgatgggtggggcctgtgggtacggcaacctgtactcgacggggtacggcacggacacggcggcgctgagcacggcgctcttcaacgacggcgcctcgtgcgggcagtgctaccggatcccctgcgactaccaggcggacccgcggttctgcatccgcggcacgtcggtgaccatcaccgccaccaacctgtgccctcccaactacgcgctgcccaacgacgacggcggctggtgcaacccgccgcggcagcacttcgacatggccgagccggcctggctcaagatcggcatctaccgcggcggcatcgtgcccgtcaactaccaaagggtgccgtgtgtgaagaaaggcggggtgaggttcagcatcaacgggcgcgactacttcgagctggtgctcatctccaacgtgggcggctgcgggtccatccagtcggcgtccatcaaggggtcgcgcaccgggtggatggccatgtcccggaactggggcgtcaactggcagtccaacgcgtacctcaatggccagagcctgtcgttccaggtcaccagcagcgacggccagaccaaaaccttccccgacgtcgcgcccgccagctgggggttcggtcagacgtttgcgacctcgcagcagttctcttagtatagacacatctttgttttctgcctcgttcgcttgtcgtttatatatatccctcactcggctcgactcggctcggctcggccctcgatcaataccttgtaaagtttacccggcctttgttgaaatgccccaccacctgccgcgcgcgatgcaggagatatatgatatatatgctttgacttgtgctt

SEQ ID NO: 28801 - DNA, 1182 bp, Zea mays
  Clone ID: LIB4764-021-F3_FLI
acttctccagatcccctccgcaatctaccttcgcgcggctaccacggcgccggtgctgaagccagcgaccgtggccatgcagtcgccggagccctcctcctcctccccggttctcctcaatatagggggcaagaagtacgcgacaaccgtggagacgctgatgcagcgggagcccgactccatgctcgccgccatgttcagcgggcggcacacgctccatgatcacccaaccacggggaagggagtggtcttcgtggacagggacgggaagcacttccgccacgtgctcaattggctcagggacggcgccatccccgtgctgtccgagtccgactaccagcagctgctgcgagagggtttagtcgactacataaacgagaggctgggttggaaggaaaccgacaattcggaggctgaattgacacgaaaggacgtgatcaagtgcatacaaacgcaaagagtcaggttccgtggcgtgaatctatctggccttgatctgtctaagcttgacttatcagaggtggacttcagctatgcatgcattaagaacactgatttttcatatgctaacctttacaaagcaaaatttgggcaggtagaagcttcgtcttcatctttccaaaacgcaattttgcgtgagtgtgagtttattggagctaatcttgaagaatctattttggatggagcaaaccttcgaagtgccaatttacaagatgcttgcttaacacgatgtagcctcattttaacagatcttcattctgcccatttacagactgctaatcttacacaagccgacttaagaggagctaatcttgaagcggccaatctcaagggtgccaagttgtcaggtacaaacttgcaaggcgcaaatcttcagagagcttacttgcgagaagttgatttgcgtgacactcaattgactggtgctaagctcggaggtgcaaatcttcttggagctatcagatgatctacagattgttcgtgtagcttcatactgtgtatactgtactacacaaattcattggaggtaatgcggcaggaccatctgcggagttctggtctcaatcatgatcgagaacacaaatattccttctgttcaaaataaatcagttcctagaatgattctaagtcgaactatcttaagttcgaccaactttataggaaaggatggagtttatgtac

SEQ ID NO: 28802 - DNA, 808 bp, Zea mays
  Clone ID: LIB4764-022-E4_FLI
ccggacacattacacgtacgacaacacctctcaagtaacccaggcaccatggccgccgccgtgcccctcctcctcctgctactgccaacgatcctgatggccgcgtcggcggcgtccggcgagaagagcacgcacatcaagctgtactggcacgacgtggtgagcgggccgagcccgacggcggtgccggtggcgcaggcggcggtgaccaacacctccaagaccgccttcggcatggtggtggtgatcgacgacccgctgaccgagggccccgacctcaagtcctccaagccgctcggccgcgcgcagggcacctacgtcggcgcgggcaaggacgagctctccctcatgatgaacatgaacttcgtgttccaggccggcgagtacaacggcagcaccgtcgccatcatgggccggaacgccgtgttcgacgccgtccgcgagatggccgtcgtgggcggcaccggcgcgttcaggatggcgcgcgggtacgcgcaggcccgcacgcacaccttcgacctcaacaccggcgacgccaccgtcgagtacaacctctacatcaagcactagctagctagcccatcggctttgtgtatctgattgttggtggtcttatatgaacacgatcgaacaccataattgtcttgttcgcttaatttgtgccactagcttttgcagttttggtgaaaaagaaggggggtaatttaaggacgatagcttcggtcgttgtaatgtaagctgacttcgatttaacttgcacaataattgaggacttaaagaataaagatagcaatagactttgtttaac

SEQ ID NO: 28803 - DNA, 1221 bp, Zea mays
  Clone ID: LIB4764-023-E9_FLI
ccgagaaaatcctcccccaaaacgcgacgaaattctccgcgagcaaaatataaagtttataaacccactcctccccttcccctgttccctctaccaccaccaccggcaccgcgggacagtctgctctcgtcccgctgcagcccgtccccgacccggaaccctagcgactgccattgcccacgcgccgctcgcccgatgaacggcgggggctctgggctggcgcccaacgccgcgcacaccgcggacgaggtcttccgcgactacaaaggccgccgcgccggcatgatcaaggccctcaccactgatgtggagaggttcttcaaactctgtgaccctgaaaaggagaacttgtgcctttatggctatcccgatgagacgtgggaggtgaccttgccagctgaggaagttccccctgagatccctgaaccagcattaggaatcaactttgctagggatggcatgaatgagaaagactggctggcgctagttgcagtccacagtgattcctggttactgtctgttgcattctactttggtgcacgctttggatttgacagagaaactaggaggcgactctttagcctgataaacaacatgcccacgatatttgaggtagtgacaggagcagccaagaagcaggcgaaggagaagacacctaatagtagcagcaagagcaacaggcctagttcaaaagtgcagtcaagagcagagtctcgttcaaaggctaaggtcccccaagacgaagaagagagcggtgatgacgatgaggatgaggaggcagacgagcacaacaataccttgtgtggaacttgcggaactaacgacagcaaggaccagttctggatctgttgtgataactgcgagaagtggtaccatgggaagtgtgtcaagatcacgccagctcgagctgagcatatcaagcagtacaagtgcccagactgcaccaacaagcgggccagggcatgagcggcaaacatcggcatcgggcgacctttgataggaaggaagaaaccacctcctggcttcaagatccctagatatggcgtaggtccctagtttacgaagtctgcattttcatgtgttcattaatatatctgctgattagctgttcgacctagcagtgtctaaaacgtgccgtgtgtcttctgtgctgagtgttgacatggggcctcctccctccagcctgtaaacgctgtcactgaaggtacctctcaactgacc

SEQ ID NO: 28804 - DNA, 923 bp, Zea mays
  Clone ID: LIB4764-024-H10_FLI
cctggactctcccgtcgcagcctgaagctgtgcgccccggttcggtgggcgtgaaaggggagaaaagagggcgggaaggaccgcggattttgctagggtttgcggtttctgcttcacactgcctcctcagtcctcaccaccacagccgtcgcgcgcaggagggtagggaggatgccacgtaagatcaccttggtcaaggagggggagccgcagccggtggacgctgctcaaggggagcccgctccggcaccggcggcaccgacggccgcgttgacggaggcggaggtggacgagctgcccagggccatcgtgcgccgccttgtcaaggacaagctttcccacgtcgccggtggggaaggagccgaggtcatcgtcaacaaggacgccatggccgcgttcgccgagagcgcccgcatcttcatccactatctctccgccactgccaatgatatgtgcaaggaatcaaagaggcagaccatcaacgctgatgatgtcctcaatgctcttgatgacatggagttttcggagtttgtagagccccttaggacttcactgcaagagtttagaaacaaaaatgcagacaaaaggtcagaagcaaagaaacaacagaaggaaaagagaaggaaattaaatgaagagacacttccgcagaaagaaaatgatccagctgatgatgccaaggagaatggagtagcttaatcgcaagaaaaatgaagaatgaatacaattaacttctctgctggaggggcagtaacacgcagaatcaaaaccatggcagtatttgttggtagttgtatttgcttttgctccatgtagcctctactccaaaacactttcttgacttgatatgatgctgtataattctagtgtcctatcagttttcagcttgcttatggtgcaattaaaattctatgtgcctgaag

SEQ ID NO: 28805 - DNA, 2182 bp, Zea mays
  Clone ID: LIB4764-032-G12_FLI
attccctgcctaaaactcccatttcgccgtccgtgacgcgagagacctcttcgcatcccgaggcggcgcttttggggtcggaagcgacacgggcgcccggcgggtccgcgggtggtggtgctactgctagcaagcagcagcaggcgacgctaggcgagagccccagtcggagcaggccaccatgtgcggcatcctcgctgtcctcggcgtcgctgaggtctccctcgccaagcgctcccgcatcattgagctctcgcgcaggttacggcaccgagggcctgattggagtggtttgcactgtcatgaggattgttaccttgcacaccagcggttggctattatcgatcctacatctggagaccagcctttgtacaatgaggataaaacagttgttgtaacggtgaacggagagatctataaccatgaagaattgaaagctaagttgaaaactcatgagttccaaactggcagtgattgtgaagttatagcccatctttacgaagaatatggcgaagaatttgtggatatgttggatggaatgttctcctttgttcttcttgatacacgtgataaaagcttcatcgcagctcgtgatgctattggcatctgccctttatacatgggatggggtcttgatggatcagtctggttttcttcagagatgaaggcattgagtgatgattgtgaacgcttcataacatttcccccagggcatctctactccagcaagacaggtggtctaaggagatggtacaacccaccatggttttcagagacggtcccttcaaccccttacaatgctctcttcctccgggagatgtttgagaaggctgttattaagaggctgatgactgatgtgccatttggtgtgcttttatctggtggactcgactcttctttggttgcatctgttgcttcgcggcacttaaacgaaacaaaggttgacaggcagtggggaaataaattgcatactttctgtataggcttgaagggttctcctgatcttaaagctgctagagaagttgctgattacctcagcactgtacatcatgagttccacttcacagtgcaggagggcattgatgccttggaagaagtcatctaccatattgagacatatgatgttacaacaatcagagcaagtaccccaatgtttttgatgtcacgcaaaatcaaatctttgggtgtgaagatggttatttctggcgaaggttcagatgaaatttttggtggttacctttattttcacaaggcaccaaacaagaaagaattccatgaggaaacatgtcggaagataaaagcactacatctgtatgactgcttgagagctaacaaagcaacttctgcctggggtgttgaggctcgtgttccattccttgacaaaagtttcatcagtgtagcaatggacattgatcctgaatggaagatgataaaacgtgacctcggtcgaattgagaaatgggttatccgtaatgcatttgatgatgatgaggggccctatttacctaagcacattctctacaggcaaaaggaacagttcagtgatggtgttgggtatagttggatcgatggattgaaggaccatgccagccaacatgtctccgattccatgatgatgaatgctggctttgtttacccagagaacacacccacaacaaaagaagggtactactacagaatgatattcgagaaattctttcccaagcctgcagcaaggtcaactgttcctggaggtcctagtgtggcctgcagcactgccaaagctgttgaatgggacgcatcctggtccaagaaccttgatccttctggccgtgctgctttgggtgttcacgatgctgcgtatgaagacactgcagggaaaactcctgcctctgctgatcctgtctcagacaagggccttcgtccagctattggcgaaagcctagggacacccgttgcttcagccacagctgtctaaccttatgtttatcacccagcaatgcttgaaacagcaaaggttgtccattgcttgtttcagtttccttccgatcatgtttttagttccatcaatcaagcaatggagacatgcttgtgcttcatacttggcagcatcgtgtttgggttttcactgggcagtactgtttaatttttatggactgaaaagactcagttttgtaaatattcgttagagattccttcctgt

SEQ ID NO: 28806 - DNA, 1521 bp, Zea mays
  Clone ID: LIB4765-001-D11_FLI
ctcgaggccggccgggtttactcatcagggcaccacttcttgatcccatgctatctctacatagatgttcaactgtgcgaggactcttagtcctatttttgctcatcagggcactacttcttgatcccatgctacctctacatattctgtatgaggctagcttatagtagattacttattccaaaaaagctgctcatttgtattgccaagagcagtttcaaaatctctttcttcatgttaattgcttttcacaggatcttcctaggcactatctgctaattgttctttatttcactcaaggtttatgttattaggtcatggttcacaaacatttttttcctcatgcagtatttgctggttttcagagttgatgctaaacatgcttatttaactaaactagaaatttgttaccgagacttgtgaacgaggcagcatcatagttcagtttggaaacatgtcatcgaagaagatagagttggatcacaaggacatggtccatgattctgccatcgactactatggcaagcgccttgccactgcctcttcagacttcaccgtgaagatcgtcaacattggtgctgcaaatgccccatcccaggtccttgcaacgctaagtggccactatggtcctgtgtggcgtgttgcttgggcccatccaaagtatggtgcaatccttgcatcgtgcagttatgatggccgtgtcattatttggaaggaggatgcacgaggcaattggtctcaagtccacgtcttcagtgacaacaagtcatctgtcaactccattgcttgggctccgtatgaggttggcctctgccttgcctgtgcatcttctggtggaagaatatccatcttgacgatgcaagctgacgggggttgggatactgcaaccattgagcgagcacatcctgtcggtgcgactgccatatcctgggcccctgcaacagcgtcactagctggtgcaggggagcttgtttacaagcttgtctcaggagggtttgactctgttgttaaggtctggggattcaacaatggtagttggaagctggagagtgctcttatctctgacatgcacacagattgtgtgagggatgtcgcctgggcaccagttttgggattgtccaagtcgaccattgccagtggttcacaagacgggaaggttgtcatctggaccaagggaaaggatggagacaagtgggagggaaagctcatgcgtgacttcggttcccctgtctggagggtgtcgtggtccttgactggcaacatattatgcatagctgctggcgagaacaacataaccctctggaaggaagggtcagatgggcagtgggaggaggcgatgaaggttgaaccataggatgaccggcaaggtttctgaatttcttgtagatccatgtttcgacaaagacaaagcttgctactgttttactagtgtttcgacaaagtttaagtttgccattgtgttttactagtgtttcctgcggatccatgtttcgataaagacaaagcttgacattgtgtttc

SEQ ID NO: 28807 - DNA, 1186 bp, Zea mays
  Clone ID: LIB4765-001-D2_FLI
ccgggttctatcgcgtgccccccttccgatcctgccatttcgtgcatcctgtagcgtctggcagtgcgggggtcatcggggatggagtgggtggacaggaccaaggcctccgccgccgccgccgcagcggcggcggacgagagggctgggggagcggaagggctcgcgggatacgtcaaggtcatgaccgacgaacagatggaggtgctccgcaagcagatctccatctacgccaccatctgcgagcagcttgtcgagatgcaccgcgccctcaccgagcaccaggacaccattgcaggaattaggtttagtaatctgtactgtgatcctcaaattatccctggaggccacaagatcacagcaaggcaacgatggcaaccaacaccaatgcagctgcagatcttggagaacatctttgaccaaggcaatggaacaccaagcaagcagaggataaaggagataacggcagagctctcgcaccatggccaaatctcggagacaaatgtgtacaactggttccagaacagacgggcacggtcaaagcggaagcaggccgcttctttaccgaacaatgctgaatctgaagctgaggtggacgaggagtctctcaccgataagaagccgaagtcagatcggtcgctccaggacaacaaggctatgggcgctcacaacgctgacaggatatctgggatgcatcacttggacactgatcatgaccaaatcggtggcatgatgtatggatgcaatgacaacggcttgagatcgtctggcagttctggccagatgtccttctacgggaacatcatgccgaatccaagaatcgatcatttcccggggaaggtggagagctcccggagcttctcccatctccaacacggggaaggctttgacatgtttggatgacatgatgcggcgctgagttaccgtgtaaaatgtgatggttgacacatcgtgcgttcaatttgctgacatgaaagttgatgttggatgtccgtgttgcttatcacgttctggttaaccacctccgcggatggtagctagcttgaatgaacctactctttgggatagctgtaagaggttgatattatagtttgcccgtagtctatatacgctgaactatcagcatgtaattctccacgtttgcaaatttagcacgggtatgcagcagcctgtggttaaaccttac

SEQ ID NO: 28808 - DNA, 1494 bp, Zea mays
  Clone ID: LIB4765-001-H10_FLI
ctcgaggccggccgggaatgagaggagagggagggaggccgcgcgcctggctcgtcctcccccttgcttccttccgtcgtttataagcgacggcaacacaggcgaagaagacggggggagaaaggggcgcacgaggcaatttatagggaggaagaggaggggccgggcctgagcagagcaggccggaccagccatctctcctctgaggcgtcgaggggaggcggcgcccgagatgggggactccggtggctccgtcgtgtcggtcgacgttgagcgcatctcctttggcggcaaggaacaccatatacaaacgaatcatggacctgtatctgttgcagtgtatggtgaccatgacaagcctgcccttgttacttaccccgatattgctttaaactatatgtcctgcttccaaggactattgttctgtcccgaagccgcttcgctgctgcttcataatttttgcatttaccatattagccccccaggacatgagttaggagctgctccaatttcaccaaatgctcctataccgtctgttgacgatttggcagatcaggttgcggatgtcctcgatttctttggattaggctctgttatgtgcttcggtgtcactgcaggtgcctacattctaactctgttcgcggcaaagtatagggagcgggtactaggtcttatccttgtttcacctctgtgtaaaggccccacttggactgagtggttatacagtaaggtaacatccaatctgctgtattactatggcatgtgtgggttagtgaaggagtgcctacttcagcggtacttcagcaaggaagtgcgaggattctctgaagtacccgaatcagacatagtgcaggcttgtaaaagcctgctagaccagcggcagagcatgaacgtgtggcgcttcgtacagacaatgaacgagagatacgacttgtctgagcatataaagcggctgcagtgcagaaccctgatttttgtgggcgacaattctcagttccacacggaggccgttcacttgacgtcgaagctcgacaggagatactgcgctctagttgaggtgcaagcgtgcggttcactggtaaccgaggagcagccgcacgcgatgcttataccaatggagtacttcctgatgggatacggcctgtacaggccgcctagccaggtggtggagtgcagcccgcgcagccccctgagcccgttctgcatttcgccggacctcctgtcacctgagagcatgggggtgaagctgaagccgatcagaacgcgagtcaggcttgaggtgtagcagagggctaggctaacttttgcaggtctgtgtttagtttttggaggtatagttatactgccatgtatatataaatatataggaaacgctgttctttgatttgtagcctgaaagaaaataatagcagaagtttgggtgtacagtctctctattatgccattatacccgctggtttggttgggtggcaggattagatgtggttcccaaag

SEQ ID NO: 28809 - DNA, 1462 bp, Zea mays
  Clone ID: LIB4765-002-C8_FLI
ccgggaccaccacccaccagtccaccaccactgctcgcactcactccaccgctgcccacttcttgtttgtattgtatccagactccagaggaagccgagagggccaatgaggcaaggcatgagctccccttccgccgccgcggcgctcgtgctcctcctggccctgctcgccggaggccagtgccgagaggcccagctcgacgccgcggacgccggcaccggcacggagaactacaccgccagcgacgccgccgtgtactggggcccctggcagagggcccgggccacctggtacggccagcccaacggcgccggccccgacgacaacggtggcgcgtgcggattcaagcacaccaaccagtaccccttcatgtccatgggctcctgcggcaaccagccattgttcaaggacggcaagggctggggctcctgctacaagattcggtgcaggaaggacccgtcctgctccgggcggacggagacggtgatcatcaccgacatgaactactacccggtgtccaagtaccacttcgacctcagcggcactgcgttcggcaggctggccaagcccggcctcaacgacaagctccgccactccggcatcatcgacatcgagttcaccagggtgccgtgcgagttcccgggcctgaagatcgggttccacgtggaggagtactcgaaccccgtctacttcgcggtgctggtggagtacgaggacggcgacggcgacgtggtgcaggtggacctgatggagtccaagacggcgcgcggcccgccgacggggcggtggacgccgatgcgcgagtcctggggctccgtctggcgcatggacaccaaccaccgcatgcagccgcccttctccatccgcatccgcaacgagtccggcaagacgctcgtcgccaacaacgtcatcccggccaactggcgccccaacaccttctaccgctccttcgtccagtacagctaaccgatcgggatccgtgccctgcccgcaattggagctggctggctggggcgctactcggctcggtcaccatcgtctacagtactatactatgctctactaccactagactgctgctgttactactagtctactaccaccaagtacggcggaacggaacagctagtcgtcgtcggcggccttgggaggggaggtgtctccggtcaccgtgccgttgcagttgtatcgtgatcatggtcctgggagttgttgcatccggggcgcgctttttaggtcaggcgtcgtgtgcgatgtttgtggggtcaggctggcatgtcatgccgtgcgtgaccctgattgcgagccggcaagcaagaagacaaaaaaactaaagccgtgtgggaaaatggaggaggcaggcgtacaagctacgctctcccgcccactgttgcttttataatttatcatcatcatcatcttcattccgatcggtgattaatcgaaaagtatattgtaatg

SEQ ID NO: 28810 - DNA, 1446 bp, Zea mays
  Clone ID: LIB4765-002-H10_FLI
tcgaggccggccggggcctgccttaaccattcctcccaacaccacctcgcctgcgatcttcgtagcctccgtcgcgtcgagcatcgatcatgtcggcctactgcggaaagtacaaggatgagctcatcaagaatgctgcctacattggcacccccggcaagggtatccttgctgctgatgagtccactggcaccattggcaagcgcctttccagcatcaatgtcgagaacgttgaggagaaccgccgtgccctccgtgagctcctattctgctgccctggtgctctccagtacatcagcggtgtgatcctcttcgaggagaccctgtaccagaagaccaaggatggcaagccttttgttgatgtcctcaaggagggaggcgtcctccctggcatcaaggttgacaagggcaccattgaggttgttggcactgataaggagaccaccacccaaggccatgacgaccttggcaagcgttgcgccaagtactacgaggcaggtgcccgctttgccaagtggcgcgctgttctcaagattggccctaatgagccatcacagcttgccatcgacctgaacgctcagggtctggctcgctatgccatcatctgccaggagaatggtctggtgccaattgttgagcctgagatccttgttgatggccctcatgacattgatcgctgcgcttacgtcactgagaccgtccttgctgcctgctacaaggcgctcaacgagcaccatgtcctcctggagggtaccctcctgaagcccaacatggtgactccaggctccgactccaagaaggtgacccctgaggtgattgctgagtacaccgtccgtaccctccagaggaccgtccctgctgctgtgcctgctgttgtcttcctctctggtggacagagcgaggaggaggccacccgcaaccccaatgccatgaacaagctcagcaccaagaagccgtggtccctgtctttctccttcggccgtgccctccaggcgagcaccctcaaggcctgggctggcaaggtggagaacctggagaaggctagagctgccttcctcgccaggtgcaaggccaactctgaggctaccctcggcacctacaagggtgatgctgccgccgacaccgagagcctccacgtcaaggactacaagtactgagttgcttctctttgcgtgcccgttttggaactcctgcctacgagctaggttgcggagtgtggtttgctcgttagagcttattttcggacatccaaaaaacatgcttcctatgtgggatgatggttatctttatatttgtatgttaattagtctctttgctgttaaatttcgtgtaagttggtcctgccgatggagaatcgagcagctccctttttttgttctatcaactatgctgtaattctggctatgtatcggcaaaaacaattctatatgctgagttggagtcggc

SEQ ID NO: 28811 - DNA, 1486 bp, Zea mays
  Clone ID: LIB4765-003-B3_FLI
tcgaggccggccgggacgagcccccagcatgacacagtactgaaccccgggggcaaatgcaggatccgttccagacagcgctcagatggcgccccgacggcggcggcgccggagcgtggccggcatcgaccaggacgaactcctcgatcccgaggccctcgcggaccccgacagcggcttctacgagatcaacggcgtgaggctgcaccacaaggtctgcagccacgaggatgaggactcgtccagcgaccagtccaccggtagtaccattgcctcagactcagacgctgtcctgaaaagccagattggcctgcccatactgctgctgcacggcttcggcgcgtcagtcttctcctggagcagtgtgatgcggcctctcgcccgcattgtccgtgccaaggttcttgcgttcgaccggccggcgtttgggctgacatcccgggccagtcgctctgccgatgacgccaagcctctcaatccttactccatggcgttctcggtcttggccacgttggcgttcatcgactaccttggcgctgagaaggccatacttgttgggcactcagctggttgccttgtagcagtggatgcatactttgaggcaccggaacgggtggctgctctcgtgctagttgcgccggctatatttgcaccaaggaaggcggtgaaagagggccagtcaggggaagaagaaggagggcagcaagcacagagggttcccaacgatgaaaattcgcctccaaatttgttcgctaggatttcgggaggatttcttgagctatggaagcacgttgcggggcttgttctcaagatgatcacagcgatacgagatgtggtccgatctttgtgtcttaaagctgtcgttgcttttcttcggtcatcgttgggtgtggtgctggtaagatgggtgatggataaatttggtatactgggcgtccggaatgcatggtatgacccgagcaaagtaactgatcatgtcatacaaggctacacaaagcctctaaaatccaagggttgggagacagctctgctggaacacaccgtatccatgatcatagattctgtgtctgcatcaagagtaccagtttcaaagaggctttctgagatctcatgcccagtgctagtggtgacaggtgacaccgatcgcattgttcctgcttggaatgccgagcgtgtggcacgcgctatacctggagcaacttttgaggcgatcaagagttgtggtcacttgccccacgaagaaaggcctgaggaattcctgtccgtcgttgaaaattttctacggacaacgtttgcaaatccaaatgaacaagtatttcaagcagctgtatcatgaattatgtgttgagtacgatctatttgctttataataaatcttaaagacccactcgtgtacaatgagagtggaatttggagtttaagcacatgagaagtaaaagaagttgaagaaaacttatatagtttgtctcctgcttttttttaaacg

SEQ ID NO: 28812 - DNA, 1018 bp, Zea mays
  Clone ID: LIB4765-003-B9_FLI
ccaggggggaaggaacgccacagactccgggaaattaccgttgcatttgcagcaggttagacatgtcgtcgtcgtcgtcaatgctacgccttcctccatgccgtcccgcagtccatccagtgtgtaggggtgctggatcatcaggagggagcacgcacccactccgatcaagctcaagatcaaggccgtcgtcgctcaccgctgcgtgcgctctcaagacgccctcgaatggcggatcgagggggaaggtcaaccccagggacctcttcaccttctcccacaagttcagcaccgacatcccgatgagcgaaacgcaaggggcgtccatcgatgagtacctgcggaacagtcccaggatcgtcggagcggtgtttccggaccagcgcaagagaaggaagatcaacgacgaagaatggagcgtgcagctcctgcccatccggttcctgttcctgtcggcgtcgccggtcatcgtcatgcgcttcgtcagcaagtccggcgggaaggagtacccgcccaacgtccccgtccacgccaccagcctcctcctcatggaagtgacagactacaagctgaatggtctggacagcaacgccatgccgtcgcacctggccctcaccgtccgaggcctcatgtacccgcagcggcagcgggaagggaggaagagcctcaagggccacgtcgagatgaccgtcggcttcgacctcccgccggtgctcgccttggtcccggcgagcatcatcagaggcgtcggcgagacggtgttgaggcagatggcggagcagatgaagcaggacatggacacagggctggcagcagatttcaacaagtacaggagggagaagctaaccgagaggcgctcatcgccctgaattctgagacacatttcacaatcacagcccggcctgtatcgatgtatcatcaacaagtagccatgactaggaatttcctcagactcgccttgtcgtcaagcagggtcgtcaacctcttgcactatttattcattcataagttggatggc

SEQ ID NO: 28813 - DNA, 1664 bp, Zea mays
  Clone ID: LIB4765-003-E4_FLI
ctcgaggccggccggggaccgggagtaatcgacgcgccgtcactgaatcctcagatcacggctagccgtaatcacgccactctgctgactcccggcgagcagtgtaacattttccttcagccatgggcaaggagaagactcacatcaacattgtggtcattggacatgtcgactctggcaagtcgaccaccactggccacctgatctacaagctcggcggtattgacaagcgtgtgattgagaggttcgagaaagaggccgcggagatgaacaagcggtcattcaagtatgcctgggtgcttgacaagctcaaggccgagcgtgagagaggtatcacaattgatattgctttgtggaagttcgagaccaccaagtactactgcactgtcattgatgcccctggacaccgtgacttcatcaagaatatgattactggcacttcccaagctgactgcgctgttcttatcattgactccactactggtggttttgaggctggtatctccaaggatggacagacccgcgagcatgctctccttgctttcacgcttggagtgaagcagatgatttgctgttgcaacaagatggatgccaccacacccaagtactccaaggcccgttatgatgagattgtgaaggaagtctcttcctacctgaagaaggttggatacaaccctgacaagatccactttgttcccatctctggtttcgaaggtgacaacatgattgagaggtccaccaaccttgactggtacaagggcccaaccctacttgaggctttggacttgatcaatgagctgaagaggccttcagacaagcccctgcgtctccccctacaggatgtgtacaagattggtggtattggaactgttcctgttgggcgtgttgagaccggtatcatcaagcctggtatggttgttacctttggtcctagtggccttactactgaggtgaagtctgttgaaatgcaccatgaggctctccaggaggcccttcctggtgacaatgttggcttcaatgttaagaatgttgctgtgaaggatctgaagcgtgggtatgtggcctccaactccaaggatgaccctgccaaggaggctgctagcttcacgtcccaggtcatcatcatgaaccaccctgggcagattggcaacggctatgccccagtgctggactgccacacctcgcacattgctgtcaagtttgcggagctcattaccaagattgataggcggtctggcaaagagcttgagaaggagcccaaattcctcaagaatggtgatgctggtatggtgaagatggttcccactaagcccatggtagtggagaccttttctgaatatcctcctcttggtcgctttgctgtccgtgacatgaggcaaacggtggctgtcggagtcatcaagagtgtggagaagaaggatccaactggagccaaggtgaccaaggctgccgcaaagaagaaatgatgtgtctggctggttctgtgtttgcttgagggatacctagtggaaacgtaaaatatctcgtcttgttcacgtcattgtctgaactatgctcgcaacgtttgcctggtcgatttagaactgttattttcgttaaaaccagagtgttatttaagacttatccgaacatctggtgagccatatatggttactagttttgtt

SEQ ID NO: 28814 - DNA, 1399 bp, Zea mays
  Clone ID: LIB4766-014-E11_FLI
ccggggtaccgatccgccggccgccgttctccatttcaaattgcaaacccgttctccttttccgcctcctcgacgcaactcgtcgccgtcttctccaactcgcacctcgttcctcgccccaccatttgccgctcccgcctacgatgccgacgagtgaggtgtggagcttgtccgattttgaaatcagcaagtacatcgctgagggcaggttcggcaaggtctacctcgcccgcgagaagcagagcgggtacgtggtggcgctcaaggtgatatttaaggcgaaactgaagaagcaccgcttccacgcgcacctgcggcgggagatcgagatccagcagagtctcgatcaccctaacgtgctccgcctcttcacctggttccacgacgaagagcgagtcgtcctcgtcctcgagtacgcggcccgtggcgagctctacaaggtccttcgcgctgctggccgcttcaccgagcgcacgtccgccacgtatgtagcgagtcttgctggtgcactggcatactgtcacaaaaagcaagtcattcatagggacatcaagcctgagaatttgctaatcgacatcgagggccggcttaaaattgcagattttggatgggcggctcgttcaaatgctaaacgccacacactctgtggcacaatcgattatctggcaccagagatggtagagaaaagagctcatgaccatgctgtggacaactggacattaggaatcctgtgccatgagttcttatatggttcacctccttttgaagctgatgaacaggatgataccttgagaaggatagttagggtggatttggcattcccttcatctccttgtgtatcttcagaggctaaggatctcatttccaagcttctagttaaggattcaagcaagaggctttgccttgaagacatcatgaagcatccatggataaagaagaatgcagacccttcaggcagttgcattaagcaaaaagatgtcacaagatcaaagcttctgtaatatcagtacaacctgcttgccagtgggcaagaatcttctgatgtggtgccaaactcgtcactactggaggacaaatatgatgacatgtagttttaagttccgatagttctggagtggattggtgtgtgtgtccctgcaagctttctcctacaggctggagttctagttctgatgcagcgtttgtgtttcccttttgaactgtgtcgtgaaaccaatgttcactcgagaggaatgtagttttcaactgagttgttgaaccttcgcaaattggagggtcaatggtctgtggagactggagaggaacgtggctttcgctgtggcgatcgtattttgtaattgttgaatctgcagtattttggtctttagcaatgaaatatggagatgcacgtagttttttt

SEQ ID NO: 28815 - DNA, 1108 bp, Zea mays
  Clone ID: LIB4767-008-C2_FLI
accgcatcccacaccccccgagctgagcttagctccactccagctccaatcacagtcgtgaccagagcgcgagagctagctagagggccgtgaaaatgccgatcaataggatcgccctggggagccaccaggaggtgtaccacccgggcgccctcaaggcggcgttcgctgagttcatctccaccctcatcttcgtcttcgccggccagggctccggcatggccttcagcaagctgaccggcggcggcccgacgaccccggcgggcctgatcgcggcggcggtggcgcacgcgttcgcgctgttcgtggcggtgtcggtgggcgcgaacatctcgggcgggcacgtgaacccggccgtgaccttcggcgccttcgtgggcggcaacatcaccctgttccgggggctcctgtactgggtggcgcagctgctggggtccaccgtggcgtgcttcctgctccgcttctcgacgggcgggcaggccacgggcaccttcgggctgacgggcgtgtcggtgtgggaggcgctggtgctggagatcgtgatgaccttcgggctggtgtacacggtgtacgccacggcggtggacccgaagaagggcagcctgggcaccatcgcccccatcgccatcggcttcatcgtgggggccaacatcctggtgggcggcgccttcgacggcgcgtccatgaaccccgccgtgtccttcggccccgccctcgtcagctgggagtggggctaccagtgggtgtactgggtcggccccctcatcggcggcggcctcgccggcgtcatctacgagctgctcttcatctcccacacccacgagcagctcccctccaccgactactaaaagccgaagccgaccgacccaggggtgcgcagcgcagcgcagctagcatccagctctctctccccggcccgctcgccgccgtttagtttctctcgtgcacgtgcatgcatcgtagactgtctcaggccgccgctgcgccggcgccgctcgcatcgtttgcttttccttggaccagcagtcgtcgccgtcaggttgagctgcttgtaaccgttaattccggacccgtttgcttctgtaagatttgtgcatttgcctgtgag

SEQ ID NO: 28816 - DNA, 1749 bp, Zea mays
  Clone ID: LIB4767-008-F3_FLI
ccgaggactcgccacctttgaacgatagcctttctcactccgacacttgaaacacgttcatcaggagctcgtcctcaggcttgctagtagcttatattacctacctagctagctagctagtcaagactcaagatccatccagcatgccggcaaacatgatctccaagatccttgagaagtcgtctgtccttccgctggtggacgatgttgcacccatccatgtgaagaccgctggaggagctcctcggaccagtgtgatgcgcaatccgaacatggagaagcttcagaagggctacctgttcccggagattagcatcaagcgtgaagctcacctgaagaagtaccctcatgccaaggtcatcagcctgggcatcggcgacacaaccgaacccattccaagcgtcgtaacgtcagctatggccgagtatgtacttgcgttatccactccagaagggtgccagggttatgggccggagcaggggcaaatgaatctgcgcaaggtcatagctgaggaagtgtacccagacatggggattcaagagtccgaggtgttcatctcggacggagcgcagtgtgacatcgcccgcctccagacgctgttcgggcccaacgtgaccatagccgtccaagatcccaccttcccgggctacgtggacaacggcgtgatcgtggggcagaccggcagcgcggacgaggccggcaagtacgccggcatcgcgtacatgcggtgcgcgccggagaaccacttcttcccggacctctcccgcgtgccgcgcaccgacgtcatcttcttctgctcgcccaacaaccccacggggcacgcggcgtcggcggcgcagctgcgcgagctggtggacttcgcgcgccgcaacggctccatcatcgtgttcgacacggcgtacgcgtggtacgtgtcgtcgtcgtcggaggccgctggcgacggggacaagatgaagccgcggtccatctacgaggtgcccggcgcccgggaggtggccatcgagatctcctccttctccaagttcgccggcttcacgggcgtccgcctcggctgggcggtggtgcccgacgagctgcgctacgcggacggctcccccgtcgcgcgcgacttcgaccgcatcgtctgcacctgcttcaacggcgcctccagcgtcgcgcaggccggcggcctcgcctgcctctccacggaggaaggccgggacgccgtgcgccgcgtcgtgggcgtctacaaggagaacgcgcgggtgcttgtggacaccttcgcgtcgctcggcaaggaggtgtacggtggcaccgactcgccctacgtctgggtgcgcttcccgggccgccgctcctgggacgtgttcgccgagatactcgacaagacgcacgtcatcaccgtgccgggcagcggcttcggccccggcggcgagggcttcatccgtgtcagcgcgttcaacagcagggacagggtgctggaggccgcagctaggctcaagaagttccttcctggactcagcgctgttccgctctaagctccacgtacggatcctgcacctgcatggctgatgatatacctgccccgtacagataatctacatcgataataacattgtgcctcgtactgataatgtacattggtacatggctaataataacattgccatgcgctgagacgcagccatagtatcggatcatccatttctccattttattggggggtggggggggtgtgaatgagcaagtgtacaaggattcttttcgaac

SEQ ID NO: 28817 - DNA, 1803 bp, Zea mays
  Clone ID: LIB4767-011-D6_FLI
ccggacaaccaccacagacacggcgcacccccccccccccctcccttaaaagccgcctctcgccgccgcccgcaaaccctcatttttctctctcctgcgccgcgacgtccctcgccttcgccgccgaatccgagactccgatctcgggttcaccgcagcgcacagagcagccccgactcccggcccgatccgcgctctcctctccgtcgcttcagtcatggcaggaatggcacctgagggttctcagttcgatgctaagcactatgattctaagatgcaggagctgctgagcactggtgagactgaggagttcttcacttcatatgatgaagcttttgagagttttgatgatatgggcctccaagagaatcttctgagaggcatttatgcttatggttttgagaagccctctgcaattcagcagagaggaattgttcccttctgcaagggtcttgatgtcattcagcaagcacaatctggtacaggaaagacagcaaccttctgttctgggatcttgcagcagctggactatggcctggttgaatgccaggccctggtccttgctcccacccgtgagcttgcacagcaaattgagaaagtcatgcgagcgcttggtgattaccttggtgttaaggtccatgcatgtgtgggaggaacatccgtccgtgaggaccaaaggattcttggcagtggtgtgcatgttgttgttggtacacctggtcgtgtgtttgatatgctgcgcagacagtccctccgccctgataacatcaagatgtttgttcttgatgaagctgatgaaatgctttctcgtggtttcaaggatcagatttacgacatcttccagcttctcccatccaagattcaggttggagtcttctctgctaccatgccccctgaggcccttgagattacccgcaagttcatgaacaagccagtgagaatcctcgtgaagagagatgagctgacccttgagggtatcaagcagttctatgtgaatgtggataaggaagactggaagctggacacactgtgtgacctgtacgagacccttgccatcacccagagtgtcatctttgtcaacacccgccgcaaggtggactggctcactgacaagatgaggagcagggaccacactgtttctgccactcatggtgacatggaccagaacactagagacatcatcatgagggaattccggtctggctcctcccgtgtgctcatcaccaccgacctgcttgctcgtggtattgatgttcagcaggtgtccctggtcatcaactatgatctccccacccagccagagaattacctgcatcgcattggtcgtagtggtcgtttcggtaggaagggtgttgccatcaactttgtgacccgcgacgacgagcggatgctgttcgacatccagaagttctacaacgtgttgattgaggagctgcctgccaacgtcgctgaccttctgtgatcattttgaagaaaaacagaactaaaagaaaggtggtgggggtgatctggtaaggcttggttttgccgaaatattgtgggggaggagtgataaggtcggtggggtttctatgttaaagtcgtggtctcgggcaatatgcgatttttctttatgccatgttttgggaaattttgtagctgcctaggcctcgtgctgttgtggtggttcattagtacgaagacgaaggctctgctggcgatgggagtcctttttctttttgttagtattttgtttaaaactatgtatgaccgaattatttgtcatccttgactcaattctgctgcaaccagttgtatcgtgcg

SEQ ID NO: 28818 - DNA, 2373 bp, Homo sapiens
  Clone ID: LIB4803-046-G4_FLI
cacacccgggcgcaggaggcgggcggcccgggccccaccggccccccatggacgcccccagcacggggcgctgagacccccgcgtcgctgcccagcccggtccggcgcgccacgccgagggatctctggacaggacaagactccgaagctactcccccagcacacagcccgggacccacaaacccagcttgcccccagccctcccacctgccactccctggcccctcccaccgcccgccccccttggggcgcagggcatggtgtgaaaggccaagtgctgaggcgggtatcatgggtgctgtgccctagggcctgggtggcagggggtgggtggcctgtgggtgtgccgggggggccagtgtgcccaccccagtctcttggcgtgctggagggcatcctggatggaattgaagtgaatggaacagaagccaagcaaggtggagtgtgggtcagacccagaggagaacagtgccaggtcaccagatggaaagcgaaaaagaaagaacggccaatgttccctgaaaaccagcatgtcagggtatatccctagttacctggacaaagacgagcagtgtgtcgtgtgtggggacaaggcaactggttatcactaccgctgtatcacttgtgagggctgcaagggcttctttcgccgcacaatccagaagaacctccatcccacctattcctgcaaatatgacagctgctgtgtcattgacaagatcacccgcaatcagtgccagctgtgccgcttcaagaagtgcatcgccgtgggcatggccatggacttggttctagatgactcgaagcgggtggccaagcgtaagctgattgagcagaaccgggagcggcggcggaaggaggagatgatccgatcactgcagcagcgaccagagcccactcctgaagagtgggatctgatccacattgccacagaggcccatcgcagcaccaatgcccagggcagccattggaaacagaggcggaaattcctgcccgatgacattggccagtcacccattgtctccatgccggacggagacaaggtggacctggaagccttcagcgagtttaccaagatcatcaccccggccatcacccgtgtggtggactttgccaaaaaactgcccatgttctccgagctgccttgcgaagaccagatcatcctcctgaaggggtgctgcatggagatcatgtccctgcgggcggctgtccgctacgaccctgagagcgacaccctgacgctgagtggggagatggctgtcaagcgggagcagctcaagaatggcggcctgggcgtagtctccgacgccatctttgaactgggcaagtcactctctgcctttaacctggatgacacggaagtggctctgctgcaggctgtgctgctaatgtcaacagaccgctcgggcctgctgtgtgtggacaagatcgagaagagtcaggaggcgtacctgctggcgttcgagcactacgtcaaccaccgcaaacacaacattccgcacttctggcccaagctgctgatgaaggagagagaagtgcagagttcgattctgtacaagggggcagcggcagaaggccggccgggcgggtcactgggcgtccacccggaaggacagcagcttctcggaatgcatgttgttcagggtccgcaggtccggcagcttgagcagcagcttggtgaagcgggaagtctccaagggccggttcttcagcaccagagcccgaagagcccgcagcagcgtctcctggagctgctccaccgaagcggaattctccatgcccgagcggtctgtggggaagacgacagcagtgaggcggactccccgagctcctctgaggaggaaccggaggtctgcgaggacctggcaggcaatgcagcctctccctgaagccccccagaaggccgatggggaaggagaaggagtgccataccttctcccaggcctctgccccaagagcaggaggtgcctgaaagctgggagcgtgggctcagcagggctggtcacctcccatcccgtaagaccaccttcccttcctcagcaggccaaacatggccagactcccttgctttttgctgtgtagttccctctgcctgggatgcccttccccctttctctgcctggcaacatcttacttgtcctttgaggccccaactcaagtgtcacctccttccccagctcccccaggcagaaatagttgtctgtgcttccttggttcatgcttctactgtgacacttatctcactgttttataattagtcgggcatgagtctgtttcccaagctagactgtgtctgaatcatgtctgtatccccagtgcccggtgcagggcctggcatagagtaggtactccataaaaggtgtgttgaattga

SEQ ID NO: 28819 - DNA, 1498 bp, Zea mays
  Clone ID: LIB4826-012-B11_FLI
ccgggaaaatcctcagatccgccccctcctccacccttgcgccgcgctttcacagctctcccgcctccggatccagatccgccgccaccaacgcctgctcctccccctcctgctgcaccaccaccatcaagaggtccagcagggcggcagcggcagcggcggcggcggcgacatggggcgtgacggcggtggcggagtcgccggcggcatgtctgactcggtgctccggaaggtgctcctctcgtacttctacgtggcggtgtggatcttcctctccttctccgtcatcgtctacaacaagtacatcctcgacccaaagatgtacaactggcccttccccatctcgctcaccatggtgcacatgggtttctgctcatccctcgccgtcgcgctcgtccgcgtcctccgcgtcgtcgacctccccacatcgccctccatgacgccgcagttctacacctcctccgtcgtccccatcggcgcgctctacgcgatgtcgctctggttctccaactccgcctatatctacctgtccgtgtcattcatccagatgctcaaagcgctgatgcccgtcgccgtctactccatcggcgtcctcttcaagaaggagaccttcaggtcctcttccatgctcaacatgctctccatctcattcggcgtggccatcgccgcctacggcgaggcgcgcttcgacgtgcgcggcgtcgcgctgcagctcgccgccgttgccttcgaggccacgcggctcgtgctcatccagatcctgctcacgtccaagggcatctcgctcaaccctatcacctcgctatactatgtcgcgccgtgctgcttctgcttcctcctcgtgccctgggccttcgtcgagctgcccaggctgcgcgccgtcggcaccttccaaccggatttcttcgtctttgggacgaactcactctgcgcctttgcgctcaaccttgccgtcttcctgctggtcggcaagacctcggcgctgaccatgaacgtcgcgggagtagtcaaggactggctgttgattgccttctcgtggtccgtgatccgggacaccgtcacaccgatcaacctgttcgggtacgggatcgcgtttttaggggtgggctactacaaccatgtcaagctgcaggcgctcaaggctaaggaggcacagaagaaagccacacaggctgatgaggaggccgggtcgctcttgcaggagcgcgatggacacagtgatcgcaagagcgacaatcaagcctagagggccagatctgatcctggcgcccccatattggttggttctcgatacattcatgatattgctaccattgtcacttacatgtgagagaagtgttttttgttagcttgcattgtgatataagagttcatcttgagaaagacgttatgtttacatctaacgttctttttgttgcaatcgaaaatcaatattgcattgtggaccatgggctactgaagacatatgttttgtttacacaaatgaaatagaaatctg

SEQ ID NO: 28820 - DNA, 2199 bp, Zea mays
  Clone ID: LIB4980-006-B3_FLI
attttttttcgccgtccgtgacgcgagagacctcttcgcatcccgaggcggcgcttttggggtcggaagcgacacgggcgcccggcgggtccgcgggtggtggtgctactgctagcaagcagcagcaggcgacgctaggcgagagccccagtcggagcaggccaccatgtgcggcatcctcgctgtcctcggcgtcgctgaggtctccctcgccaagcgctcccgcatcattgagctctcgcgcaggttacggcaccgagggcctgattggagtggtttgcactgtcatgaggattgttaccttgcacaccagcggttggctattatcgatcctacatctggagaccagcctttgtacaatgaggataaaacagttgttgtaacggtgaacggagagatctataaccatgaagaattgaaagctaagttgaaaactcatgagttccaaactggcagtgattgtgaagttatagcccatctttacgaagaatatggcgaagaatttgtggatatgttggatggaatgttctcctttgttcttcttgatacacgtgataaaagcttcatcgcagctcgagatgctattggcatctgccctttatacatgggatggggtcttgatggatcagtctggttttcttcagagatgaaggcattgagtgatgattgtgaacgcttcataacattccccccagggcatctctactcaagcaagacaggtggtctaaggagatggtacaacccaccatggttttcagagacggtcccttcaaccccttacaatgctctcttcctccgggagatgtttgagaaggctgttattaagaggctgatgactgatgtgccatttggtgtgcttttatctggtggactcgactcttctttggttgcatctgttgcttcacggcacttaaacgaaacaaaggttgacaggcagtggggaaataaattgcatactttctgtataggtttgaagggttctcctgatcttaaagctgctagagaagttgctgattacctcagcactgtacatcatgagttccacttcacagtgcaggaggggattgatgccttggaagaagtcatctaccatattgagacatatgatgttacaacaatcagagcaagtaccccaatgtttttgatgtcacgcaaaatcaaatctttgggtgtgaagatggttatttctggcgaaggttcagatgaaatttttggtggttacctttattttcacaaggcaccaaacaagaaagaattccatgaggaaacatgtcggaagataaaagcactacatctgtatgactgcttgagagctaacaaagcaacttctgcctggggtgttgaggctcgtgttccattccttgacaaaagtttcatcagtgtagcaatggacattgatcctgaatggaagatgataaaacgtgacctcggtcgaattgagaaatgggttatccgtaatgcatttgatgatgaggagaggccctatttacctaagcacattctctacaggcaaaaggaacagttcagtgatggtgttgggtatagttggatcgatggattgaaggaccatgccagccaacatgtctccgattccatgatgatgaatgctggctttgtttacccagagaacacacccacaacaaaagaagggtactactacagaatgatattcgagaaattctttcccaagcctgcagcaaggtcaactgttcctggaggtcctagtgtggcctgcagcactgccaaagctgttgaatgggatgcatcctggtccaagaaccttgatccttctgggcgtgctgctttgggtgttcgcgatgctgcgtatgaagacactgcaggggaaactcctgcctctgctgatcctgtctcagacaagggccttcgtccagctattggcgaaagcctagggacacccgttgcttcagccacagctgtctaaccttatgtttatcacccagcaatgcttgaaacagcaaaggttctccattgcttgtttcagtttccttccgatcatgtttttagttccatcaatcaagcaatggagacatgcttgtgcttcatgcttggcagcatcgtgtttggggttttcactgagcagtactgtttaatttttatggactgaaaagactcagttttgtaaatattcgtcactgtgaccaattcctgtggtggtttatgtgatttgcagattgcagt

SEQ ID NO: 28821 - DNA, 3179 bp, Schizochytrium aggregatum
  Clone ID: LIB81-021-C5_FLI
cgcctgagccgctcgccagcgaccgcgtcgccttcatgtacggcgaaggtcgcagcccttactacggcatcacccaagacattcaccgcatttggcccgaactccacgaggtcatcaacgaaaagacgaaccgtctctgggccgaaggcgaccgctgggtcatgccgcgcgccagcttcaagtcggagctcgagagccagcagcaagagtttgatcgcaacatgattgaaatgttccgtcttggaatcctcacctcaattgccttcaccaatctggcgcgcgacgttctcaacatcacgcccaaggccgcctttggcctcagtcttggcgagatttccatgatttttgccttttccaagaagaacggtctcatctccgaccagctcaccaaggatcttcgcgagtccgacgtgtggaacaaggctctggccgttgaatttaatgcgctgcgcgaggcctggggcattccacagagtgtccccaaggacgagttctggcaaggctacattgtgcgcggcaccaagcaggatatcgaggcggccatcgccccggacagcaagtacgtgcgcctcaccatcatcaatgatgccaacaccgccctcattagcggcaagcccgacgcctgcaaggctgcgatcgcgcgtctcggtggcaacattcctgcgcttcccgtgacccagggcatgtgcggccactgccccgaggtgggaccttataccaaggatatcgccaagatccatgccaaccttgagttccccgttgtcgacggccttgacctctggaccacaatcaaccagaagcgcctcgtgccacgcgccacgggcgccaaggacgaatgggccccttcttcctttggcgagtacgccggccagctctacgagaagcaggctaacttcccccaaatcgtcgagaccatttacaagcaaaactacgacgtctttgtcgaggttgggcccaacaaccaccgtagcaccgcagtgcgcaccacgcttggtccccagcgcaaccaccttgctggcgccatcgacaagcagaacgaggatgcttggacgaccatcgtcaagcttgtggcttcgctcaaggcccaccttgttcctggcgtcacgatctcgccgctgtaccactccaagcttgtggcggaggctgaggcttgctacgctgcgctctgcaagggtgaaaagcccaagaagaacaagtttgtgcgcaagattcagctcaacggtcgcttcaacagcaaggcggaccccatctcctcggccgatcttgccagctttccgcctgcggaccctgccattgaagccgccatctcgagccgcatcatgaagcctgtcgctcccaagttctacgcgcgtctcaacattgacgagcaggacgagacccgagatccgatcctcaacaaggacaacgcgccgtcttcttcttcttcttcttcttcttcttcttcttcttcttcttcttctccgtcgcctgctccttcggcccccgtgcaaaagaaggctgctcccgccgcggagaccaaggctgttgcttcggctgacgcacttcgcagtgccctgctcgatctcgacagtatgcttgcgctgagctctgccagtgcctccggcaaccttgttgagactgcgcctagcgacgcctcggtcattgtgccgccctgcaacattgcggatctcggcagccgcgccttcatgaaaacgtacggtgtttcggcgcctctgtacacgggcgccatggccaagggcattgcctctgcggacctcgtcattgccgccggccgccagggcatccttgcgtcctttggcgccggcggacttcccatgcaggttgtgcgtgagtccatcgaaaagattcaggccgccctgcccaatggcccgtacgctgtcaaccttatccattctccctttgacagcaacctcgaaaagggcaatgtcgatctcttcctcgagaagggtgtcacctttgtcgaggcctcggcctttatgacgctcaccccgcaggtcgtgcggtaccgcgcggctggcctcacgcgcaacgccgacggctcggtcaacatccgcaaccgtatcattggcaaggtctcgcgcaccgagctcgccgagatgttcatgcgtcctgcgcccgagcaccttcttcagaagctcattgcttccggcgagatcaaccaggagcaggccgagctcgcccgccgtgttcccgtcgctgacgacatcgcggtcgaagctgactcgggtggccacaccgacaaccgccccatccacgtcattctgcccctcatcatcaaccttcgcgaccgccttcaccgcgagtgcggctacccggccaaccttcgcgtccgtgtgggcgccggcggtggcattgggtgcccccaggcggcgctggccaccttcaacatgggtgcctcctttattgtcaccggcaccgtgaaccaggtcgccaagcagtcgggcacgtgcgacaatgtgcgcaagcagctcgcgaaggccacttactcggacgtatgcatggccccggctgccgacatgttcgaggaaggcgtcaagcttcaggtcctcaagaagggaaccatgtttccctcgcgcgccaacaagctctacgagctcttttgcaagtacgactcgttcgagtccatgccccccgcagagcttgcgcgcgtcgagaagcgcatcttcagccgcgcgctcgaagaggtctgggacgagaccaaaaacttttacattaaccgtcttcacaacccggagaagatccagcgcgccgagcgcgaccccaagctcaagatgtcgctgtgctttcgctggtacctgagcctggcgagccgctgggccaacactggagcttccgatcgcgtcatggactaccaggtctggtgcggtcctgccattggttccttcaacgatttcatcaagggaacttaccttgatccggccgtcgcaaacgagtacccgtgcgtcgttcagattaacaagcagatccttcgtggagcgtgcttcttgcgccgtctcgaaattctgcgcaacgcacgcctttccgatggcgctgccgctcttgtggccagcatcgatgacacatacgtcccggccgagaagctgtaagtaagctctcatatatgttagttgcgtgagaccgacacgaagataatatcacatacgcttttgtttgttctttcaattatttgtctgtgcttc

SEQ ID NO: 28822 - DNA, 2506 bp, Schizochytrium aggregatum
  Clone ID: LIB81-042-B9_FLI
gcgagcagaggccggccgcgagcccgagcccgcgccgcagatcactagtaccgctgcggaatcacagcagcagcagcagcagcagcagcagcagcagcagcagcagcagccacgagagggagataaagaaaaagcggcagagacgatggcgctccgtgtcaagacgaacaagaagccatgctgggagatgaccaaggaggagctgaccagcggcaagaccgaggtgttcaactatgaggaactcctcgagttcgcagagggcgacatcgccaaggtcttcggacccgagttcgccgtcatcgacaagtacccgcgccgcgtgcgcctgcccgcccgcgagtacctgctcgtgacccgcgtcaccctcatggacgccgaggtcaacaactaccgcgtcggcgcccgcatggtcaccgagtacgatctccccgtcaacggagagctctccgagggcggagactgcccctgggccgtcctggtcgagagtggccagtgcgatctcatgctcatctcctacatgggcattgacttccagaaccagggcgaccgcgtctaccgcctgctcaacaccacgctcaccttttacggcgtggcccacgagggcgagaccctcgagtacgacattcgcgtcaccggcttcgccaagcgtctcgacggcggcatctccatgttcttcttcgagtacgactgctacgtcaacggccgcctcctcatcgagatgcgcgatggctgcgccggcttcttcaccaacgaggagctcgacgccggcaagggcgtcgtcttcacccgcggcgacctcgccgcccgcgccaagatcccaaagcaggacgtctccccctacgccgtcgccccctgcctccacaagaccaagctcaacgaaaaggagatgcagaccctcgtcgacaaggactgggcatccgtctttggctccaagaacggcatgccggaaatcaactacaaactctgcgcgcgtaagatgctcatgattgaccgcgtcaccagcattgaccacaagggcggtgtctacggcctcggtcagctcgtcggtgaaaagatcctcgagcgcgaccactggtactttccctgccactttgtcaaggatcaggtcatggccggatccctcgtctccgacggctgcagccagatgctcaagatgtacatgatctggctcggcctccacctcaccaccggaccctttgacttccgcccggtcaacggccaccccaacaaggtccgctgccgcggccaaatctccccgcacaagggcaagctcgtctacgtcatggagatcaaggagatgggcttcgacgaggacaacgacccgtacgccattgccgacgtcaacatcattgatgtcgacttcgaaaagggccaggactttagcctcgaccgcatcagcgactacggcaagggcgacctcaacaagaagatcgtcgtcgactttaagggcatcgctctcaagatgcagaagcgctccaccaacaagaacccctccaaggttcagcccgtctttgccaacggcgccgccactgtcggccccgaggcctccaaggcttcctccggcgccagcgccagcgccagcgccgccccggccaagcctgccttcagcgccgatgttcttgcgcccaagcccgttgcccttcccgagcacatcctcaagggcgacgccctcgcccccaaggagatgtcctggcaccccatggcccgcatcccgggcaacccgacgccctcttttgcgccctcggcctacaagccgcgcaacatcgcctttacgcccttccccggcaaccccaacgataacgaccacaccccgggcaagatgccgctcacctggttcaacatggccgagttcatggccggcaaggtcagcatgtgcctcggccccgagttcgccaagttcgacgactcgaacaccagccgcagccccgcttgggacctcgctctcgtcacccgcgccgtgtctgtgtctgacctcaagcacgtcaactaccgcaacatcgacctcgacccctccaagggtaccatggtcggcgagttcgactgccccgcggacgcctggttctacaagggcgcctgcaacgatgcccacatgccgtactcgatcctcatggagatcgccctccagacctcgggtgtgctcacctcggtgctcaaggcgcccctgaccatggagaaggacgacatcctcttccgcaacctcgacgccaacgccgagttcgtgcgcgccgacctcgactaccgcggcaagactatccgcaacgtcaccaagtgcactggctacagcatgctcggcgagatgggcgtccaccgcttcacctttgagctctacgtcgatgatgtgctcttttacaagggctcgacctcgttcggctggttcgtgcccgaggtctttgccgcccaggccggcctcgacaacggccgcaagtcggagccctggttcattgagaacaaggttccggcctcgcaggtctcctcctttgacgtgcgccccaacggcagcggccgc

SEQ ID NO: 28823 - DNA, 1536 bp, Zea mays
  Clone ID: LIB4765-003-H4_FLI
tctgaaagttcggagccgccggcccgtccgcctccctctccgcctcccgtccccaaggccaatagttttcaagtggcaatggcggaccaggctaaccaacccactgtccttcataagctcggtggccagttccacctgcgctcgatcatctctgaaggtgtacgggcccgtaacatatgcccatctgtctcatcttatgaaaggagatttgccacaaggaactacatgacccagagcctttggggcccttcaatgtctgttagcggtggcatcaatgtcccagtgatgcagaccccgctctgtgctaatgctcctgctgagaaaggaggcaagaacttcatgattgatttcatgatgggcggtgtttcagctgctgtttcaaagactgctgctgctcccatcgagcgtgtgaagctgcttattcagaaccaagatgagatgattaagtctggtaggctatcagagccgtacaagggtattgttgactgcttcaaacgtaccattaaggatgaaggtttctcttccttgtggaggggtaacactgctaatgttattcgttacttccctactcaggctttgaactttgcatttaaggactacttcaagaggttgttcaacttcaagaatgatagggatggctattggaagtggtttgctggcaacctggcctctggtggtgctgctggtgcttcctctttgttttttgtgtactccctggactacgcgagaacaaggttggctaatgacgcgaaggctgccaagggaggaggtgaaaggcagttcaatgggcttgtcgatgtctaccgcaagacactcaagtctgatggtattgctgggctttaccgtggatttaacatctcctgtgttggaatcattgtttatcgtggtctgtactttgggctctatgattccatcaagccagttgtccttactggcaacctccaggacaatttctttgccagtttcgctctgggttggctgatcactaatggtgctggtcttgcatcttaccccatcgataccgtccgcagaaggatgatgatgacatctggtgaggctgtcaagtacaagagctccttggacgcgttccagcagattcttaagaaggaagggcccaagtccctgttcaagggtgctggtgctaacattcttcgtgccattgctggtgctggtgtgctttctggctatgaccagctccagatcctcttcttcggaaagaagtacggctccggcggtgcttaaatggagaaatatgatgacgaacaagagcagtgtgtgttcccggtcctttccaatcaggatctggtgaagtttttgcctttcatatcgaagaaattaataattcatgtagagggaggattcttccaacaatttgttttggatggagacttagatctccaaacactcgtaactatcctactaggtggtgacatcggtccccaaaaacatttatggtcatagagtctgcccttcgtttgtcagtcgggcaatttttcttgcatacaatgccttcgtttaagtatcggatgagttgct

SEQ ID NO: 28824 - DNA, 1655 bp, Zea mays
  Clone ID: LIB4765-003-H6_FLI
cgggcgggagaaggggagaaaacgcggagccacaccccgtgtcgaaaccccagggcgccaagcttcccgcgggccaccgccgctgccgatgccggtgccgaagccgatggagaggaagcaagccgcctacagcaacctcgatgagaggtacgcgatccagggggagaagtaccaggggcagcagtacagccatatctacttcacgcgcctccaccacatgcggaatctcctccacgccctcgtcccctcctggaagccgcaactccctgtcactacagtgttaggacttgaagaaggaaaggattgcataattgttggaactttatataagcacatgaagttgaagccttcaattcttgatgaatatgccaaagagaggtctgcaattccccttgtcaaaccacataatttcatgcatcctgatgatcatctcattctggaagatgaaagcggaagagttacacttgcaggagccatacctccagcagcattcgtgactggggttgtagtggctctccatgggaaggaaacaagtgctggcaattttcttgtggaagatgttcttgaggctggtcttccaccccaaagtgcattgtctagcgcagaagaagacaagtatgtagtattcatatcagggctaagtgtaggaagtgacacattcaatcctctacagttccaacttcttattgaccatgtcacaggacatctgggtgacgagaatgagcaatccatagcatcaaatatagtacgcattgtggttgttgggaattcagtgcatatttcaccaaggtttgtcaatggtcagacggtaccatcaaaagatcaatcaaggatagcagaacctattaaggaactggatataatgcttacccagctcgtggcttcgttgcctgtagatatgatgccggggtgtcatgatccggcaaatttttctttgcctcagcagcctctgcacagatgccttttctctggggcatccacctacaacactttttcgtcttgttcaaatccccatcaattcgagcttgacagtgtccagtttcttggaacatctggtcagaacatagatgacctgtacaagtactctgatgctaaagacaagctggaattcatggaaagaacactgagatggcgccatcttgctcctactgctccaaatagcctaggctgttatccatacacagacaaggatcctttccttgttgaaagttgcccgcacgtctactttgttgggaatcaagataaatatgaaactcgactgttggaagggcaagaaaaacagaaagtgaggctaatctccatcccaaggttctcggagagtggagttgctgtaatgctcaatctgaggaacttggaatgcagcacattgagtttctcaacaagctttgatgcctgaatatgctctgatgtttggaagtgcagaagacttcaatgtacaatgttgagcggcatgaccacgagggtgtatttgtactagagcagttctttattagatgtatgatgatgaccttaggttttgccaagtagatcttttagaatgcagatgctgtaacttgtaaccacaaccgaaactgaggctggaccgagtgtagcgtttaacaatcgagttggtgctcatgcctcgttttgcaatcacaatcagcaggcacgtttgt

SEQ ID NO: 28825 - DNA, 1859 bp, Zea mays
  Clone ID: LIB4765-004-A10_FLI
ccgggaatgaccaaaattctcctcctcctgctgctcctcgcattgccgctgccggcagccctggcgctcaccgccgagggcctggcgctgctgacgttcaaggcggcggcgaccgacgacccgcactcggcgctctcgcggtggtccgagtccgaccaggacccgtgccggtggccgggtgtcatctgcgccaacgcctcgtcctcggcgccgtccgcggccccgcgcgtcgtcggcttggccgtggcgggcaagaacatctccgggtacatcccctcggagctggggtcgctgctcttcctccgccgcctcaacctccatggcaaccggctgtcgggcgtcatccccgccgcgctatccaacgcctcgtcgctccactctctctacctctacgggaaccgcctcacgggcggccttcccgtcgcgctctgcgacctcccacacctccagaacctggacgtctccgggaacgcgctctcgggcgagctgccgctggacctccgtggctgccgcagcctgcagcggctcgtgctggcccggaacgccttcacgggtgagctccccgcgggagtgtggcccgagatgcccaacctgcagcagctcgacctctcctccaacgccttcaacggctccataccgcccgacctcggcgagctccccaggctcgccggcacgcttaacctctcccacaaccacttctctggcgtcgtgccgcccgagctgggccgcctcgctgccaccgtgacgctcgacctccgcttcaacaacctctccggggccatcccacagacgggctccctcgccagccagggccccaccgcgttcctcaacaaccccggcctctgcggctacccgctccaggtcccctgccgcgccgtcccgccgcccacggagtcgccgacgccgccggccacgacgaccccgctgccctccaccgcgtcctccgaccaacaccagcccatcaggacgggcctgatcgcgctcatctccgtcgcggacgccgccggggtggccctggtcggcgtcatcctagtgtacatgtactggaaggtcaaggaccggaaggggcgccgcgacggcggcggcgacgacagcagcaagagcgggctctgccgctgcatgctgtggcggcacggtggcagtgacagctcggacgcgtcctcgggcgacggcgacggcgaaggcaagtacagcggcggcgagggggagcttgtggcgatggaccgcgggttccgcgtggagctggacgagctgttgcggtcctcggcctacgtgctgggcaagggaggcaaggggatcgtgtacaaggtggtggtggcgaacgggaccacgcccgtggccgtgcggcggctgggcggcggcggcggcggcgcggaccgctgcaaggagttcgcggcggaggcgcgcgccgtggggcgggtgcgccatcccaacgtggtgcgcctgcgcgcctactactggtccgccgacgagaagctcgtcgtcaccgacagcctcgaaaagatcggctaatgagtcacaaggtcatgctagcgtacacaacgccatgcatgctcatccaaggtcattgttatttttattaccttttccgtctcctccccgattttctctctcttgtaattcagtcttttttttaatttccttgctgtgctctcttgcaattggtcgtttgtaattgttggctattcttttgggtgcaattcatgttttccgtaattgatggctattacaaatggtacatagagaggtatgtaggagaaagggtatttccagcttaaattttcaggcctgttttagtacactggttttcaaaaccacaatttgtaatatcgcataactatagtatattttatattagc

SEQ ID NO: 28826 - DNA, 1751 bp, Zea mays
  Clone ID: LIB4765-004-B10_FLI
ccgggacaccgaaatatccgcgtggcgtggactcgggcaccactctccattcctgcatcccatctcttcttcgcctcctccgcctcgccggcgtcaccgtccggtcccgcctctcccccccgctcgaagctcgatctcttctcccgttctccgcccacgcaatccctgccaccgccgaatgcggaacactcgcctttggtgaccgactgacctaccctgcttctgccgggttagttgagtgtccgcgccgcgtccggatctcgaatgcgccgccgccgccgtcgcgcgatctagcggctgcgcgctgccccgcaggagggttgagctccaggggcccggtgtggtcaggcggcagatatggcaacggaggcgtccacctctgcggcgggcgggatctgggtggaggggatgtccgcggacaacataaaggggctggtgctcgcgctctcctccagcttcttcatcggggccagcttcatcgtcaagaagaaggggcttaagaaggccggtgcgtccggcgtccgcgcaggtgttggtggttactcttacttgtatgaaccattatggtgggcaggaatgattacaatgattgttggagaagtggctaactttgcagcatatgcttttgctcctgctatcttggtcacaccacttggtgcccttagcatcataattagtgctgctcttgcagacattatgttgaaggaaaagctgcatatatttggtatacttgggtgtgttctttgtgttgtgggttcaacaactattgtacttcatgcccctcaggagcgcacaattgaatctgtagcagaagtgtgggatcttgctactgaaccagcctttctatcttatgctgccattgttcttgctgcaacatttgtcctcatatactactttattccacgatatggtcagacacacatcatggtctatattggtgtttgttcccttgtaggatctctgtcggtcatgagtgtgaaagctcttggaatagccttgaaactgaccttttctggcatgaatcagctaatttatccacaaacatggttgttcaccattgttgttgttgcatgtatagtaacacagatgaactacctgaacaaggctcttgatactttcaacacagcagttgtatcaccgatatactatacaatgttcacgtcactaaccattttggctagcgtgataatgttcaaggactgggatcgtcaaaatccaactcaaattgtaacagagatgtgtggttttgttaccattctttcggggacgtttcttctccacaagacaaaagacatggttgatggcctcccgccaactctacctgtccggattcctaaacatgaggacgatgcagctgaaggaatccctctcaggtctgctgaaggcatcccgctcagatcaccgagggcaacggaatcgtttcgatcaacgctataatggttggtgatccttcttcaaaggccatgctcagccattctttcatttgatacacacctttgtagattgtattttaggattccaaaaggtaaaggcaccgctccccatgtaatttttttgagacaccggtgtagagtatcgggggaacttatgttatacatctcgaaatgcccagaatgggcttagatccagatttttatagacaccagacaccacggtggcatacaagacccgttatcagcgacacagttactgttgtattcttttggatagaaaattagaagataggggaagaatctgaagaaggctcctcg

SEQ ID NO: 28827 - DNA, 1597 bp, Zea mays
  Clone ID: LIB4765-004-F1_FLI
ccggaccaccttggacccctgtcctcaacctcaagccgccacgcaccaccaacacacgcgcgctggcttcttcaacctcggttgctcgctcgcaacaagacacggatcgtcagagcaagagctctggtgacctgacgattctgctcttgttctcgtacggcgccggtgcctagcgtctgtagcctttttgtgtgtgttttttcgcccatatctccccaccaccaccaccaccaacctcagccgcagttcacccgcgtcaccgcacgagtacacgagcaatccgcaagcgataacctgcaagctgaggggccagctgttttgctcacggagaaagaggttctagctagtcgttcatcaacacggacacaccatggtgaggccgccgtgctgcgacaaggagggcgtcaagaaggggccatggacgccggaggaggacctcgtcctcgtctcctacatccaggagcacggccccggcaactggcgcgccgtcccggccagaaccgggctgatgcggtgcagcaagagctgccgtctgcggtggaccaactacctccggccgggcatcaagcgcggcaacttcaccgagcaggaggagaagctcatcgtgcacctccaggccctcctcggcaacaggtgggcggccatcgcgtcgtacctgccggagcggacggacaacgacatcaagaactactggaacacgcacctcaagcgcaagctgcagagcggcggcgacggggcggccaagccgccggcgcacaggccgccgtcgtcgtccaagggccagtgggagaggaggctgcagacggacatcaacctggcgcgccgcgcgcttcgcgaggccctcaccccgctcgacgacctcaagccgcagctgcagcgcgacgccgccgccgacgcgccggccgctggcgcgggcacgggcggcggtgacagcccggcttcgagctcgtcgggcgcgtcgcagtcctcccctttggcgccagcggccttcgccgccgccgccgcggggccgtacgttctcaccgcggagaacatctcgcggatgctggacgggtgggctggccggaaggtccgcggcggcgggaccccgggcacccccggcggtgccgagagcgcgtccacgggatcctcggacgcgtcggaggtgtcgtacggtggcgccgccgtcgcatcggccgcgccggcgcccgcttgtggtgggccggtcttcgaatacgaggcgaagccgggcgtgccgacgtcccatcagcagatgccgctgtcggcgatcgagtcgtggctgttcgacgacgacagccacttgcaccatgctgtccagagcgccagcttgctcgatgccgcccccatggattaccccttctagctctagtgtgtccaatcgatcaagctcaagctaatcccttcaagcgaggagtgtgattacagcgctgtctcctaaagaaaactacacagatcctgcagtacgacgtcggtggctgattaatcgatcggctaggtagctgattcagatcggtcgcttgatcaggttgtttacgtgggatctgcgtagttttcatttagattccaaagaacataagtagaaccacacttatgaaat

SEQ ID NO: 28828 - DNA, 952 bp, Zea mays
  Clone ID: LIB4765-005-A4_FLI
ctcgaggccggccgggactaggagtgggagggagatctcaggagtcaggtcaaatgcctcggtcctctgccagactgttccctctcacgtgctggctgacaactccgcgccgatcgatccacgggcgttattagtatatatcgccgtcagagccatcaccccgatggatccctgcgcttcgtgctcaggttcagcggaaactgagccgtgagcaccgccgccgccaccacctttgcgtttgcggtgacgacacgacaccaataatggcggcggcaaggacaaggagcctgctcgcggcggcgttcctggcgctggcggcggtgccggcggtgctctgccaggcgccaggccccgcggcggcggcgccgcccagcaagggcccgccgaacgttacggcgatcctggagaagggcgggcagtacacgacgttcatgcggctgatgaagtcgacgcagcaggacacgcagctgaacggccagctgaacaactcgttcggcagcgggtacacggtgttcgcgcccaccgacagcgccttctccagcctcaagcccggcacgctgaacaagctgtcgcagcaggagcaggtgtcgctggtgcagtaccacgtcctgccgcagttctactcgctcgactccttcgagaccgccagcaaccccgtgcgtacgcaggcgtcgggctccgacgggccctacacgctcaacatcaccgccgacagcagcggccaggccaacgtgtccacgggcctcgtcgccacccgcgtcggccaggccctgcgcgcgcagcagcccctcgccgtctactccgtcgaccaggtgctgctggccaacgacctgttcggcgtcaagcccccggcgtccgcgccgcccgccgccaggaagccggccaagggcggtccgtcgccgaggcgcccgccgccggctcggctgacgcgccgccctccggcgcggccctc

SEQ ID NO: 28829 - DNA, 1937 bp, Zea mays
  Clone ID: LIB4765-005-C1_FLI
cgacccacaccccacccgccatgggcggcgtccaacgaaatgcgcttgttaattcgcctcacttctcgctgtggtcaccacgcttcacatctcgcgcggtagcgtccgacaggcatggccgcctcctccctgctccggtcgttcacccgccgcagctgcgcgggcccgagcgctttcgcttaccgccaccaccaacgacaacaaccttggtctcccttctccaccaccgccgctgcggtcacgcaggacaaagcggcgaagaggttccctggactagggccgacggcgaagggggagaaggccagggtggtggtgttggggacagggtgggcggggtctcggctaatgaaggacctcgatacgcaaggctacgacgtggtctgcgtcgccccgcgcaaccacatggtgttcacgccgctgctcgcctccacctgcgtcggcacgctcgagttccgatccgtcgctgagccggtcgcgcgcatccagcccgccgtgtccaagtcgccgggctcctacttcctcctcgcccgttgcaccggcgtcgaccccgacggccacacgatggtgagaaagattccttggagccatggaaattcaaggttgcttatgacaagttggtttttgcctgtggagctgaggcatcaacttttgggatacgtggtgttaccgaccatgcaatctttcttcgtgaagttcatcatgctcaagagattcggagacggctcctccttaatctgatgctgtctgatctccctggaatttcagaagaagaaaagtgcagattgttgcactgtgttgttgttggaggtggtccaacaggggtggaatttagtggtgaacttagtgattttattatacgagatgtcaaacagcgttattcacatgtgaaggattatattcatgtgaccctgattgaggcaaatgagatattgtcatcattcgatgttcggcttaggcaatatgctacaaagcaactaattaagtcaggtgttaggcttgtgcaaggaattgttaaggatgtgcagcccaacaaaataattcttgacaatggagaagaagttccttatggtttactggtatggtccaccggagttggtgcttcaccattcgttaagtcattgccatttcctaagtcacctggtggaaggatcggtgtcaatgagtggttacgcgtcccttctgttcatgatgtttatgccattggtgactgcagtggatttctcgagagcaccggcaaggaagttctccctgctttagctcaggttgctgaacgacaaggcaagtacctggcaagcctgctcaaccatgtcatgaaagctggaggagggcatgcaaactctgagactgaagcagatctgggtcgtccaccctttgtgtacaagcatctaggcagcatggcaactgttggaagatacaaagctctagtcgatctgaggcaaagcaaggagtcaagagggatatctcttgcaggatttgtgagctggttcatctggcgctcggcatatttaactcgtgttgttagctggaggaataggttctatgtggctatcaattggctgaccactctcttatttggccgggacataagcagaatctagagtgtctttgtatacgtacgaacaagcgtataagtcgatgtagagttacacgccacggtcacttgcttgccacacacccctccgggggtccactcctaccactgtccctattagctgtgaatgtaattcacaggtgaattatgaataaatctgaggatactgcagttacttacatgtggtgtgaatgtataatactctgtcacttgtaccactgtccctaatagctgtgaatgtaattcacaggtaaatcatgaacaaatctgaggataacacagttgcttacaagtgctgtgaatgtataatactcttaaaaaagtctaaacaacttggaaccgaggt

SEQ ID NO: 28830 - DNA, 1744 bp, Zea mays
  Clone ID: LIB4765-005-D12_FLI
ccgggctctagaaagcgacaccaaagtcttctccctctccctcccgcggttccgcccgccacgcctcctctattccaggagtcttctagaggtgaagagggaccacaggtccacagccgcggcagcaccgccacctacgccggcagaatccttgatcgagacaggagcggacgtggcctagggtttctgagccaggccggcgccatggtgggctgctctaggggctccctccccacctggatgaccgccgccgccgcgcgggtcgacctctctggcggcgtaacgccttcgcaccagggctcgccctctccacctcactcctcctcgggtcccgctccggccgcgggggcggaccagcagcttgggttgttcgagcgcgcgctctccgccgccggcgccgccttcgtctcagctatcatcgtcaaccctctcgatgttgccaagacgaggctgcaggctcaggccgcaggggtgctgtaccaccagcctgcccagatggcggcgctcggccccgatgcaatcctgtctgaattcagatgttctccttcatgcacacgtggtctcttactaggaagtgagccagtttgtcctcctgattgcttccagtacaagggaacacttgatgtattcttgaaagtggttagacaggagggtttcagtagactatggagaggaacaaatgcaggcttagcattagctgtacccactgttgggatatacttgccttgttatgatatattccgcaacggcattgaggatttcacaagaagtaatgctcctggcttgacaccatatgccccactagtagcaggatcagttgcacgttcgttagcatgcattgcttgttctccaattgagttggcaaggacgcgtatgcaggcatataaagagtttcgtcctggattaaagcctcctggaatgtggaaaaccttggttggtgttctcccaccacttgcaggttctagtcagaatgtacaaaattatcgtgttctgtggactggggtgggtgcacaactggctcgagatgttcctttctccgctatatgctggtcaactcttgagcctattcgaagacaactgcttggtcttcttggagaagacggcaatgcagccagtgtattgggtgcaaattttgctgctggttttgtagcaggcagtcttgctgctggtgctacatgcccgttggatgttgcaaaaacaaggagacagatagagaaggatactgaaaaggcaatgaggatgactacaaggcaaacgttaactgagatatggaggtctggaggcttgaaagggctgttcaccggcgtcggcccacgtgttgcacgtgctggtccatcagttggtatcgtcgtttccttctacgaggttgtcaagtatgctattcatcaaaggcacacctcatgatccagtttttagttgaaaaagggatggaagccctttcactttgtaaaaacaacaccgaccccggtttccgaaagtaggcctcgttactctgaccttttggacggtcagggctaggtgtaacatcagagtgctcaacagtcgactcaacagcctttttcgtcgacaatgtccatctcggtggaggataacatatcagttttgcctggcaggttttggatcattgcctaatcttatgtttgggcggatctgaagctgctttgtttaacttgttaggtagtctctgtaattgaaggtgtagtagcgcatacgctgatcaaataataataccctcggaactacg

SEQ ID NO: 28831 - DNA, 2497 bp, Zea mays
  Clone ID: LIB4765-006-B12_FLI
ccggtatcatccgtttggccgcttcatttctctccccgcttcggtgctgcctgctggccgaccgccgaagcgacaaccgaggccaccgatcagttgactcccgtctcctcgtcgcagggtctcctcacacgagcacacgaacatcgagccctccccgcaggagcataagacgcttcgcttgttttctaaaacattgctggggttgcagcatgtgtacttgggcatagagggattgttacatcgagctagtgctttggtctctgctgtagcagagcgcaatgggcatccgggcttgttcggtttgctggttgttctatgtgctggttcttgtctgttccttgtgtcaggtactttatgttggatcagtggcggctcaaactgctcagttgactgtggatgcttcacctcagaatgctcagataatccctggcaatatgtttggcatcttctttgaggaaatcaaccatgctggtgctggtggattgtgggcagagcttgtaagcaacagaggttttgaagctggtggttctaatactccttcaaacattgacccatggttgatcattggggatgaatcaaatattattgtggcaacagatcggtcatcatgttttgctagtaacccaattgcacttcgaatggaagtactttgtggagctagtgaaactaatgcttgcccatcaggaggagttggaatctacaatcctggttactggggcatgaacattgaaagaacaaatgtctatagagttaccatatacatcaggtcatcagaatcggtggagctaatggtttctttaacaagttcagatggtcttcaaaatctagcctctcatacaatcatgggagacaaagaagatttcgttgagtggacgaaggttgaatttgatttgcaatcaaattatataaatactaattcaagacttcagcttacaaccaccaaaagtggcataatttggtttgatcaagtatcacttatgccatcagatacttatatggggcatggtttccgtaaagatcttgcctctatgctggcaaatctgaagcctcgatttctaaaatttccaggtggcaactatgtaatgggaaattaccttataaatgcattccgctggagtgaaactgttggaccatgggaagagagacctggccacttcaatgatgcttgggcctattggactgatgatggacttgggttttttgaatttcttcaactagcagaagaccttggcgcttgccccgtttgggtggtaaatgatggggccagcatctatgaaggagttccatcagcaacaatagctgcatttgtaaaggatgttgttaatggtattgagtttgccaggggagaccccgagactgcatggggttcagttcgtgcagcaatggggcatccagagccctttcagctttattacgtttcaataggaaatcaagaatgttcaaagtactattataaagataactatgtgaagttctactctgcaataaaagcatcctatccagacatcaaaatcatatcaagctgtgacagatctgctatttcatcagacaacccagctgatttgtatgatgtccatgtctatacttcatcaggtgatatgttttccaaatctagaatgtttgataatacagcccgtaccggacccaaggcaattgttagtgaatatgctgtaactggaaatgatgctggccgaggaacactaatagctgctttagctgaagctgcatttctcattggattagaaaggaacagcgacgtggttgagatggcaagttgtgctccactctttgtaaacgacaatgaccaaaggtggaacccagatgctatagtctttaactcatggcagcactatggatgtccaaattactggatgctgcactttttcaaagattcaagcagcgccacacttcatccgtccactattcaactaccgaactacgaccaactggtcacatctgctatcacttggaataacccacatgatgggaacacttacatgaaaataaaggttgtaaattttggaagcaaagctgttagtctgaatatatctgtaactgggttggaaactgatattcagacatttggatccataaagacggttctcacgtcgggttggctgcgggatgagaactccttccaacagcccgacaaggtggtgccggcggcaagtccaataaccaacgcgggcaagcaaatgggtgttatattgaactcgtactccctgacctcatttgatctcctcttggactcggagtctcaggttcgagcctccatccaagcttatgattagtgtgagatgtgtcgtgtgcgtgcccacaatactcaataccgagatacgggtccccccaaggctccccacaaggctttcaatagaaaatacgatatttgtgaattattgtgaagtacaggcgtacagctggctatgtgtatgagattcaacaaatggtttctacgaccctaataaaggtataaaagcacctttcctcggatatcgcg

SEQ ID NO: 28832 - DNA, 894 bp, Zea mays
  Clone ID: LIB4765-006-B7_FLI
ccgggagtgcttccagttgcagccaagccaaccgaaaccgatggcgtcgggctcccgcggcggcggcgggagcgacttctccgtggtcgtggtgggctccgacgccggcgccggcgcagcgctcctcgttccctccgaccgccactcgtggcacgactgcctcgccgaggcggacgcctgcttctccgacctcgaggagcgccaggtcgtgcgcgtccagggcaccgatcgggcccgccgaaccatcgtccgtgtcgtcggcaagttcttcccggctccagcaattgacggtgaacgtctgaaaaagtatgtgttctacaaactccgcaccgaattgcctgtgggtccattctgcatcttgtacatgcacagtactgtgcagtctgatgataacaaccctggagtgtcaatcttgaggacaatttatgaggagctttcacctgagtacaaggaaaggcttcaggttttctacttcttgcatcctgggcttcgctccaggctggccatcgccacacttggcaggctatttttaagtggagggttgtattggaaaatcaagtacattagtcgactggagtatctctggggcgatataagaaagggagaggttgaaattccagattttgttattgaacatgataaggttcttgagcaccggccactcactgattatggcatagaaccagatcccctacatcttgctgatgtacctgctgaggaagtggggtactcgcttggaagatacgaagataaatggactccagaagatcgatggtattcagggaattacatgtgattttttctgctgtcgctgaagcctaaaagattattattgtatagtaacacgataatatgagatctgtatgtcagattgctgtgaaaacattggcaatg

SEQ ID NO: 28833 - DNA, 1513 bp, Zea mays
  Clone ID: LIB4765-006-F1_FLI
ccgggattattcgttgccgtacaccgacaggtttagcagccagagctcgccatgcatgtagttcgttaccatcccatttctttttacagtttcttggtccaggagctccaggtccagctagctagctagctagctagtatataaggacaagataccacaccggtagcccgccgcacagagtggtaagcatggcgagcaccacagacaaccgcctcgacctcggcctcctcctcctcctcctcgtggccgccgccaccgtcgtcctcgccgtggccgcggccccggcgcatacaccgggaggcaatactgctacccctccgccgccgttccggacggtgtacgcgttcggcgactcgttcacggacacggggaacacgcggtcgacgacggggccctactcgttcggctacgtgtccagcccgccctacggcgccaccttcttccaccgctccaccaaccgctactccgacggccgcctggttgtcgacttcctggccgaggcgctggcgctgccgtcctacctcccgccctacctcgccgtgtccgtctccaacgccaacgccacggcggccggagccggcgtcaacttcgcggtggccggcgccacggccatcgagcacgacttcttcgcgcggaacaacctcagcatcgacgtcacgccgcagtccatcatgacgcagctgggctggttcgacgcgcacctgctccggtcctcctcctcctcctccgccgccgccgccgccgacgcgctcttctgggtgggcgagatcggcgccaacgactacgcctacacagtcgtcgcccgcgacaccatccctcccaagctcgtccgcaccatggccgtccagagggtcaccgccttcgtcgagggcctgctggagcgaggcgccaagtacgtgatcgtgcaggggctgccgctgacggggtgcttgccgctggccatgacgctggcgcgcgccgacgaccgcgacgccgtgggctgcgccgcctccgtcaaccgccagagctacgcgcacaaccgccgcctcctggcggccctccgcgcgctgcgccgccgccacccggccgccgtcctcgcgtacgccgactactacgccgcgcacctcgccgtgatgcggagccccgcgcgccacggcttcgccgagcccttccgcacctgctgcggctccggcggcggcgcctacaacttcgacctcttcgccacctgcggctcgccgcaggtcaccacggcctgcgcgcgccccgccgagtacgtcaactgggacggcgtccacatgacggaggccatgtacaaggtcgtcgccggcatgttcttcagtggcgacggctactgccgcccagcgttcaaggacctgctggccatgaaagcccgccaggggaagccgtgattttgagacaatcagaatgcacgttccaattacaataagtagagctgcatgcgtgacgaatccatgtcatcttcatcgtgaacccttaaccatttatcaggcatttataattggatccacatacg

SEQ ID NO: 28834 - DNA, 1473 bp, Zea mays
  Clone ID: LIB4765-006-H6_FLI
ctcgaggccggccgggtctgacatcatcacatcgcaccgagggcgaggaggcaaaggaataacctgtgaagctgctgccatccactcatctttctgccttgattgcagtcattcctcccccaagtccatagagtgatagagaatggaggataatctaccagttaatgtccgggaatatcaagaacttgctaagaaagcactaccaaagatgcactatgattatatcaacggaggagcagaagatgaatatacactgagggagaatattgcagcatatggaagaattctgttacggccacgagtccttatagatgtgagcaagatagacatgtcaacaagcttattaggatataatatgccatcgccaataattgtcgcacctacaggggcacacaaattagccaatcccgaaggggaggtggccacagcaagagctgccgcagcatgtaacaccataatgatgctttccttctcatcaagctgcaggatcgaggaggttgcctccagttgcgacgctattcgcttttatcagttatatgtgtacaagagaagggatgtttcggcaacattggtacggcgggctgaaagtttaggattcagggcaattgttttgacagttgacacgcctgtgcttggcaggcgtgaagctgatatcagaaataagatgattgctccacctctgtcaaaccttgaaggtttaatgtcattagacgactttgacgatgctgaaggcggctccaagctggaacgattctcacgggagacgctggatccatcattgtcatggaaggacgtggagtggctcaagtccatcaccagcctgccgattctgctcaagggcatcgtcaccgcggaagacgcgaggaaggccgtggaggcgggggcggccggcttgatcgtgtccaaccacggcgcccggcagctggactatgcgccggccaccatctcggcgctcgaagaggtggttaaggcggtggcgggggctgtgccggtgctggtggacggcggcgtccggcgcggcaccgacgtgttgaaggcgctggcgctcggcgccaaggcagtcatggtgggcaggccggtgttctttgggctggcggcgcgcggggaagccggcgcgaggcacgtgatcgagatgttgaacaaggagctggagttggccatggcgctctgcggctgccgtagcgtcgcggaggtcaccagggcgcacgtccagaccgagggcgaccggatcagggccctgctgtgacttataaataagcgaccatatccgaggccgaccaccgtgctgtctgggttgcgatatgatttatatgatacgtgagggcatgtgatcgattgttgcctccacacagataagcttactattgccagagcctgggctggactatgctttcagtgattatctaaatcaaatagactgaatgctaaagggaacatccaatggtgtccatctatatagcatttgttggagcc

SEQ ID NO: 28835 - DNA, 2033 bp, Zea mays
  Clone ID: LIB4765-006-H9_FLI
gggcccaaggcttctctatctagggattcatcttcctctcgtcttccctcttcctctccgaagatacaaggcgccgtcccaggtataggtagggtcgccaccatgctggaggagctgctcatcttcacccggggcggcctcatcctgtggtcgtcctgccgggcgctcggcgccgcagccctcaagggctcccccatcgacgccctcatccgctcctgtctcctcgaggagcgatccgccgacgccagcttctcccaggacaattacgccctcaagtggaccttccacaacgacctcggccttgtcttcgtcgccgtataccagaagatactccacctcctctacgtcgacgatctcctcgccgccgtccgcaaggagttctcccagatctacgaccccaagcgcacctcctacgatgactttggggacatcttccgccagctccaccgcgaggccgaggcgcgcgccgaggaaatgaagaagtccaagcaggccctctcgtcccgtccgcagcctgctctcacccagaagaagcctggtcccaagggccgcggcggtgattcccgcggcggcgctgctaacaagggcggctctggtgccaaggatgactctgatggcgacagctatggcaaccaggaccaccgtactctggcaaatggtgccttcaagggccaagagaatggcgtccgcaaggagaattcttctcatggccgcactgttgttgtcaagggaaaggagaatggggcccccaaggatgaaggggccttcgatgtaagtaaactacagaagctacgggccaacaagaagaatggtgccactgacaatggaaccaagaagctgaccaaacctgacataaagaagaaagggaagcaagatagggtgtgggacgacaaaccttccaacaagaagctggattttacagacccggcagacgagagaggggacgaggtgacagacaatgtggcggtcatcgagggagaaagcatgatggataaggatgaggatctgagcagcgacagcgaggacgaagaggtggaagatggacccaaaaagaaaggatggttctcatcaatgttccagagtatttctggtaacaatgtattggagaagtctgatctgcagcctgcgctcaaagctctcaaagataggctgatggcaaagaacgtggcagaggaaattgcagagaagctttgcgaatctgtcgcagctagccttgagggcaagaagctaggatctttcactagaatatcatcaacagtccagacagctatggaggatgcgcttcttcgtattttgaccccaaggcgctctattgacatactgagggacgtgcacgctgccaaggagcgtgggaggccatatgttattgtttttgttggggtgaatggagttggcaaatccaccaatcttgcaaaggttgcttattggcttcttcagcataacctcagtgttacacttgcagcatgtgacaccttcagatctggtgctgttgagcagctgagaactcatgcaaggaggcttcagatacctatatttgagaagggttatagaagcattggttggaaatgatgctgtggatcagctcactaaatttaaccagaaattagcagacctatctgctgttcccactgctagattgatcgatggtatcctgctcaccaagtttgacaccatcgacgacaaggttggagcagcgctttccatggtctacatatctggagctccagtcatgttcgttggctgtggtcagtcctacacggacctgaagaagctgaacgtgaaatccattgtgaagaccctcctgaagtgattgcaccaccgtgttgaagtgcagtctgcccaaagtctgttatctattgtatccccagtgacctttgtcatcctcatgttggacgtcgtcgtggatttgtaactgtcggagttgcaacaaaacttgtgtggttgcgtcaacgtgtgccgtcttgctctaataatgcactatctgcattttgaatgggtaaaaaatggatgagtatgcgagtttgctatcgaat

SEQ ID NO: 28836 - DNA, 1190 bp, Zea mays
  Clone ID: LIB4765-007-F12_FLI
ccgggacccaaacgtttcgatatcccagagtggtgtggccgccgccggcggcttctttctccccttccattccgctccccgtgacgtcaccgaccaggcaagcactccgctccaccagagccgcctcgcctgtctgtccgagccacacacataccgtagcgcgcgtcccgaggtcggcggagcagggtcgggaggagggaatggcggtggtgggcgtcctcgcgctgcagggatcctacaacgagcacatggccgcgctgaggaggatcggagtgaagggggtggaggtgcgcaagccggagcagctcctcggcatcgactcgctcatcatccccggtggcgagagcaccaccatggccaagctcgccaactaccacaacctgttccctgcacttcgagagttcgttggaggtggaaagcctgtctggggaacctgtgctgggctcatctttcttgcaaacaaagcagtagggcaaaaaacaggggggcaggaacttgttggaggattagattgtacagtccaccgaaacttttttgggagtcagcttcaaagctttgagacagagctttcggtgccaaagctttcggagaaggaaggagggaatgatacatgccgcggtgtatttatacgggcacctgctatattggaagtaggtccagatgttgaaatattggcggattgccctgttcctgttgacagacccagcattacaatatcatttggggagggtactgaggaagaagagtactcaaaagatcgggtaattgttgcagtgcggcaagggaacatcctcgcaactgctttccacccagaattgacatcagactccagatggcatcgtttcttcttggacatggataaagaatccccagcaaaggcgttttctgcgctctccctgtcgtcatcgtcaagagacactgaaggcctgccaaagaataagccgtttgatctgcccatttttgagtaacgctaaagacaagacaaaccaaaagattgaaggaacgaagaaactgaccgtatttattatcgatcatcatttagccggttacaaaaacagccagctgagaatctgtcatactcagccgaaaaaagtgttgtctggtagctaacttgtacggataaaaaataatcacgctgtgtgctgtacgcaattctcatcagataaagcgaaacattgttttcctgggcg

SEQ ID NO: 28837 - DNA, 915 bp, Zea mays
  Clone ID: LIB4765-007-F8_FLI
ccggggggtttctatatagttgagtcctttccctagtcgtctaatccccatcagtctcccctcccaaaaccggatttgcgaaccacacctagcagccgaggttagcacgcggcgcgtcctgcggccatggaggacgaggagcacgaggtgttcggccaggagattcccgttgacggcgaggacgtcgacatggctgccggcgacgatgccaccaagctgcaggaacttgacgatatgaagcgccggctcaaggaaatggaggaggaggccgccgcgctccgcgagatgcaggccaaggttgccaaggagatgcaaggtgtagatcccaatgcaaccacatctgaaaacaaagaggagatggattctcggtcagtattcattggaaatgttgactatgcgtgcactccagaagaagtgcagcagcacttcaattcttgtggaactgtcaacagagttacaatcctgactgacaagtttgggcaaccaaaaggttttgcttacgtggaatttgtggaagttgaagctgttcaggaagctatcaagttgaacgagtcagagttgcacggtcgccaactcaaggtggcaccgaagaggactaacgttcctgggatgaagcaaccccgcggtcgaggtttcaatccgtaccatggccacccctacatgaggccgtatggttatagtccttatggttatggattccccagattccgccgcccgcgaagaccttatttttgaagctcggttcccatttggcagaacatgggcgataatcggccgcgttctgttatttcatagcttattcgggacgttcccatgcatgtttctgtattgacgatgcttaagctttgtactgtattgtatcagttatgcaagacgattatgatttagttacacgaaatgcactgttgtgatgct

SEQ ID NO: 28838 - DNA, 1761 bp, Zea mays
  Clone ID: LIB4765-007-G7_FLI
acacacatcctctaagtgctatctaatctacaatctaccaccagacactgtcgccagtcgtccctcatcaaccgcgcgcgcgcgacttcaagcatcagactaccataatcatggctccgccgccggcaatgcagaacccaggagagctaaacgacggcgcctacgacgcgccgcacatcctattcatcccgagcgccggcataggacacctgacccccgtcttccgcgtcatcgccggcttctcgagccggggcatcgacgtctccgtcgtgaccgtgctgcccaccgtgtctgccgccgagactgactacttcaacggcctcttcgcggactaccccgccgtccgccgcgtcgacatgcacctattgccgctggacgcctccgaattcacgagagaggacccgttcttcctccggtgggaggccctgcgccgctccgttcacctcctccgccccatcatcaccaacgccgcgccgcgcatcacggccatcatcaccgacatcaccctgacctcctgcgtcatccccatcgccaaggagctggacgtcccgtgccacgtcctcttccccacagccgccaccatgctctcgctcaacgcctactaccccgtctatctcgagaagctcaagggtggaccggagccgggcgtgatcggcgacgccgtcgacatccccggcgtgttccgcgtcccgcgctccgccctcccgccggcgctcctcgacgtgaacaagctcttcacgaagcagttcatcgacaacggcagagcgatcgtcgaagccgacggcgtcctcgtcaacacgttcgacgccgtggagccggcaccgctggcagccctgagaggcggcaagatcgtccccgggtacccgccggtgtacaccatcggcccactcaagtcgcacgccacgaaagcgggcgacaagccaggtgacgcgttgcttgacgaatggctaggtaagcagcgagcgcgatctgtggtgtacgtggcgttcggcaaccgcagcgctgccaggctggaccagatccgggagatcgccgccgggctggaggacagtggctatcctttcctgtgggtgctcaagaccacgaaggtggaccgggaggacgacgccgagctggcggaggtgcttggagacggataccttgagcgcgtgaaagagcgcggcatcgtgaccaaggggtgggtggagcaggaggagctgctcaaacacccggctgtgggcatgttcgtgagccacggcgggtggaactcggcgctggaggcgtcgtccgccggcgtgccgctgctggtgtggccgcagctcggcgaccaccgcgtgaacgcgatggcggcagtgagggcaggcatcggggcgtgggcggagcactggagctgggacggggaggacacgctggtgaccaggcaggagatcgccgacaaggtgaaggaggttatggccgatgagaagttgagggcgggcgtggcggtggcccgcgaggaggccgcaaaggccgtcgcggagggcggcacgagttaccgtaacatgcatgacttcatcgctaagctcaagggaggagcttgaggcttgaggagatgatgttacgttcattcccaccattccgacgagtgaagtggctgctgttacactcagccgtaccactttggttccgggttttcatttcatgttcatgtgtcttctactgctatatacaagcatactcagtgtcttatgtgaactaaagatgatttgaaatggagtcaaataatatatatgtaattaaagt

SEQ ID NO: 28839 - DNA, 1662 bp, Zea mays
  Clone ID: LIB4765-008-G6_FLI
ccgggttcaccaagatatatcttttgtaaaaaaaaaaaataataattactgctggatagagcgtctcagggacgggttgactctttctggccgcatcagcggccggctattcttcttgtccggctatccgttccaggacttcggattaagaggcgacgagatgatgcgacgctgcgtctcggcgttggcccgccgccgccgtccagatcgcacggttgatactatgaaggcacgattccaatgtttggttaacatttcctcttcaataagggacactgacagccaaaggtgctcaagtacgtgtgctacttcctgtgctaccgatccagatgttttatcgagagaagcatcgtcatcagaaatgcttgttgattcatttgggaggttccacaattacttgaggatctccttgaccgagcgctgtaatctgaggtgccagtactgtatgcctgctgaaggagttgaactaacaccaaagtcagagcttctgtcacatgatgagataattcgaatcgctgacctttttgttacttctggtgtgaataagatccgattaattggtggagaacctaccgtacgaaaagatattgaagatatttgtttgcatctttctagtttgaagggactgaaaactcttgcaatgaccacaaatggaattgttctttcaaagaaactcccaaagttgaaagaatgtggactcaatgctttaaatataagtttagatacactagtacctgcaaagtttgagttcatgacaaggcgtaaagggcactcaaaggtcttggaatcaatagatgctgctgtagaacttgggtatagccctgttaaggtcaactgtgtcatcatgcgtggtataaatgatgatgagatctgcaattttgttgaattgacgagacacaagcccatcaacgttagatttattgagtttatgccatttgatggtaatgtttggaatgtgaagaagctagttccttatgcagagatgttggacaaagtgcggcaaagttataaaggagtagagagacttcaagatcaccccacagacactgcaaagaatttcaggattgatggacatgttggcactatttcatttattacatcaatgacagagcatttttgtgctggctgcaatagattacggttattggctgatggaaacctcaaggtgtgcttatttggcccctcagaggtaagtttgagagagcccatccgtactggtgttgatgacgctggactgaaggagataattggtgccgcggttaaaaggaagaaagctaaacatgccgggatgtttgatattgccaagacagcaaatagacccatgatacatataggtggctgaggtgtgcagaatttcctcatgtcgaatatgagccaataaaatggatttgccaactgctgggttgctgcctggttttacctgaacgaccatgaaaaagttctctgatgcaatggaccaaactctttccgagtggtttaaacattagaggaggaagtggagtgtattggtcactgcagtcatacaatttagatccgtatacttgaacaaatgaacagtgtcacagaaactcactcagtcttcgcgtgccaaggtgttttggttgtgtacttgtatgttgtatgctcataatgtcacgttgtgtaagctctcttttgagatcg

SEQ ID NO: 28840 - DNA, 1709 bp, Zea mays
  Clone ID: LIB4765-008-H3_FLI
tcgaggccggccggggtccgacgtggcacgccacagccacacccatcgcttcactccaccacctccttcctccttttcccagcgcgcatccatccaccgccaccccgacctccctgcaataataattacggagtataataataataataaaaaactccgaatccgccgcgcgcgccccgtcctcgtcgccggcggaggcgcccgccaccgcccacagcagcctatcgccggagaaggaacgccgcggggagcttttccactgccatctcccgtctgacccctccgagatcggaagcggcggccatggcgatcccgctcgtgctcgtcgtgctcccgctcggcctcctcttcctcctgtccggcctcatcgtcaacaccatccaggccatcctatttgtgacaataaggcccttttccaagagcttgtatcgccggatcaacaggttcttggccgagctgctgtggctccagcttgtctgggtggtggactggtgggcaggcgttaaggtacaactacatgcggatgaggaaacttaccgatcaatgggtaaagagcatgcactcgtcatatcaaatcatcgaagtgatattgattggcttattggatggatattggcccagcgctcagggtgccttggaagtacgctcgctgtcatgaagaagtcatccaagttccttccagtcattggctggtcaatgtggtttgcagagtacctctttttggagaggagctgggccaaggatgaaaagacactaaagtggggtctccaaaggttgaaagacttccctagaccattttggctagctctttttgttgagggtactcgctttactccagcaaagcttctcgcagctcaggagtatgcggcttcccagggcttaccagctcctagaaatgtacttattccacgtaccaagggatttgtatctgccgtaagtattatgcgagattttgttccagccatttacgatacaactgtaatagttcctaaagattcccctcaaccaacaatgctgcggattttgaaagggcaatcatcagtgatacatgtccgcatgaaacgtcatgcaatgagtgagatgccaaaatcagatgatgacgtttcaaaatggtgtaaagacatttttgtggcaaaggatgccttactggacaaacatttggcaacaggcactttcgatgaggagattagacctatcggccgcccagtgaaatcattgctggtgaccctgttttggtcgtgcctcctgttgtttggtgccatcgagttcttcaagtggacgcagctcctatcgacatggagaggagtggcattcactgccgcagggatggcgctcgtgacagggctcatgcacgtcttcatcatgttctcccaggctgagcggtcgagctcagccaaggcggcacggaaccgggtcaagaaggaatgaaaacggagggtggaaatgtgattctgggctctatttacgggcagctttcaaaatgactcgattcatattaatgtatacagcaccaaattccagacagaaacaggatgctctgctcctcttgtatttgtgtgcaggaaagaattttagggagttcatttttgcccccctcttttgggcagaggaactgtaggacatgaacttgatgttggtacatttgccctgtagacattctggaagcctttcagtagttcatttatcagtaaagcttgcatctttcatcc

SEQ ID NO: 28841 - DNA, 1134 bp, Zea mays
  Clone ID: LIB4765-008-H5_FLI
ccgggacccaggggggcggggcaccacaggtactcttctcctgcttggcctcttgtgccgcaaccgcgagtgcggcctacggtagcctccaaagcagcacatccaaagcagggaccgaatggacatggaccggccggaggaggaggggcagcagcggagggagacgatgacgccggtgctcctcaggctgttcggcgtggacgtccaccggggtggcggcagcggggagccggaggagtcgccgatggacctgaggaagagctccagcatgcccgacctcaccatcaacccgctgctgtcgccggaggagaaagagggctgcaaggggtacgcctccgacgacgcggagctggcgtccggccagcagaagcgccgccgtcgcaaggcacaggacaggaagaaaggaattccatggaccgaggaggagcacaggaagttcctggacgggctaaggcagctgggcaagggggactggaggggcatctccaagggcttcgtcaccaccaggacggcgacgcaggtggccagccacgcccagaagtacttcctccggcagaccaaccccggtatgaagaagcgccgggcgagcctcttcgacgtcggtatcgcggactacaaggacaaccaggtgccaggccctcagagcatcgtcgctgccaaaccggcgcctacgcaggagataatccacaccgaccgcggcgacgtccccataccaagatatagaggcctcggagagattttaggcagtaacatgcaggttaatcaactgactgactactactatttcaacaagaactcccatgttcccgcggggacttcgctctccatggcctccggcctggaaacggcctcgaccgtcgacagcctggagctcagcatcgccgtcaacggcctggagctcagcatcgcgcccccttcccggtgcgtctgcggcggcgcggcgggggccatcaaggttctgtgactcggccgggacgccgagggagctactcgcatttggcttcccctgcgagcatgcgtttcatcaagtattatcagcctcgtcaggctgccgcgcgcagccgggtttcggtcttgctggttgtgttggtgtgttctgttctgttttgttgtgcgcaaggaatgtttgtgaac

SEQ ID NO: 28842 - DNA, 1532 bp, Zea mays
  Clone ID: LIB4765-009-D3_FLI
ccggggccatttcatctatccatcccgcagctcttgtctctggcaaccgtacgcccaaccgtgttcccgcgccgcccacgaactactctccggcgctgcccatgacgacggtgtcgcgcgcgctcggctccgcgttcgcgggcttcacgcgggcgcccgcggtggcgcagaccgcgacgaccctgccctccccgtacggctcgtcggctctgcaccagcactggcgctggagccgggcctgccgcacccggcggttctcgtccggccgcgcggcacggattagcatgagcctccgcgccggtatcgtcgggcttcctaacgtcggcaagtcaaccctcttcaacgccattgttgaaaacgggaaggcacaagctgcaaactttcccttttgcaccatcagcccaaacgttggtgtggtggctatccctgatcctcgtttgcaggtgctctcaaaattaagcaagtcccagcagacggtcccaacatccattgagcttgtggacattgctggtctagtcaaaggagcaagcaaaggagagggactaggaaatcaattcctttcaaacattcgtgaagtggattccatacttcaagttgtgcgatgctttgaggatgacgatatagttcatgtcaatggcaaggtcgatcccagatcagacattgatgtcattaacctagagctgatattttcagaccttgaacagatagagaagaggctagataagcttaacaagagtaaaacgaaagatacccaagtaaaagtgaaggaacaagcagagaaatcaggattggaaaaaattcagcaggcacttatggaaggaaagcctgcaagatcggtcgatttagctgagcatgagaaagaagctataaaacacctttatctgctaactatgaaacctgtcatttatgttgctaatgtgacagaatctgatcttgctgaacctgatagcaattctcatgtcaaagaggtggctaaagcagcatcagacttgcagtctggtatggttacaatatcagctcaggttgaagctgaactcgccgagctacctctagaagagagagtagaatatttaaaatctcttggtgttgctgaaagtggactaggaaatttggtaaaagcaacacataatctattggggttaagaacttatttcacaaccggagacaaggaaacaaaagcttggactattctttcaggcatgactgcgccacaagcagctggagttattcatagtgacttccagaaaggattcatcagagctgaaactgtatcctatgatgattttgttgcagctggttctcttggagtagcaagggagaaagggctgctgaggttggaagggaaggattatgttgtgcaggaaggagatgtcatgcttttcagattcaacgtgtgacagcaatagtagcaaaaggcttcaaaaacaccggaatttgtactaggcagaatatagtttgcccatattgtgagattttttttttgccacttgaccaccgattattgatctaccacgctggtagggcagcttttc

SEQ ID NO: 28843 - DNA, 1729 bp, Zea mays
  Clone ID: LIB4765-009-F9_FLI
ccgggggaagcgccggaacgaacgaacgcgcggcgccaccacccacatcactgccctgccgtcgtagcccagccccacccacccagcgccgcccgcccacgccaccacgcggaccgcagccgcgccgcagctgctcacacacacagggcaacagacgcctcctccatccccacgcgagcggacgacacgacgcggccatcgccgcacgttgagatcccctccgctcctcctctcgatggtctccgccagcgcgccgccgccgccgccgcaggcccagtccgacgcggccgggtcgggggaggaagccagcaagaaggtgcggaagccgtacaccatcaccaagtcgcgggagagctggacggagcaggagcacgacaagttcctcgaggccctgcagctctttgaccgtgactggaagaagatagaggcttttgttggctccaagaccgtcatccagattaggagtcacgcacaaaagtactttttgaaggttcagaaaaatggaaccagtgaacatgtcccacctccacgaccaaagcgaaaagctgcccatccatatcctcagaaagcttccaagaatgaaccaaactatggtctcaagacagattcatcttccatacataggaactctggcatgaatgtgtctgtttcttcatggcctcataggtctatcccgcaagctgttgcttcatcgatggtgaaagaagatttaggtgctggaacactaggtccaaacaatttttgctcaagcagtactgaaggccctccaagaacttggcaacctggtgaaacaaatggtccaataaatcaaattccgtcactccgccttatgccggattttgcgggagtgtacagcttcttaggtagtgttttcgatccaagcacaagtgatcatctgcagaaactgaaggagatgaatccaattgatgttgagacggcgctgttgttgatgaggaatctctccatcaatttgaccagtcctgattttgaagatcaaaggaaattgttgtctttatatagcgcttctgatggacctgagctagggagctccaggagttcggctctagcaacgagtgcacctttcatgattaagggtggatagtgtggccaggtctgtccgcatataatttcagttggacagacctcaggatggtgccctggcgtagcaccgatgagtgacgaaggaggcgcctgcaccttttcgcttctcgctagcttcatgactgctgattgtgtaagggtgcggccatgaaaggtgagattggtctgcggtcatgaaaggtgagattggtctgcggcctgatgtgtatataaaatttttgccacgaaggaggcgcctgcacctatcccaaaagctcggccatctagggcattggatgctgcttcagttcagataatcaaggctgtccttggaaatgggacgagaggaaagatcccttccccattcgttgagttcagttctctgattggtttcttgctgccctcttgatacggggacctgtgcgccatgtggccgtctcgctgtttatgtgggcaagtttcacttgaggagttgagagggcttgaggcgatcgtggttttgtagagcaacgagtgcaccttccgaatattccttgttcctgtgtgaatcgtctatattgcatcaggcgtcgttgccattgtgtaaaagggaaataaaatcacaatgtaaaggatacactaccatttgaattgtattcagtatcgaagc

SEQ ID NO: 28844 - DNA, 1500 bp, Zea mays
  Clone ID: LIB4765-009-G4_FLI
ctcgaggccggccggggagaatccagatctctcgccttctcgctaccaaataccaaccacgaagaacaggaagaatgcccaaactgtcgtgtcgggtgctctttgcggctcttctcatcgcttcgctagccgctctgctcgtccggttcccgatccacaggctcctcaatccccacgccgccatggaccccgactccgagctcgagttcgagatgcccggcgtcttgcgtgtgtacaagaccggccgcgtcgagcgcttcgacggcaccgagaccgtcccgccctgccccgatggcgatcccgccaacggcgtcgcgtccaaggacatcgtcctggaccccgccgcaggcatctccgcccgcctctacctacccgcgggagtggatgccgggaagaagctccccgtcgttgtgttcttccacggcggtgcgttcatggtccacaccgccgcctccccgctgtaccacatctacgccgcctccctcgctgccgcggtgcccgccgtcgtcgtctccgttgactaccgcctagcgcccgagcaccgcatccccgccgcctacgacgacgcattcgcggccttgaaggcggtcatcgccgcgtgccgcgcggatggcgccgaggcggaagctgagccctggctcgccgctcacggcgacgcctcccgcatcgtccttgcgggggacagcgccggcggtaacatggcgcacaacgtggcgataaggctgcgcaaggaaggcggcatcgagggttacggcgacatggtcagcggcgtcgtcctcctgtacccttatttctgggggaaggagccgctgggcgcggagcccacggatcccggctaccgcgcaatgttcgatcccacttgggaattcatctgcggcggaaagttcggcctcgaccacccctacgtcaacccaatggcatcgccggaggagtggaggcagcttggttcccgccgcgtgctggtgaccacggcggaccagtgctggttcgtggagagggcaagggcttacgcagagggaatcaagaagtgcggctgggagggggagctcgagttctacgagaccaagggtgaggcgcacgtcttcttcttgcctaaacacggcagcgaaaaagccgtgaaggagctcgccctcgtggccgaattcgtccggcgctgttgaggtgcctttcgctttgtttgcccggacctggtgagtagttcagcgagagaaaaaaaatcgcacaattagtgacttttattcatattgcaagttaagcacagaggttcagtctcgattcagaatcctgatcttgaatttctgttgtgcatcgaaatttatcctgaacagtacatactgtaatttcgaagtgcaggctagcgagtggctaaatgtattgtatacttgaaaactgtccgatgtattgtatacttgaaaattgcccctgtttctttcggactgtacgttgttagtaattgcatcttttgtttgaaaagaaattacttggactacccgacttggt

SEQ ID NO: 28845 - DNA, 1782 bp, Zea mays
  Clone ID: LIB4765-010-A6_FLI
ccgggaggttttgggccgtttcggagtacccaacagcagtagattgcgatgggtgggatatgacaggaaaccaaggacagatcagttgattgctagagccgtatccgtggatcggacacagctagacttttcgaatccggactggaagaagcagtttcaagaggatttcgataagcgcttcagcttgccacacttgacagatgtaattgatgtggaaccgaggccaactactttttctctcaagagcagagcccctcttgagaacgcgaatggtaccatgcaaggatcatggaacggctatgtcaatgatgatgacagagcacttttgaaggttattaagtttgcctcaccaacttctgctggagctgactgcattgaccctgattgtagctgggttgaacaatgggtgcaccgtgctggtccacgcaaacaaatatattttgagcctcaatatgtgaaggctgggattgtgtcgtgtggtgggctctgcccaggtctcaatgatgtcattcggcagattgtgcttacacttgaaaaatatggggtgaaaaacattgttgggatacagcatggattccgtggattttttgaggatcacttatcagaagtgccactttctaggcatgtagtccaaaatatcaatcttgctggtggtagcttcttaggagtctctcgcggtggtgcaaacatttcagacattgttgacagtattcaggctaggaggcttgatatgctatttgtgcttggtggaaatggaacacatgctggagctaatgctatacatgatgagtgccgcaagagaaaactgcaagtatcgattgtatgtgtccccaaaactattgacaatgacatattactgatggacaagacctttggatttgatactgcagtggaagctgcacaaagagctatcaactctgcatacattgaggcacattctgcatttcatggcattggactggtcaagctgatgggaagaagcagcggcttcatcacaatgcatgcctccctgtcaagtggccaagtagatatctgtctgatacctgaggtaccattcactcttgatggaccgaatggagttcttcgacatctcgaacacctgatagagaccaagggatttgctctggtttgcgttgctgaaggagcaggacaggaatactttcaaaagtcaaatgcaactgatgcatcagggaacatggttcttagtgacattggtgtgcaccttcagcagaagatcaagtcccattttaaggacataggagtccattctgatgtcaagtatattgatccaacatacatgctccgagctgtgcgagccaatgcatccgatgccatcctgtgcaccgtgcttggtcagaatgctgttcatggtgcctttgcgggttttagcggcatcacaaccggggtgtgcaacacacacaatgtgtacttgccgataccggaagtgatcaaatccacgaggtttattgatccaaacagtcggatgtggcaccggtgcctgacctcaaccgggcaaccagacttccattgatcatttattaaggaagcttgtagtagcatccgagtgtaaaggaaggttgtgtatagtatagcgaaagggacctaattgctttgtcaggccttgtctagcagcatatggttctgcaaaacattgttttgcattgtagataggctaagtttgaaataagaggtgagataggcaggatagccttagtatggcaaaatgatcatcttgaaggattcatgagtgaatgatagctaataaaatatttacgcttgatc

SEQ ID NO: 28846 - DNA, 1515 bp, Zea mays
  Clone ID: LIB4765-010-B9_FLI
ccggggtggtatacagcagcagaagcagcatcacgatcccggcccggcggcgcgtacgtcgacgaggaggaggaggacgtacgtacgcagagcagctgctggcaccatggctcccgtgagcatcagcgctgttccgttcctcccgacggcggcggggggggagacgaagctgcgcgcgtcgttcgtgcgcgaggaggacgagcgccccaaggtgccgcacgaccgcttcagcgacgaggtgccggtggtgtcgctcgagggcatcgacggcgcgcggcgggccgagatccgcgcgcgcgtggccgcggcctgcgaggactggggcatcttccaggtggtggaccacggcgtggacgccgcgctcgtggccgacatggcgcgcctcgcgcgcgacttcttcgcgctcccgcccgaggacaagctccgcttcgacatgtccggcgggaagaagggcggcttcatcgtctccagccacctccagggggaggcggtgcaggactggcgtgagatcgtgacctacttctcgtacccggtgaaggcccgcgactactcccggtggcctgacaagccggcggcgtggcgggcggtggtggagcggtacagcgagcagctgatggcgctggcgtgcaggctcctgggcgtgctctcggaggccatgggcctggacacggaggcgctggccagggcctgcgtggacatggaccagaaggtggtggtcaacttctacccgaggtgcccgcagccggacctcacgctggggctcaagcgccacaccgaccccggcaccatcacgctgctgctgcaggacctcgtcggcggcccccaggccacgcgcgacggcggccggacctggatcaccgtgcggcccgtggagggcgccttcgtcgtcaacctcggcgaccacggccacctcctgagcaacggcaggttcaagaacgcggaccaccaggcggtggtgaactcggagtgcagccgcctgtccatcgccacgttccagaacccggcgcccgacgcgacggtgtacccgctggccgtgcgcgacggggaggcgcccatactggaccatcccatcaccttcgccgagatgtaccgccgcaagatggcccgcgacatcgagctcgccaggctcaagaagcaggtcaaggccgacaagagtgccaacaaggagttcgccgactccaagcctctcgacgccattcttgcctgatatggtaggaggggcgcgactaccgtaccgatccgttgctattgctgcgtgtgatttcatcatctataagaacatatatagctacgtgcgaccgtgtggtgattaattaaggtctgaataaaataatagccgcacaaaactaggaagcgatcgatcaccccagataaatgtatgtgcgttcccttttctttcaagatgtgtaattttttcaacgtgcggttccagatatgcatggactggaccggagtgcattgtaattcttttgtttcccctgttgaatatgcaagaggtgtgcatgtctttgtatg

SEQ ID NO: 28847 - DNA, 1522 bp, Zea mays
  Clone ID: LIB4765-010-C6_FLI
ccggggaccccttcgccccgtatcgttcccttcctcctctcttttccccaccgccccctttcttggcgtctacccggcgcgaccaggaccgaatcctaaggccgccggccgccgccgccgccgcctgctcccgttggacacgagtttggagtaaagaaaccaaccctgcatctgtattctgtctgtctgtgctgcttcgaataagccttgcatctcgctgacttgggatataactatgccgaaggacaggagctcccgcgtttcctcttatgagagccgccgggctggtgcctccccatacttctcatcgtctcatggacagagcagttcttgtcgccggtccgaggagtcttgtggggcagcagcggcggcagcagcaaagcaagctgcagagtgggaggatgttcggtgcccggtgtgcatggaccacccgcacaacgccgtcctgctggtctgctcctcacacgagaagggctgccgccccttcatgtgcgacaccagctcgcggcactcgaactgctatgaccagtaccggaaggcctccaaggattcaaggacagagtgcagcgagtgccagcagcaggttcagctctcgtgcccactgtgccgtgggccggtcagcgattgcatcaaggactacagcgcgcggaggttcatgaacaccaaggtccggtcgtgcaccacggagtcgtgcgagttcaggggcgcctaccaggagctgaggaagcatgctagggtggagcatccaacaggaaggccaatggaggtagaccctgagcggcagcgggactggcgccggatggagcagcaacgggaccttggagacttgatgagcatgctgcgttcagggttcaacagcaatattgaggacgacagtggcgggcttggagacaccgaagaagggggagaggaagctgaaatgactccggcctccataaccatggtcttcatcatgccatctagaggctcaatcatgcagtacctatcggaacgcagcagaacgatcattctggtcagtcggaggcgagcaagcagcagcagcggtggcgacgctgaagccactgctccagacagcgaggaaggtgatgacctatgccatcggcagaggcatctgctggttcacagcattcttccgaacaagaggaggctgacggtgaccctgcccaatgacgtaagtcagctggcaagaggtgtgccatggcatcttcttagcctgaagatcccgaccaacatggcaacatggtatgtggcgaagaaaaacatggatgcaggtgccaccaaggcgtagccaggacaatctgtctacgcaggaaaatcgaggggaatcagcatcgcgcgaaggcttcagaaacgtggtggcctctagtaccaattctaatgtttccgcggggttctgtggcaatggagagagagaaacaattgggtggtagctatcttgtctgaatggatttcattttccttgcattgtaattctctaatatatattatcatatgaaatagattcggccgtatttgcactgcg

SEQ ID NO: 28848 - DNA, 1499 bp, Zea mays
  Clone ID: LIB4765-010-E5_FLI
ccgggatcttgaccaaacgagcccatttgctcttctcaactactcccgaattggtagctagcacagagtagacggggtaactcaaagaggcccatatttttgcaacggcccaacgcacgtctttgcagttgcagaagtttcctagggttttcgaggcgtcgcagataagagacccctcccgcacctccgagccgccactcccaagacacagagcgtcagagcccgatcccgatccagcgaggcggcgaccctccctcctccccttgcttcgctcgtccagccctgaccacccgcatccccgtcagtcatggcagcggcagcaggcggaggcgcggtgcgtgcgctgtcccagaaggagcaggacatacagatgatgctcgccgccgacgtccaccttggcaccaagaactgcgatttccagatggagcgctatgcctttaagcgccgcaccgacggcatctacatcatcaaccttggcaagacatgggagaaactgcagcttgcagcgagggttatcgttgccatcgagaacccgcaggacatcatcgtccagtccgcccgcccctatggccagcgtgctgtcctcaagttcgctcagtacactggcgctcatgccatcgctgggaggcacacccctggtaccttcactaaccagctccagacctccttcagcgagcctcggctgctcatccttaccgacccaaggactgaccatcagccaattaaggagtctgctctggggaacatccccaccattgccttctgtgatactgactctcccatgcggtatgtcgatatcggcatcccagcgaacaacaaggggagaaacagcattggatgcctgttctggcttttggccaggatggttctgcagatgaggggcactatcctccctgggcacaagtgggaggtcatggtcgatctgtttttctacagagacccagaggaagcaaaggagcaggaggaggaagctgccgttgcccccgagtttgccgcaatcactgattaccaaggagctgatcagtggggtggtgatcagtggacctctgatgtgactgcgccgcctgttgctcctactggtgctgattggggtgctgctccagctccggttcctaccggtgatggctgggatcaagctggggcccctgcacctgtggtggacggcactgtacctcttgtggttgctcctactggttgggaccaagcagccccgccaccgactgcccaaggctgggagtaggcgttgtccactctgagacctgtcttctgcggcttaagttcagtatttttctgtggtctgaatgtccaaaatctggtggcatcttctatagctatgctttgctttgaacacttatgttttagggctttctagctgaacccgttgtccaatattgctgacattgaattttttggttaatcttaaaactggaaatgatgcttgcggttctctgcattataggtcctgatcattgctagtaatgaattgcagcgctgctact

SEQ ID NO: 28849 - DNA, 1791 bp, Zea mays
  Clone ID: LIB4765-011-B5_FLI
ccggggcgcgcgctgtcactctagcgtgtctttctcctcttcctgctttccctctccagctctcatacacaaacacacggagctagcagcacggatcgagagaacaatggaggaaacaagcaggatccctgggtacttcaagaacaagggcatcctgatcacgggcgcaacaggcttccttggaaagatcctcgtggagaagatactgagggtccagccggacgtaaagaggatctacctcgccgtgcgtgcgccggatgctgcatcagccaagaaacgggtggagactgaggtgatcgggaaggagctgtttgggcttctccgagagacgcacggcaagaggttccactccttcatcgaggagaaggtggtcccgttggccggcgacatcatccacgagaacctgggcgtggaggggccccagctgaggcggatgactcgggagctcaacgtcatcgtcaatggagctgccacaacaaacttctacgagaggtacgacgtggccctggacgtgaacgtgatgggagtgaagcatatctgccagttggccaagcagtgccccaatctggaggtcgtcctccatgtgtccacggcctatgtggtgggggagaagcaggggatgatcctggagcgggcgttcaagcagggcgagaccctgcggatggagacggagctggacatggacgccgagctgcgggtggccagggactaccagcagcaggtcgtccccgccgtgatcgtgcggcccagcatcatcacaagcatccataaggagccgctgccggggtggatggaagggaccaggaccatcgacgccatcctcattggctacgccaagcagagcctctcctgcttcctagccgacctccagctcaccatggacgtgatccccggggacatggtggtgaacgcgatgatggccgcgacggtggcgcacgcgtccgcccccggcggccacaaggaggagtcgccgacggtgtaccacgcgacgtcttccctccgcaaccctgcgccgtacgcggtgctgtaccggacgggaatccgctacttctgcgaccacccgcgcgtgggcaaggacggccgccccgtgcgtacccgcaaggtgcacttcttcggcaccgtcgcagccttcaccgcctacatgctgctccgctacaggctgccgctggagcttctgcgcctgctcagcctcctctccggcggcctcctcttctcgcgcctctacgccgacctggaccgcaagtacaggttcgtcatgcatctcgtcgacctctacgggcccttcgcgctcttcaagggcatcttcgacgacgccaacatggagagactcaggatggccatgcctgtcgccgaccggctggagttcaacttcgacccaaacaccatcgactgggacgactacttctacaagatccacattccaggggtcatgaagtacgtcctcaagtagcagctacatgcactgatcgccgtcgttcgtactacctacatgtacatcatgatccatccagaatagtactattaattaattaaatccaccaattggcgcgcgtttgtatacacattgctatatattgttgctacgctcgacgtggatcccacccatcctctctattcctcatcaaaatgtatccagttattagcagctctgctttagctaccactacgtacttctgctctggcttgtttatttagtgttaatttagcaggacctgatgatgatatactcatcctgtgtgttgtcatgtcagtcactgttggttaattgattatacttaagcaggtcgttgc

SEQ ID NO: 28850 - DNA, 1813 bp, Zea mays
  Clone ID: LIB4765-011-F12_FLI
ccgggaggttaaacacaaaatgtgcatcgccgccgccaccatatagaaccacttatcacgaaccgccgccatcacatccactgcctcaactagtgttaccacctatggttcattgttgtgtctgcttcttgtagcactgttggtctacaaacattcatatttctctcaacatctggcacagcatgccgccttccaaagcacgccgaaagaggtcacttcgtgatatcactgccaccgttgccactgggcctgttgccaactcgaaacctggctcatcatcgacgaacgaggggaagcaacatgacaagaaaaaggagggtccacaggaaccggacatcccaccattaccgccggtggtggtgaatatagtcccacgacaaggattaggatgtgaagtagtggaagggctactcgtgcctagtcggaagcgagagtacaagcccaatagcaagtatactgtgggaaatcacccgatctatgccatcgggttcaatttcattgacatgcgctactatgatgtctttgccatcgccagttgcaatagtgtgataatttaccgatgccttgagaatggtggttttggtcttctacaaaattatgttgatgaggataaggatgagtcattctacactctaagctggaccatcgatcaagttgatagctcaccgctgttggtggccgctggaagcaatcggatcattcgggtcatcaattgtgctaccgaaaagttagataagagcttagttggccatggtggttcaatacatgagataaggactcatgcctcgaagccatcactcatcatttctgccagcaaggatgaatctattaggctatggaatgtccatactgggatttgcatcttagtctttgcaggggctggaggccatcgacatgatgtgttgagtgttgacttccaccctaccgaggttgggatttttgcaagttgtggcatggacaatactgtgaagatttggtcaatgaaagaattttggatatatgttgaaaaatcatattcatggactggccatccatcaaagtttccaacgaggaatatccagtttccggtcttgactgctgcagtacactctgactatgttgattgtacaagatggcttggtgacttcatcctatcaaagagtgtaaagaatgcagttttgctttgggaaccaaaaccagacaagcgtaggcctggggaggggagtgttgatgttcttcagaagtacccggtgccaaagtgttcattatggtttatgaaattttcatgtgatttttactccaaccagatggcaataggcaacaataaaggcgagatctatgtctgggaagtgcagtccagcccgcccgtcttaattgaccggctgtgcaaccaggaatgcaagtcgccgataaggcagaccgcagtgtcattcgacggaagcacgatccttggagccgccgacgacggcgcgatctggcggtgggacgaagtggaccctgctgcttccagctccaaacctgatcaagctgctgcgcccgccgccggtgcgggtgccgacgccgacgccgacgcctgagcgagaggaccgtcgtcgcccgccggttcacatcgatcgtactccgtgctggctgattacctttacccattgggatgttttggttcagagtcgccagatctagtgtgtggctgaacgttgaatgttaggatgctgctgcttgttatgctctgagtcttgagttctctttgttaatttgcaccgtggatgagatgaataacttgacgttgcaactttgcatcccatatatgccgtaaatctgccgtctgttgtttgtc

SEQ ID NO: 28851 - DNA, 2226 bp, Zea mays
  Clone ID: LIB4765-012-B1_FLI
tcgaggccggccggggcctctccattatttatgcatttccgcccccacccttacctttcccaattcagccgaggaccgcaatcgcagggcactgggagcgattaaaaaaggcagcctcccccgcaagggtaaaaacaaacaaccaccgcatcgcggcaggcaaggcatcgcccgccagccaccgagcggagggggaagcaaaagcttgataaaaaggagaggaggagacgagacgtgccgtccggacccaagcaacttcctcccaccacctcctccctcccatgcccgcatcgagatcttagcgggacagcgagaggagaggcgacgccgacgcgggcgccccctgatccctcctcgccgccgccgccgaccgaccgaccgggggaggaggaggggaggggaggacggacacgatggaggcggactccgggaagctcttcgtcggcggcatctcttgggagacggacgaggatcgcctccgcgcgtacttcggtcgctttggcgaggtcaccgaggccgttatcatgcgggaccgcaacaccggccgcgcccgtgggttcgggttcgtcgtcttcgccgattccgggatcgccgaacgcgtcaccctcgataagcacatgatcgacgggcgcatggtggaagcaaagaaggccgttcctagggacgaccagagtattgcgagcaagaacaacagcagcatagggtcacctggaccaggacgcactagaaagatcttcgttggaggtctggcctcaaatgttaccgaggtcgaatttaggaggtattttgagcaatttggtgtgataaccgatgtggtagtgatgtatgaccacaacacgcagaggcctaggggctttggtttcatcacatatgactcagaagacgcagtggacaaggcactgcacaagaacttccatgagctgaatggtaaaatggtcgaggttaagagggctgtgccaaaggagcagtctcctggacctattgcacgttcacctgcgggagggcagaactatgctatgagcagggttcataacttcctaaatggcttcaaccagggttacaacccgaaccccctgggtggttatggcatgagggtggatggaaggtatggtctccttacgggtgcacggaatgggttctcttcgtttggtccaggttatggaatgggcatgaatgctgaaggtggaatgagtgcatattttggtgcaagttctggttttgccaatagctccaatgggcggcaaataggttcttacttcaatagtagttcaaacagattaggcagtccaattggttatgttggccttaatgatgattcaggatcaatactgagttcaatgtctagaaatgtttggggcaatggaaatcttaactacacaggcaaccctacaaacacgaattcttttgctccacctgtaggtggtgggggtattcctggtgatgaaattagttggggaaaccttacttctgttcatgggatgggcaacatttcaagccttggaccgggaaaccttggccgtggaaccggagataacaactttggattgccttctggaacctacgtgaggagcaactcaactggtacaattggcgagccattttctgcatcagccaatccatatgaatcgaacaatctaggtgcatatggcagcagttctatttatggtgactccacctggaggttcaactcatctgaggttgatatacctccttttggtcatgatcttggaaatgttgatccagatattaaatcagaaatatcagcaaactatatgggcaactatactgttaataataatcagacaagcagaggtatcacttcctaggaagagtattattatattcatacatgacttgggataggtgaaatacccactactatatcaggctttcaggtgcatgactgtgaattggtgatgtcagattaatatacaggttagttgcttgtttctagttaaggtaaccagaggtgtggtttacaacaccaaaaatgctagaggagcggatacaaacattttgtgaagctttcagattttagtttaatttctacatctattaggccttcgttttttaaatgagatgtgcagtgttgattgcggcacaaacttagaagtgttccaacataagctggaattctgtcatacggaaggataaacttgtataccaaagaaatgctgtattatctttgcccatttatggctacattagcttgcatgtttttattct

SEQ ID NO: 28852 - DNA, 1642 bp, Zea mays
  Clone ID: LIB4765-012-D8_FLI
ccgggattctcatgctatgggccctatttcaagttcgtccatcactagaaaaggagctatgaggtcatcgttctctggtacgagcagctcggcagcatcatttggttcaacaataggaacctgcccatccaccgtgaagacatttacaataactgagcttgagaaggccacagaaaacttcagcttcaacaaaataataggcgaagggggttatggacgcgtctatcgtggtgtaattgaagatggtgttgaggttgctgtcaaattgctcacaaggaaacatcaaaacagagaccgtgagttcattgcagaggttgagatgctaagtcgtctacatcaccgcaaccttgtcaaactgattggtatatgcattgagcggagcacaaggtgcttggtttttgagctcattccaaacggaagtgttgaatctcatctacatggctcagataaaatatatggcccgactgattttgacactaggatgaaaatagccctcggcgcagcaaggggactagcctatctgcatgaggacgccaaccctcatgtcattcaccgggatttcaaggctagcaatgttctactggaaaacgatttcacccccaaggttgctgattttgggctggcaaaggaagcatcagatgggatggatcatatttctactcaggtcatggggactttcgggtatgttgccccagagtatgcgatgacagggcatctgcttgtcaagagcgacgtctacagctacggagtggtgctcctggagctgctgtcaggccgaaaacccgtggacatgacccagccgccggggtccgagaacctggtcacctgggcgcgcccgctcctcaccacgcgggaaggactgcagcggctggtggacccgtcgctcccggccggttacgacttcgagaagctggccaaggcggcggccatcgcgtccatgtgcgtgcacgtcgaggcgtcgcaccggccgttcatgggcgaggtcgtgcaggcgctgaagctgatccacagcggcggaggcggcgacgagacctgcagcggctccttcgggggcggtgcaacagaggagtccccgtggaacgacgtcagcaggagctcgtggaacgacgacccgccggccactccgggcccggcgctccccctgggatacggctcggaccctgccggcgccgacgagcgcaggccacggtcggcgtcgagcgcggtgctggacaagatcgagtccctggcgatgtacgactggtccggcccgctgcgcaccaaggggaggggcagcttctacaggctgagggggagcatgagcgagcacggtcgcccctcggacgacggtagcgtcgaaggttacttgatgtagccggcggcccgacgagtcgacgaccgtgcccgtgcgcagcagattgccgcggcaggcatacctcgcgtttcttttgtctgtctagaattgtatagctgctgcttgacgagattttggtgcctgttgcgaagaatacatctggacatctgacgtatccgatgcagtttggtcaagagaggttcagaatttacgtatgtcgaattgaatcacatatcagagctacattggtcggatcgtcatggacgagaatcatgttttcatagtagaaaatgaggaggtttataaccg

SEQ ID NO: 28853 - DNA, 1616 bp, Zea mays
  Clone ID: LIB4765-012-F11_FLI
ccggatcggatcggagctaggtgatcggtgcagctaactagctctagccatgggcaagagctgcgtgccccccgtcgccatggtgctcgtgcagctgggctttgccggcatgaatgtggtgtcaaagctggcgctggacgccggcatgagcccctacgtgctcatcgcctaccgcaacctcatcgccgccgccgtcatctcccccgtcgcctacttgcttgagagacgaagcggggcgacgatcacaaagaaggtgctcctccagatcttcgtctcctccatcttcggggcgacgctgaaccaggtgctgtacttcgtgggcctcaagtccaccagccccaccgtggcgtgcgcgctcaccaacacgctgccggcgctgacgttcgtgatggcggcggcgctgaagatggagtcggtgcggccgggcacgccggcggggcaggccaagctggtgggcacggcggtgtgcgtgggcggatccatggtcatacccttctacaagggccccgtgctggggctgtgggcgtccccgctccactggcgcttcgtcgcggaccacgcgccgtcgcccgccgccgccgccgcacactcgggagccgccgtgctcggggacgtcctcatcatcgccagctgcgtcgcctgggccgtctggttcatcctccacaccaagatgtccgagggcttctccgcgccctacaccagcaccgccatcatgtgcctcatggcgggcgtgcagtgcgcgggcgtcagcgccgccatggaccgcagcctcgacgtctggaagctcggctgcgacatcaggctctactccgtgctctacatcggcatcgttggctccggcatcgggttcacgctcatgtcgtggtgcatccaggtgcgcggcccgttgtacgtgtccatgttcagcccgctgctgctcgtcgtcgtcgccatcatcggctgggccatcctcggcgagaagatacgcgtgggaactgctgtcgggtccgtgctcatcgttgccgggctatacatggtgctctggggcaaagggagggagatggacaggccggacctcaacaacgacgacgacatagccgacgaggagaccgccgtgggccttgttggcttcagcggcaagggcggtggcgcggtcgccatcgcaagcagccgcgtcgaggccatcagcctgccggtgtcgttctccacaactagccccaagcggctgcaacacatccacgggtgaagggtgacgtggccgacgacgtgcgcgcgtgtcactttggacgcgccaagaaatctttcagggagccatggagagagtgagagtgtggtgaaaaaaaaataaggcaaaatagctagtggacggaggcaagacgacggcggcgacgatcggattggagtggcacacataaagacttattgtatacggttggttgcattgccgttgcagcagcgtcacagcgtggtttgttacaaacaggaaacaaacaaacaggagtgtgtgatgatgtgactgtacctagtggaagctaaggattgcttgctagcttggatggccttcttgttctgtctgcccttcccttgcattggattggatgacctgatttagttcctccaaagagtctcattcattg

SEQ ID NO: 28854 - DNA, 1050 bp, Zea mays
  Clone ID: LIB4765-013-B12_FLI
tcctccgatcgagccagggccaggcaacctggtgctccgcccctcgccgttaccgcgacgcttcggcctctggctccaccgcctgcctccctggctctgtgaccgtgacgagacacgtcgccgagaggccaccccgcttgggattgtgaggtaaagcgtgatggcagcgccaccggcgagggcccgagccgactacgactacctcatcaaactgctcctcatcggtgacagcggagttggaaaaagttgtctcctgttgcggttctcagatggatcattcaccactagctttattaccactattggcattgacttcaagataaggactgtcgagttggatggcaaacggattaagttgcagatctgggacactgcaggccaagaacgtttccgcacgattactactgcttactacaggggagcaatgggcatcttgcttgtgtacgatgtcacagacgagtcatctttcaataacataagaaattggatcagaaacattgagcaacatgcttcggataacgtgaacaaaattctggtggggaataaagctgatatggatgaaagcaaacgggctgtgcccacttcgaaggggcaagctctcgctgacgaatacgggataaagttttttgaaacgagtgcaaagacaaacctgaatgtcgagcaggttttcttttccatagcaagggacatcaaacagagactttcggagaccgattccaagcctgaggatcgaactatcaagatcaaggctgaaggggaagctgaggcagcggcggcggcgcagaattcagcttgctgtggctcctgagcacttgtcaccgcaagatagtggcgttctcgcgcatgtaattttcatcgtttcattctttgccagcgactctctccttgtgcttcttgagctatcgcagttgctgtggcctggacaaatgggtgttaactgttaagtcagagcagttacttgctgtattgtgggaactctacccatggtaaggcgtgcataatggctgtgcaaagtacctttttacactatcgatcgactacactgtttag

SEQ ID NO: 28855 - DNA, 1405 bp, Zea mays
  Clone ID: LIB4765-013-D1_FLI
tcccctctttcctcccggactcgccggcgttcctgtctgttgctgccggtgggcggtggtggttggagatgacacatgtgtttccaagggaaggtgcctcatctagctcaacctcaatgagcagccagaggagtgaaactgatgatgataggatgattgcaatggttctctctgaagaatatgccaagttagatggtgctatggccaagcgtcttactaatttaacatcaattccccatgttccccggattaacacatacttcccgacatatagtgatgctactatggaccattatcgcctccttgacaggttaaatgcatacggcttgtttgaggtgagagtgtctggtgatggaaattgtcagtttcgtgcactctcagaccaactatatagatcacccgattatcacaagaatgttcgaaaggagattgtaaaacagctcaaggaatgtaactccttatatgaaggttacgttccaatgaaatataaacattattgcaagaaaatgaagaagtatggtgaatggggtgaccatgtcacgctacaagcagctgctgacaagtttgctgcaaagatatgtcttctaacatcattcagagatacctgttttgttgaaattgttccacaatatcaagctccacagagagagatttggctgagtttctggtctgaagttcactataactcactgtacgatgctcgagatctccctagcaaatacaagcctagaaagaagcattggttgttgttttgatatccatgtgggggtttgcttcttactggtagaatcatattacttgaccgcttcgaccaccggccgctggtggcagcctggacgtagctcattgtggctttatcccctatatagctgtgcatcaatgatccattgtgttgctcggtaccgctccagcatgatccaggcatacagcactaaacacagttacaatgccgaacctgagccttgtgaatagatactcctttactgacatacaggttgattgtataccctgccctatttgttcattgttatattctttatttatacaactacatattagtgctcttcatcagttcattattcacttcatatttggaagaattcatcatcgcgttcttggcccaaatgttcattgccttttgctgacacgtgaatctgtttatcgtatttcatgcctggattggatgtacagcagttgtggtacagcctgccaagtggtggaagccctgagtgactgattctaatgctttagagcatctccaagagactttttattttttactctctatttgactatttatttgtctctccataaatattaaactctatatataacatcttattccaacagactctccaaaatgcaatttagcttggctaacgagagttgctagccaaatttggcc

SEQ ID NO: 28856 - DNA, 1200 bp, Zea mays
  Clone ID: LIB4765-014-B9_FLI
ggacgtaggggtacctcgaggccggccagggattaatgggtggcttgtggctaaaactgttttttagaaccatccatgatggccaataatagctatgagatctgagggactaaaaaaaaaaaaccccgcatctcctagccccagctagtagatcattggacacatatcgaaacagctctctagctagcgcgctcgtcgtctaacctggcttccggcatggcttccaagcagatcggagtcttgacctgcttcattgccatcaccgctctcgccttccgtccctgcgcatccgccgtgcccatggacggcgcctggtcgaacggcggcgccacctggtacggccccgccaagggcgctggatccgacggtggtgcgtgtgggtaccagggtgccgtcgaccaacctccgttctcgtcaatgatcaccgccggcagccaatccatcttccaggacggcaagggctgcggcacctgctaccaggtgaagtgcaccggacacgagtcgtgctccggcagcccggtgacagtggttatcaccgacctgtgccccgacgctacgtgccaggtggagcccgtccacttcgacctgagcgggacggcgttcggtgccatggcgaagcccggccaggccgacatgctccgaaacgccggccgcctacaagtccagtacactcgggtggcgtgcaactggaacggcttggacatcgccttcagggtggacgccggctcaaacgccaactacctggccatggccatcgagtacgagtccggggacggggacctgcgcgccgtggagctgaagcagagcggcgcggcggcgtgggcgcccatgcaacgctcctggggcgctgtgtggcagtacaagtccggctccaccaatctgcaggcccccctgtctgtccgcctcacctcgggctccggcagggttctcgtcgccagcaacgtcatccccgccggatggcagcccggcagaacctaccgctccgtcgtcaacttcggaggaaaccatgcataacgagtggtattaagatgtcgatcgtctgcagatgtctccatccaacaataagatgcatgcatatatgatctgtgtggccagctagctgctagaccatctcactccctgagtctgctgatgctcagccaataatgaatcattccatctcgatcggaaattcaacatatataataatgcaagcaccag

SEQ ID NO: 28857 - DNA, 1439 bp, Zea mays
  Clone ID: LIB4765-015-A12_FLI
gagatcgtcactgcaattagtactgactctgccaagtcgccacgtgactaacccgcgaggtcgacgcggattttcttctttataccgcgggcaggcggactgggcggctgacggagccgcggagggaaccgagtggccccggcgacgcgaggccgaggcgagctaatctgacggcggcagtgacgactccaacgaccaggcgcggaggctgcactgctccagcgaaggcaccatgtcattcatgtctccattcccggggatggatctaagtaaaatggatcccgggactctgaccctccttggggcagctggttgtgtaatgctgactatgcatttcactgtgcaattggtgtcacaacatctcttctattggaaaaaccccaaggagcagaaagccatacttattattgtgctgatggctccactatacgctatctcttccttcgtgggtcttcttgatatccagggtagcaagacatttttcacattcttagatgctgttaaagaatgctatgaggcactggtgattgctaagtttatggcattgatgtacagctacttgaatatatctatcagcaagaacatagtccctgatgaaatcaaagggagggtgcttcatcattccttccctgtttctcttttcctgccccgcaatgtccgattggagcacaagacattgaagcttctgaagtattggacctggcaatttgttattgttaggccagtatgttccattctgattattgcactccagcttcttgggctgtaccccagctgggtcagctggacgtttagtattatactgaacttttcagtctccatggccttatatgcattggttctcttctaccacttgtttgctaaagagctggcacctcacaagcctcttgcaaagttcttgtgcatcaaagggattgtcttcttctctttctggcagggttttgcgctcgatgttttaacccaagcaggcgtgatcaaatcccaccatttctggctggacgtggagcacatccaggaggcgatccagaacgtcctggtgatccttgagatggtggtgttctccgtcatccagcagtacgcataccacgtcgccccctacagcggggctgacagggccaagttcgagaagaagaacgaatgaaccaggtttccaaaaggaatgaaaggaaaaaaaaactctctgctttctggtctctcggagatggagcaccagttcatcgagtctcgcgagtagcgtatttggtagcgagttatcgcgctgtaaaattacactgtgcttgcgcgctgaataattttgctggctttgtcgttttggttttttgaacgttgtcgccgaggctatgtagccaggactgttcgtcttgtacgcgcgcgctctctctctctctctgcggactttgggaatccttttatatgaataaaagctacagtcctgttct

SEQ ID NO: 28858 - DNA, 1799 bp, Zea mays
  Clone ID: LIB4765-015-B6_FLI
aagaaaaaaaagaagcgttcgttgacaatcaagcagacgagaagagagaaaaaaactaaaaaaaatggcgccttcattgacagggaaatgacctgacattgtttcagagctagtccgccgtacaagtacaaggatacagccgcaggcccgcagaggaagaggagagcctactctcctgccatggccgcgccgagtccgctcccccgcttcctgatactcctgctcgccgtaacctcctccgcgtttgccgccgccgcggcaaccggggctccggtggtgggggaggactacgtccgtccgccgccggcgcggtgccaccgcaaggcactccttagcctcttcccttggagcaagaaggaggagtccgccgcctcctccgatccgcagcaggtgcacatttctctagctggagaaaagcacatgagaataacatgggttaccaatgataactctgtcccatctgtggtggactatggaactaaagaaagtacatacacaatgaaatctcaaggagaaagcacatcctacagctacttattgtatagttcaggaaaaattcatcatgttgtcatcggacctcttgaagataacactatttattactaccgatgtggagggcagggtccagaattccaatttaagaccccgccctcccaatttcctttgtcattggctgttgttggtgatcttggtcagactagttggacaacatcaaccctgaatcacatcaagcagtgtgagcatgatatgcttttactccctggtgatctatcttatgctgattatatgcaacacttgtgggattccttcggcacattggtggagccacttgctagcaaccggccttggatggtgacagaaggcaaccatgagaaggagcacattccattttttgagtcaggatttcaatcttataatgcacgatggaaaatgccttatgaagagagcggatctagatcaaatttgtactactcttttgaagttgctggtgcacacatcataatgctaggttcatacacagattatgatgatagctcagatcagtatgcttggctaaaggctgatcttgccaaggttgatagaaagaggacaccctggctcattgtgttgttgcacgtaccatggtacaatagcaattgggctcatcagggtgaaggcgacagtatgatggcttcaatggagcctttgctgtacgctgctcatgtggatatggtaatagcaggtcatgtccatgcttatgaacgtgcggagcgagtctacaattccagacctgatccttgtggcgctgtccacataactatcggcgacggtgggaaccgtgaaggcttggcccgcaggtaccgtaacccgaagccagcgtggtcggtcttcagggaagcgagctttgggcacggcgagctaaagatcgtgaactccacccatgcccactggacctggcacagaaacgacgacgaagagccggtgagaaccgatgacgtgtggataaactctcttgctggttcagggtgcatccaggagggcagccgtgaccgtgagtcgaggaagatcctgatgtctccttgatgcttagcagtatagcttgggcctgcgatgtactgtgtatataatgcgtgctacttgataatctaacacctagtaaaagttaatgcgtcgtgctgcttgcctgcgtgtatactggagactggtttgatctggcgcgtttgctgctcttgttgtgttgtaccactatggatgtttgtagcaaagtgacatacgacggtgttgtaatggactgaagatgaatagatgatgttccagtg

SEQ ID NO: 28859 - DNA, 1017 bp, Zea mays
  Clone ID: LIB4765-015-C5_FLI
ctcgaggccggccggaacactcccatccagccgccaccaggtgcagagtctttcgtcatctcttctccggcgaagaacccccagtcgcccaccagatcacttgttaaactttgttgaggggtgatggcggtttctttcgcaaacctcagctccgaggcagggcttaaaaagcttgatgagtaccttctcactcgcagctacatcactggctaccaagcttccaaggatgacttggctgtctacacttcgttttcgtctgctccctcgtccaagtatatcaacgtagcaaggtggtttaatcacattgatgcgctcgtgaggatgagcggaattactgcagagggccaaggtgtgaaggttgaatcgtcagcagttccttcagccccaactccagatgttgctgaagcacaggccccagttgctgaggaggacgacgacgatgatgttgacctttttggtgaggagaccgaagatgagaagaaggctgctgaagagcgtgctgcagctgccaaggcttctggcaagaagaaagaatctgggaagtcatcagttttacttgatgtgaagccatgggacgatgagactgacatggccaagctcgaggaagctgttaggagtgtccagatggaagggttgctctggggcgcatccaagcttgtcccagttggatatggtatcaagaagctgcaaatcatgatgaccatcgtcgacgaccttgtctctgtcgacactctcattgaggactatctgtgcgctgagccagttaacgagtacgtacagagttgcgacatagttgccttcaacaagatctaggcgtgactttcgatcagtccttcccctggggtgctggcgatggtggtggctgggcaatgcaccagcctaatttatccatagctatatgtctgctttgtgtggccagtgatattgccgtgagtatttttggatcctattcgagtcgaatgtaccagtaccagagttaatttgctttaattcgaaacaccgttccagttggaattc

SEQ ID NO: 28860 - DNA, 1672 bp, Zea mays
  Clone ID: LIB4765-015-D4_FLI
ccggggacttacccgattgttaaggctatacttggatcggtctctcgaatccatcgcatctctattccctctcccttccctcggaattcaccctagcggcgatggcgtccgcggcggcgggcgcaccgaagcgctgctactacgaggtcctcggcctatctcgcgactgctccccgacggacatcaagcttgctttccgccgcctcgcgctctcgctccaccccgacaagcagccccccggctccgacctcgccctcgccaccgccgccttccaggagctccagcatgcccactctgtcctctctgacccgcaggagcgcgcctactacgactcccaccgctcccagatcatcttctctcacccagcctccgccggcgccaaatccgcttccaccgtccccgatctcttcgccttcttctcctcgtccgctttctccggcttctccgacacgggccgcggcttctacaaggtctacggggacgtcttcgacagggtcttcgcgcaggagcttgcctatgctcgccggatgggggttcccgagcccgctgcgccgccggtcattgggaaccttgattcccctatgcgcaggtcactgctttctacagttattggcttgggtttggctcgggcatggatttcggatgggcggctgcgtgggacgctgcgcgtggggaaagtcgccgtgttcggaggctcatggaggaggacaacaagaaggcgatgcgtaaggcacggcgggagtacaatgacgctgtcaggggccttgctgccttctgcaagaagagggataagagggttgtggacatggttttaaagaagaagctggaggaggagaagagaaaggcagaggagaaggagaggaggaaggaggaggacaagaggaagaaggagcgagccatggcatatcaagaacatgagtgggcgagggcagaggagggactgtatgatgaagacgaagaagaggagatgagggccaagaaggagctgttgtactgcgcggcgtgcaataaaaagtttaaatcggacaaacagtggaagaaccacgagcagtcgaagaagcataggaataagattgctgaactgaggaagacctttagggaggaggagtctttgaaaaaggcagaggagggggaaggtgattggaatgaagttgatatggggttcgattttaagcctacacaggagtcagatgatgcgagtgcattttcagatgctgcagaagagttagctgaagaatttgaaagtaattatgctggcaatgggcatcatggtaaatgtgaggttcagcctgagggttcggtccatgttaatgatgttgatgatatcatggaagggccatcctcttctaatgtcaacaatggtgcagtaataatggtattgcagctaccatcccccctcccagtactatgttgctctcgcaggaacaagttgttttctcacttggaagaaacaggtcacgcaatgctgaagtcactcgttggttctgcatggttctcttaagttttggcacaattttgtatctgtagtgaacattttttttctagatcctttatgtgtagtgtggagatgattttttgtttataaggccatgtggtgccggtggtgtgtgtgtgtgggtgtatactgggcaggaaagacactgataattacaatatataacattatttcact

SEQ ID NO: 28861 - DNA, 967 bp, Zea mays
  Clone ID: LIB4765-015-F4_FLI
ccgggatccaactccgccgcgtcgtcgtcgccttcgtctcgcgtgctcaccaagagaacaaaacgcgagcagccaagaattcaacgtccacggtccgcccaccctccgtttccgcttcctccttccgcgtcgtctcggtcttcctctcctgtaatcccgtgacacgggtggctgcgacggcgaatcagatccctacccgtggcgttggtcgtgaattggcgccgtctccccctgccagccggattccctgctttgttctcaggcaacattttgttcactagtgtggtagctttgttgattggagtgcgcaatgggaggctgtgcgggaaaggtacgtcgtgatgacgaagaaaagcttgattttaaaggtggaaatgttcatattataacaagcaatgagggctgggaccagaagattgcagaagcaaacagagatgggaaaactgttgttgcaaatttcagcgcttcctggtgtgggccatgccgtgtcattgctcctgtctatgctgaaatgtcaaagacttatcctcaactcatgttcttgacaatagacgttgatgacctgatggacttcagctcttcatgggacatccgtgcaaccccgacattcttcttcctcaagaacgggcagcagatcgacaagctcgtgggcgcgaacaaacctgagctcgagaagaaagtgctggcagccgctgatgccagtacgtcctagtgacacaagtggaagtgggcaaacgatctgtgatggcttcccggtgtatagtttccatggttcatttgtgtgcttgtcccatgtttgcctggggacgatgacgttttacaattttggcccccatcgcgcgcactcgtctgtttctctcatggaagccgtgtgaacctgtgcgtgtgtgtgacgaatgaacggaaccttatatggaccagtgcttaagagtcttcgcaacataattatgaaggtttgtttgcatgt

SEQ ID NO: 28862 - DNA, 1508 bp, Zea mays
  Clone ID: LIB4765-015-G3_FLI
ccggggcaaccgacgcctccagtcctactcctccacccagctcgccgcttcaggaatccggagagctcgcgtcgcgcgtgcgtgggcgtgggtgcgtgcggcggcgaagcaccagcaccaccctctcgcgtcgcgcgcgcgcgcgcgtctcgatggccgacggcgagccttccctcacgcgctggaccttcgaggatttcgtggtccactacgaggcgcgcttcggcctccggcgcgaggccgacggcgacgacgcacccccgccgcgcggatccgatcatggggccagccgccccgccactgcccgcgccaacggcggcgcggacctcgccgtcttcgagcagttcgagcggatggagaggaaggtggagataagcaatggagcaatagaggatggtccactgcagaaatctctacttccttcatttgaatctgcagaaatgcgcaacttagctgagacattgttaagggatataattcgtggaagtccagatgttaagtgggaaagcataaaaggtctggagaatgcaaagcgtcttctcaaagaagcagttgtaatgccaattaaatatcccaaatacttcacaggtctattatcaccttggaaaggcatattactgtttggtccacctggaacaggaaagacaatgctagctaaagctgtggctactgagtgcaaaacaacttttttcaatatttctgcctcgtcgattgtaagcaagtggcgcggtgactcggagaaactagtgaaagtgttattcgaacttgcaaggcatcatgcaccatctactattttccttgatgagattgatgctatcattagtcaacgtggtgaagctcgtagtgaacatgaagctagccggcgattgaaaactgagctattaatacagatggatgggttgactaagacagatgagcttgtttttgttctagcagcaacaaatttaccatgggaattggatgcagcaatgctgcgtcggctggagaagcgtattcttgttccattgccagagccggatgctagacatgctatgtttgaagagctcctgccatatacacctggcacaatggagattccctatgatgttcttgtggagaaaactgaagggtattctggctctgatattcgcctggtatgcaaggaagcagcaatgcagcccctaagacgggtaatggcagttcttgaaggcaggaaagaagaggtccctgagggtgagttgcctgaagttggcccagtaactacagaagatattgaacttgctttgaggaatacaagaccgtctgcacatcctcatgcacatagatacgaaaagttcaaccaagattatggcagtcatgtacatggctaaaggggagaagcttgttgtagggtttaatttgtatgctcatgcgtgggccaataggtgactactgaattcatcgacatgctgaggtatccttgtaaacactatgcttatccttgtatgctgtacactatcattcatttgatgagcaataagctgtttggt

SEQ ID NO: 28863 - DNA, 1598 bp, Zea mays
  Clone ID: LIB4765-016-C2_FLI
ccgagagcataggcatagctcgccgaaacgccgacctaaacgcccacaattcgcctctccgatccggcacgacaccgccgccgatccccatcgtcacggtagccatgtccaaccccggctcgttgcccgcctccgctcaccacgagcacgagcacacccctctctgccgctcctgcggggcgcccaccacgtcgccgaccccggcaccctggtcagggaccaccgactccccgccgccggcgtaccgccccatccgtctcccagccatcaacgcgcccaccaacacagccgccatagtcctctccccggtcccacagccgctccccgtgcctcccgccgcgccgccccacgccttcctggtccctgccaagcggatcacctcaccggacgatatcgcccgcttccatgcctccgtccacggccttcacttcctcgggttcgtcgccgcgctgtccgcctccgtccacggccgcaagctctcggacccgctaccgtccccgccatcccccgccatagctgcgctgctcgatctcgtctcggctctcgccgctctcgtcgcttccacccctccgcttccacacagctctcggtacggcaaccctgctttccgcctgtggcacgagaagctcaccgactccgccagcgagctgatctcgcggatcacggccaccgcgtcttcccctgcggacctcgcaggcgccgatgtcgagctagcaccgtacctcctcgactccttcggcaacgccacccgcatcgactacgggacggggcacgaaaccaacttcgccgccttcctctactgcctcgcgaggctcggcctcatcaccgagcccgactacccggccgtcgttctgcgcgtcttcacagcttacctcgatctcatgcgcacgctgcaggacacgtaccagctggagcctgcaggctcccatggcgtgtggggacttgatgattaccatttcctgccgttcgtatttgggtctgcacagctgattgaccacaagtacatgaagcccaagtcgattcacaacccagatatcttggaaaatttctccaaggagtacatgtatctggcgtgcgttgcatatgtgaagaaggtaaagaaggggccctttatggagcattcaccaatgttggatgatatcagtggagtggccaattggaagaaagttaacagtgggctgctaaagatgtacaaggctgaggtgcttgagaaagtaccgatcatgcagcatttcctctttggctcactaatcaaatgggaggattaataacatctttagggaagctcaccaatgatccgtgagaaactcatgtatgatgtgaagactggcggtatagtggtgctactcaaagtttgtagaaaagggaatacatatagaaggtcattttccatctagggtgaatgagcgttctatatgtttgcatagtgtgccatcacacttatcttctggtgctctaaattctgggaacctgtttgttagttcacgatcagctcaggattcccttggctccttgagggcaatgtaatgttagttgaacaacacctttgcactgaaactttcggcgtagatgacaagagcagtctctttggttttctg

SEQ ID NO: 28864 - DNA, 1424 bp, Zea mays
  Clone ID: LIB4765-017-A2_FLI
ctcgaggccggccgaagcaacccaatccaaaccagacaagcaaggaatcccccgatggctcatcgcgttctcctcctcctctctctcgcggctgccgccgcggtagccgccgccgtcgacgcggaggacccgctgatccggcaggtggttcccggtggagatgacaacgatctggagctgaacgcggagtcccacttcctgagcttcgtgcagcggttcggcaagtcctacaaggacgccgacgagcacgcgtaccggctatccgttttcaaggccaacctgcgccgcgcgcgccggcaccagctgctggacccgtcggcggagcacggcatcactaagttctccgacctcacgccggcagagttccgccggacctacctcggcctccgcaagtcccggcgcgctctcctcagagaactcggggagtcggcgcacgaggcgcccgtgctccccaccgatggtctccccgacgatttcgactggagggaccacggcgccgtcggccccgtcaagaaccagggttcgtgcgggtcgtgctggtcgttcagcgcgtctggagcgctggagggtgcgcactacctcgcaactggcaagctggaggtgctttcggagcagcagttcgtcgactgtgaccacgagtgtgattcatcggagcctgattcatgtgattcgggttgcaatggtgggctaatgacgacggcattcagttatctccagaaggccggtggccttgaggctgagacggattacccttacactgggagtgatggcaaatgcaagtttgacaagtccaagattgttgcttcagttcagaacttcagtgttgtgtctgtggacgaggctcaaatttctgctaacctcatcaaacatgggccattggcaatcggcatcaatgctgcctacatgcagacatacatcggaggcgtgtcatgcccatacatctgtggcaggcaccttgaccatggtgttctccttgttggatatggtgcttctggtttcgcccccattcgcctgaaggacaagccttactggatcatcaagaactcgtggggcgagaactggggggagaacggatactacaagatatgcaggggttccaacgttcgcgacaagtgcggcgtcgattccatggtctctaccgtgtccgcagtccacgcctcgaaggagtagactctggtcagcggtgataatcgtgattccatatattgtagaactacaatccctgctagtaatccatttgtgctgtttatgtatcgaaggcagcaaagatgtgtgaagcggcaatgggatgcttgctgtaaggtaatatgtttggcttgctaggcatgctacacgctatttggatgtagcaacgttatcaccagctgtatacgctttttaatcgacaacatttgaataatatgtacataacattatgttgtgct

SEQ ID NO: 28865 - DNA, 1431 bp, Zea mays
  Clone ID: LIB4765-017-C2_FLI
ccggggacaatctgatttgtgcattcctcctcccccaccttccacccttcgatcccacgtcttctcaacctttcttcttctctcctcgagaaccccaatccaaacccccaaccgccaaaattcctacgagatatatcacagaaatatcgtcttggctcagatcgtgcccgagtgaggaggcagtgagttttgaggggacgcaggatcatggcgtcgtcgctggccgaggaggaggaggccttcgagcacacgcttctggtggtgcgcgaggtgtcagtgtacaagatcccgccgcgcaccaccagcggcggctacaagtgcggcgagtggctgcagtcggacaagatctggtccgggcgcctccgcgtggtgtcctgcggtgaccgctgcgagatccggctcgaggacccggccacgggggagctcttcgccgcctgcttcgtgctgccggggcagcgggagagcgccgtcgagaccgtgctcgactcctcccgctacttcgtgctccgcatcgaggacggcagggggaagcatgccttcgtcgggctcggcttcaacgagcgcaacgaagcattcgacttcaacgtcgccctctctgaccacgagaagtacgtcaagagggagcaggagaaggagaccacgggcgctggcggcgaggagactggcggcggtgagattgatatacatccggctgtcaatcgccgactcaaggaaggtgaaaccattaggataactgtaaaaaacaagccatcaactggaagtggtatgctttcagctgctggtttatctggagggaccactgcaaaacccaagacaagcatgcttcttgcgccacctccaggcgcagctgggaagcttagatctccacttccaccaccacctaacgaccctgcagctgcaaggatgaattctggacatactgcaggaatcagggctccaaaagaacccaccaagagaaataacgatcctttttcagatctttctgctataaagcaaaatctaccttcatctgctgaacccggacaaacaaagagcacaggagctggatgggcagcattctgacgatggatgcatgatctactgctactattggcatttgtttatctgaagaaggggaatgggtagttgaagcaccgaacaaggatctggaactgctggatgcctctacccctttcgaaactgaatggttaaaatgattgatcaacctaccagttccagttgtcacttgtcagtcgagaaataaacctttcccagagttgtattacccgtctcaccacatgaatggatgctcacattttctggatttagatacagcgtcccatcttgtttttatgttattcgtgctatgtttcacaaagcaataccagaatcatactgacctcgatgtgtattttgcggcgaaagattggaaatactgttacaagtgtgtct

SEQ ID NO: 28866 - DNA, 1666 bp, Zea mays
  Clone ID: LIB4765-017-E1_FLI
ccggaagtctcctgtttcagctctcttcccttcactccatcggctcgtctgtacagcatcccgtgtagcgtgtatccacctcgtcgccacctcaatcctcattccccaatcccgtccgcttctctccccgtcccttacctcgcccaggaggggagcctcccgcttacaaaccctagcctctactcctctgagcttccaccgctccgctccccatggaggacgaggacaccggccccggcgatgggggcgaggcctctcctccgcaccacgtcgcggcgtcgagcgaccgggcgcgcgacatggtggcgtccccgaccagctcgcgctctgtgacgcagacggtgaacgggtcccaccacttcgtgatccagggctactcgctcgctaagggcatgggcgtggggaagcacatcgccagcgagacattcaccgtgggcggttgccagtgggcgatctacttctaccccgacgggaagaaccccgaggacaactccacctacgtctccgtcttcatcgcgctcgcgtccgacggcaccgacgtgcgcgcgctcttcgagctcacgctcctcgaccagagcggaaagggcaagcataaggtgcactcgcacttcgaccgctccctagagtccgggccgtacaccctcaagtaccgcggatccatgtggggctacaaaaggttctttcggcgtactgctcttgagcaatcagattttcttaaagatgattgcttgaagataaactgtactgtgggtgttgtagtatcaactatggattattctaggccacattcaatagaggttccagagtctgacataggctttcattttggaacgcttttggacactcaggaaggtgtagatgttatttttagtgtagcaggagagaagtttcatgcccataagttggtattggctgcccgatctcccttttttagatctgaatttttcgatcatgaattgggtgaagagaagaacggaactgatacgggggatgaaatcaaagagatcgttattgatgacatggatcctgtagtgttcaaggctgtgcttcattttatctacagggacaatcttgttaatgatgacgagttgtctgcatcaagctctgactgctctatctttgatcgtttgtccgggaagttaatggctgcagcagacaaatatgagttgccaaggttaagattgttgtgtgaatcttacttgtgcaagcatatttctgtaaattccgtggcaactactctagcattggctgatcggcaccatgctatggagcttaaatccgtttgcctcaaatttgctgccgaaaacctgtcagctgtgatccggactgagggtttcgactatctcaaagacaactgcccatctctgcagtcagagatactgcggacagttgccgggtgtgaggagccatgtagcagcggcttgaaaagccagagcgtgtgggcgcagctctctgacggcggcgacaccagcgggcgcagggtgaggccaagggtctgagacgcaaaccccggaagcactgacctttgtaatcaaaagctgttgtggtgtaaatgggacggcttttcttaattttcacttgagacaacgatttaaataacatgattgacgtgtttgtggtgctcgcagtcattatttggttctgaattctgagtctgccgcacatt

SEQ ID NO: 28867 - DNA, 1723 bp, Zea mays
  Clone ID: LIB4765-017-F3_FLI
ctcgaggccggccgggaaactctcgcccgagcccgacagatcttcaattccccattccgcccaccgatcgaccttcacgccagtctcggtctcttccgaaggcgtcgcgcgcggttgtttgagaggagaggaggaagatgagggagtgcatctccgtccacatcgggcaggccggcatccaagtcggcaacgcgtgctgggaactttactgcctcgagcacggcatccagcctgatggccaagtgcctggagataagaccgcgggacatcacgatgatgccttcagcaccttcttcagccagactggtgctgggaagcacgttccccgtgcaatcttcgttgatctagaacccactgtgatcgatgaggtgcgcactggcacgtaccgccagctcttccaccctgagcagctcatcagtggcaaggaggatgccgctaacaatttcgcccgtggccactacacaattggcaaggagattgttgatctgtgccttgaccgtatccgcaagcttgctgacaactgcaccggcctccagggcttcctggtcttcaatgccgttggtggtggcactggctctggccttggttctctcctccttgagcgcctgtctgtggagtacggcaagaaatccaagctgggcttcactgtgtacccatctccccaggtgtcaacctctgttgtggagccttacaacagcgtgctctccactcactcactcctggagcacactgatgtctccatcctgctcgacaacgaggccatctatgacatctgcaggcgctccctcgacattgagaggcccaactactccaacttgaatcgccttgtgtctcaggtgatctcatcgctgactgcttctctgaggttcgatggtgccctcaatgtggatgtgaacgagttccagaccaacctggttccttacccgaggatccacttcatgctctcctcctacgcaccggtgatctcttctgcgaaggccttccacgagcagctgtctgtggcggagatcaccagcagcgcgttcgagccggcttccatgatggtcaagtgcgacccacggcacggcaagtacatggcttgctgcctgatgtaccgcggcgacgtggtgcccaaggacgtgaacgccgcggtggccaccatcaagacgaagcgcaccatccagttcgtggactggtgcccgacggggttcaagtgcggcatcaactaccaggcgccgacagtggtgccgggtgccgacctcgccaaggtgcagcgcgcggtgtgcatgatctccaactccaccagcgtcgtcgaggtgttctcccgcatcaacagcaagttcgacctcatgtacgccaagcgcgcgttcgtgcactggtacgtcggcgagggcatggaggagggggagttctccgaggcacgcgaggacctggccgccctggagaaggactacgaggaggtcgccgcagagggcggcagtgatgacggtgacgaggaggaggaatactgatctgcttgcatgaatctgtttggctgtcgagccaggttgtggtgttgaaaaacctttgtttgtgtcctggcccccctgggtaatgtttgggtgtttccttccatcatcacttgctgaactgctctagtatttgcatttgtaattgaagtctgtcgctttaagcactcttggttctaaagatctctgtgcttttggggggtgtttttgcattgccccagattccaataaaaaag

SEQ ID NO: 28868 - DNA, 1448 bp, Zea mays
  Clone ID: LIB4765-018-B8_FLI
ccgggaactgccgcccctgctccgagaaccagaatggccgccgccgatgcatcttcgttgcctccgtccgccatcacctgccgagcggcggtggcgtggggaccgggccagccactggtgatggaggaggtggaggtcgccccgccggggcccatggagatccgtgtcaaggtcgtctccacctccgtctgccgcagcgacgtcactgcctggcaatccaaggcgcaacttgatctgttccccagagtcttcggccacgaggcatccggagtagtagagagtgtcggtgaaggtgtgaccgagttccaagtcggtgaccacgttctcactgtcttcattggggaatgcaagagctgcaagcactgcgtctcagggaagagcaacatgtgccagaagctcggtctggagaggaagggtgtcatgcacagcgatcagaagacacgcttctctgtcaaggggaaacctgtgtaccattactgtgcagtgtcaagcttcagcgagtacacggttgtccattccggatgtgcggtgaaggttggcttgaccgtgccaatggacagggtgtgcctgctgagctgcggtgtgtctgcaggactcggtgcagtctggaatgtagctaatgtatcaaagggctcaagtgtagctatatttggtcttgggaccgtaggactttctgtcgctcaaggtgctaagcttcgaggggcgtccaagattataggagttgatactaatcctgagaagcaagaaaaggggaaatcatttggtgtcacggactttattaacccagatgaattgagtgaacctgttcaacaggtaatcaaaaggattactgatggaggggtggattactcatttgaatgtgtgggtgattctggagtagtctccactgcacttcaatcatgttctgatggttggggagtaactgtaactcttggcttaccaaaaggaaaactagaagtgtctactcattatgcatttcttctatccggaagaacactgaagggatctatgtttggaggatggaaacctaaatctgatctaccttcattggtggataaatatgcagcaaaggaaatccaagttgatggcctagtcacgcatgatataccattcaacgaaatcaacaaagcgcttgagttgatgctagaaaacaagtgcttgagatgtgtgattcacatgccacggtaacagggtcgaacagctgcacataataatatgatatctaccatatgttgcatatctgctctttctaccttgatcatctttgtggctcaaccgttcaagtactcatcagtcatcaccacgccggagcttgagtttttgtccttttctagtcccctggtaaagttgttgtaaatccagctatccatcaagaattatcaggagaactacactgatttgcttttgtatcttcatactttttcttctagaattgtcttcttatatcg

SEQ ID NO: 28869 - DNA, 1914 bp, Zea mays
  Clone ID: LIB4765-018-C10_FLI
ccggggtcacgcatccggcggagggagcgcttcccgagcccccctctctgcccttccgggtccgggcgcccggccttcgcttgcgccactcccgtggcgcccacggccgcgcacgcgtggtcgcctcccctcggcctcgcctgcaaccgttcccgccggcctcccgcgtcgcggcgcaagaggataccctggatttcgtccgtggcgagtggctaccgcttgtgctccttttgtgacagctgaatctttgtggttcgaaggcgattgacttgggttcactgacgcggtgacgcccaatgagctcccacgtctccacatcgcggggtcttcatcccccaggcaagcttgggacgttggactcacccggtgcgtggcagccgccagcacctatggctcagcccgaagcaggccgcggtgatgaccaggaggtcaggctgttgtcggttgcttggaatcaggattgtggatgctttgctgccggtaccagtaacggattcaggatctttaattgcgagcctttcaaggagactttcaggagggatctcaagagcggcgggttcgcgattgtcgagatgctgttccgttgcaacgtccttgctcttgtaggtggtggctccaatgtgctgtacccgccgaacaaggtgattatctgggacgatctcctgagccgttgcattggggagttcgcctttcgctctgatgtccgagctgtaaaattagcaaaggactacatcgtgattgtcctcgagcgcaagatatttgtctacaacttcaccgatctgaagctgctctaccagattgacaccctgtcaaatcccaatggactttgctgcctctctcatcattccaatacttcagtgttggcctgccctgggttgcaccaggggcatgttcgcgtggagcatttcgggctgcagatggtgaagacaatcccagctcacgattcacacatctcttgcatgtcactgacaatggatggtctcctgctggcaacagcgagcacgaagggcactttgattagaatattcaacacaatggatggcactcgtctacaagaggtacgcagagggcttgacaaagcagaaatatacagcattgcattgtcgcccaatgtgcagtggttggcagtgtccagcgacaaagggactgttcatattttctccctgagagtcagagttgctggagtggattcaagcaatgagcaacgcgctcttgaaggtccacggatggatcaccagaactcttccagttctattgatcctcttattcaggcgaacactggatccaatgctagttcatcactgtcttttatgagagggatcctgccgaagtatttcagttcagagtggtcatttgctcagttccatttaccagaagtcactcgttacatagtagcctttggtgcccagaatactgtgatgatggttggcctggatggcagcttctacaggtgcagctttgaccaagcgaatggagggcagatgttgcagagggaacatttccggtttctcaagtccgacagcccacctttcaggactgcagccgcttgacctgcagcacaaggatcatccatcccaccatgtaaatgtcgaaggtccactgtacatatcgccttctcgccggcgaagttataggcagccggaataaggagagctggctgttgaatcgaagcctacaggattccaacgttcggatcggcgccccgtccaaattgcaggcatttctttgccgttccctcttctatcttcaaacgagaacacacacccattgctggtacagaacatgacataaaagattcagtaacgtgatatttgaccgtgtggctttgtggtgcctgcaaggccgtgtagcgaatctcagacctgttcttgccggtggcttgttgatgctgatgactgttacgcacgaaaaaat

SEQ ID NO: 28870 - DNA, 1577 bp, Zea mays
  Clone ID: LIB4765-018-G1_FLI
cccgggagcaataagcgcaaacgcacacaagcggaggacaaacaaacagcaagagagcggaacgccgaaaggcaaaggcaaaggcaacggcaacgcaagccagaggcagagcgcgccccgccacgatgaagaaggaggaggtggcctcgccggcggcggcgacggtggtcctgctgctcctgtcgtcgtcgttggcggccgtctccggccagccacagccgcagccgcagcccgggggcagcaagcagacggcggcgaacaacccgcggctgcagaaggcgtacgtggcgctgcaggcgctgaagcgcgcggtgacggaggaccccaagaacctgacgcggagctggtgcgggccggacgtgtgcggctacttcggcgtgtactgcgcggcggcgccggacgagccgcgggagcagacggtggccggggtggacctgaaccacggcgacctggcggggacgctcccggaggagctgggcctgctggcggacctagcgctgctgcacctcaactcgaaccggttcgcggggacgctcccggagtccctccccaagatgcggctcctgcacgagctggacgtgagcaacaaccgcctctcgggcgggttcccgcagcacatcctgtgcctgccaaatgtgaagtacgtggacctgcggttcaacgagctgcgcgggccggtgccgccggcgctcttcgacaagccgctggacgccgtcttcctcaacgacaacgccttcgacttcgagctgccggacagcctgggcaactcgccggcgtccgtgctcgtgctggccaacctgcgcctgcgcgggtgcatcccgcgcagcgtgggccgcatggcgggcacgctggccgagctggtggcgctcaactcgggcctccgctcctgcctcccgcaggagctgggctggctgcgcgagctcaccgtgctggacctcagctccaaccagctgcaggggatgctgccggagtccatggccggcatgcacagcctgcagcagctccacgtggcgcgcaacgagctgtggggccacgtccccgagggcgtctgcgcgctgcccgcgctccgcaacttcacctactcgtacaactacttctgctccgagccaagccgctgcctcgacgtccgccacgtcgacgaccgccagaactgcatcgccgcccgccccgaccagcgccccgcagaccagtgcctcgccttcctccaccgcccgcccgtgcgctgcgacgacagcggctgcttcgccccgccgccgccgcactactagagatccatgcgtactctggctctgccggcggtgggagagagacagaaggagagggagacagtcgccgccggctcgccgcgtcggggcttgtaaacttcgcttgtgtggacgtgtggtgagggatgtgagagtgagaccgagagggggggtaaatccgtaaacagaaaacgaccgtatatattatacagctgtaattctttttttcttcttcttttaccttactttccacaggagtggtgtcgattggagtatttggtgggatatattgtagacagaaactatagtgaattttacagcgttaattcaatt

SEQ ID NO: 28871 - DNA, 1051 bp, Zea mays
  Clone ID: LIB4766-002-A2_FLI
ctcgaggccggccggggctatatctattctatctttttgcctatacttgaaaccctaactctgcttttgctgcaacccctgcctcaaaaattcacttgtcaatcgtgactttgcgctcgactccgcacttgtgaggatatggcacccaggaaaaaaagcagggggcctcggtagctgccattcttccccttgaccctaacagctagcttctgtttctacgggagcaacgaccgagtcgttgaggttgaggggtcctcctcctcctcctccatggcggacgtgtacaaaggcgagctcacgccgctgcagaggcacgtcgccttcttcgaccgcaacaaggacggcgtcatctacccctccgagacataccaagggttccgagctatcgggtgtggcgtcgccctgtctgctgctgctgccgtcttcgtcaacggtggacttggacccaagaccgtactggagaacgagaagcctgcgcctttcaagttccccatctacgtgaagaacatccacaggggccagcacggcagcgattcgggcgtctacgattccaacggaagatttgttcctgaaaagtttgaggagattttcaagaagtatgcccaaacgaggcctgatgcccttacaggcaaagagctacaggagatgatgaaagcaaacagagaacccaaggacttgaaaggatggctgggtggcttcacagagtggaaggtgctgtactccctgtgcaaagacaaggacgggtttctccacaaagacactgtcagggcggtctacgatggcagcctgtttgaaaggttggagcaagagaggaactcaaagaaagagtcgagtaagaagaaatgatgagaaatccagacgctcttatgtggacgagtttgcaagtcacgctgtgcgtgtggttgggtactatcataatttgatttattctatatgtttgtcgattcatataacgatattgcaagtatttgtcgaacgtgtttgaattagcaagacatatagctgtgagctttgatagcctcccatattttttcagttcatattttacacg

SEQ ID NO: 28872 - DNA, 1012 bp, Zea mays
  Clone ID: LIB4766-002-G5_FLI
ctcgaggccggccgggagcgcccgtcgcctccctttccccttccctccctccctctccccgcgggccgccagaggcaatttcgccctcgattcgaccccgattcgtccgcccgcgaccgggattccctccgccaagcgcggatctgtacgctgcgctccgtgtcgccgctcgaatccgccatgaagggggccaaatccaagggcgccgccaaggccgatgccaagctggcggtgaagagcaagggggcggagaagcccgccaagggcaggaaagggaaggccggcaaggaccccaacaagcctaagagggctcccagcgctttcttcgtgttcatggaggaatttcgcaaggagttcaaggagaagaaccctaagaacaagtctgtcgctgcggtggggaaagctgctggcgacaggtggaaatccctgagcgagtcggacaaggctccctatgtagccaaggctaacaagctcaagctcgagtacaacaaggccatcgctgcctacaacaagggcgagagcactgcagctaagaaggctcctgccaaggaggaagaggaggaagatgaagaggagtctgacaagtccaagtcggaggtcaatgacgaggatgatgaagagggtagtgaggaggatgaagatgatgacgagtgatggagctcctcgagacaatggaccgtgcttcatccaacaatggagcggctacacaaggccccgtggcgatcacaaaaaaggagcctatatccatgtactagaattattcagtttcactccacatcgtgatgttttatttttacttttgtcgtgctataacggatagcgctcctcgttggcgccactggcgggtggttctgcctctggtctggtgtgtttgtgtgtggtcacacttgccagccagcagaggcgcctgcttgtacctagattactgtttccattgtcgtcatcatcggctaacattgtcataatgtcagtttgggtaatgttagattaagtaattattgtgttctgtact

SEQ ID NO: 28873 - DNA, 1032 bp, Zea mays
  Clone ID: LIB4766-002-H3_FLI
ccgggactatcctcctcgcgttcatctcgtccgtacgccgacgctgccgcctggctcgcaccgccagccggcagtgcctcagtccagatcaagcctccctcttcccagatcgggtcctagttgggctaccgcagccctacgccaggtgccgagtccctcgccgatttcttcgccagcgaagagtgcccaccagatccgcccctgatggacaacgtcgagtctgcccctgactcgccggcgcaggcgccgccgtcatccgcctcttctctccccaaggagcaatcgcaggtggagttggagctgaggctgcttcaggctcttgagttctaccctccatcaaaactcaaaggcattcatcggcattttgttctctacggcctcatggaatatttgcgaaaaagccttgaccgacagttctcttctgacgaagttctacaactcttggaccgcttctttaacctagaaatgctggtatctggaaaaccaatatcggaattactttgttatatttcccttctgtttttgtcttatattgtctggacaatcggagtatattaaatctatctctgcattaatttaccacgatttcaaattctcatggaaatcctacagtttggtcacaactcacaagttttacttatgatgatgattaataaatgaagaaaccagaggatgatgagaaggataacttccgtcagggtgaagaattttcgttgccagagagttttctcaacaaggaagaataatatctagtaacttcgtactttgggcgtcctctggaagagaaatcagaacggtggttcttagtgattccctctttcttgtagcattgtcatctggaacatcggctgcggggagacactgaacactgaagtaaagaaacacatttcctaagctgtggttgtgtttactgactgtacagctagcttttgtagactagtgtaatcgaaaatcggttgaattgtgtggttgcctggagcgtgaacaaaaagcaaggaggggcaattacaaaagctgctgctgttttacccg

SEQ ID NO: 28874 - DNA, 555 bp, Zea mays
  Clone ID: LIB4766-002-H9_FLI
ctcgaggccggccgggccttctggtgggcccattcgtgaaggccgggcctcttaggaacaccgagatcgccgggcaagcgggctctctggccgccggtgggcttgtggtgatcctcagcctttgcctcacaatctatgggatttcatccttcaacgaaggagccccatccactgctccgtcgctgaccttgacgggccgcaagaaggagcccgatcagctccaaactgctgatgggtgggccaagttcaccggaggcttcttcttcggaggcatttcgggtgttatttgggcctacttcctcctctacgtcttggaccttccatactacatcaaatgatgaatgtgcttactagctttctttactttttcttattcattctccatgaatggactatttgtgcaatagagatggatgtaaatgatgtattgtatgactctcaacatgttataatgttcattcctctctcctattctcgccttcttttaattgaatttctatactgctggagaaggagaagacaatcacatcttcattagcatgcatggatttcccc

SEQ ID NO: 28875 - DNA, 802 bp, Zea mays
  Clone ID: LIB4766-003-A11_FLI
ctcgaggccggccgggacttctctagtctagcccctctgtcgctctcagacgacgggtgcgccgccgccgccgccctaagccaggtgctgactgctgaggctttctttggtctcttcgccggcgacgacacccgccagtatccacggtgtcattgcaagacaagatggtttccttcgagatgaatgacctcaagaagattgggcttggcctgacaggctttggaatattcttctcatttctgggaattgttttcttctttgacaaggggctcatcgcaatgggcaatattcttttcctgtcaggtttgggtttgacaattggtctgaaatcaactatgcagttcttcaccaagccaaagaattacaagtgggttctggccaacactttctgtgttcttgcagaggattcctatcatcggctggattttccaacaaccatttgtgacatcgttccttgaccgctacagaggaaaacgtgttccggtctagcaaccttttgcgcaatatatgcttgcggtgtagcaactagcagcctgtatttttttaactacagtagcaaactgattataccgatgtctgatccctcatgtttatatgttttctttaggattgctctttgtaaattacagccccaaactggccaaatcaaaggtccattcctttgagaccaggatgcaggttcacccatgaaatggatctgttgaagaaactcttaagcttgtatggaagtaaaagctaatatgttcctttatatgataatataagttatatattattgtgtggaccgagtttctgaacacgc

SEQ ID NO: 28876 - DNA, 777 bp, Zea mays
  Clone ID: LIB4766-003-C11_FLI
cgagagcgcgattcattccgcgcgacgcaaaaccctagcccatccaccgatccttgtcatggcggccaccaccagccaggcgagcctcctcctgcagaagcagctcagagtgatggagggtacttcaatgcaataatgagcttcccagaaaattacccaaacagcccgccatcagtcagatttacctctgaaatgtggcatccaaatgtttattcagatgggctggtgtgtatctctattcttcatccacctggtgaagatccaagtggttatgagctcgcaagtgagcgttggacacctgtgcatacagttgaaagcatagttctgagcattatatcaatgctctctagtccaaatgacgagtctgcagcaaacattgaggcagctaaggaatggagggataagagggaggatttcaagaaaagggtcaggcgcatcgtgcggaaatcacaggaaatgttatgaagaaaatggaatactggggaagtcaaccgtgccatgtcaggctacgagattttgctttcaacctcaaaatgctcatctgacatcttgtgtattttccatttagcgtctgttcattggtgcaccagaaatgcattgggacgtggtgtatcgtgtggcctgggctctactaatgtttgacaatcctgaagtgccaccagtggtgaacctggtataagcaggcgccattcatgtcagctaatcgttgagaaaacatatcagtgaaatcgtgcaactgttagtgtaatgaggcagttcctgcttacatattattac

SEQ ID NO: 28877 - DNA, 461 bp, Zea mays
  Clone ID: LIB4766-003-C7_FLI
taccctcgaggccggccgggaaccgcccacttccccaaaacctgccacgcttgaacggctctcaatcccaaccctaacagcaccgtctctcggatctgatctgatctgatcctccaattcgttcgtccacgtctcgccatggaggacgaggaacttgttgatcagaagaaatatcttgaggaacgatgcaagccgcaatgtgtaaaatcactttacgaatatgagaaatgcgtcaagagagttgagaatgatgatactggtcacaaacactgcactgggcaatactttgattactggtcatgcatcgacaaatgtgtagcaccaaagctctttaagaagctcaaatgatttgtgcgatgtgatgcgacttctgacaaagtgaatcgaatttgcttaccttacacctttggaaagtgtatgagctcgtacaccttggaataaaacatcaatttttctttgcg

SEQ ID NO: 28878 - DNA, 828 bp, Zea mays
  Clone ID: LIB4766-004-D2_FLI
ccggggagaacacgcgctccgcacgtctgaaatccaagaccatcaccaacccaaagtcttgcgccttgcccggtctccgccttttcggagaccgcacccaatggccggctcaaccaaggtgctggccgccatcctgctcgtcgacctcgtcgccttcggcctcgccatcggcgcggtgcagagccgcccctcggcgaggctggagacggacgagaggcaggagtggacctactgcgtgtaccgcacggacgccgccacggcgctgggtggcgccacgctcgcgctggtgttcgcgggacaggcggtggccgccgccgccagtcgctgcttctgctgcgggtccgtgctgcggcccggcggcgccagggcctgcgcgctcgtcctcttcatctcctcctgggtgacattcgtcatcgctgaggcgtgcttgctagctggtcttttgcaatccgcctaccacactggctaccggaaggtgtttttccagaacccgccggactgcgagacggtgcggaggggcacgttcggagccggcgctgcgtttgcccttttcacctgcgtgctcacctcggcctactactactgcttctccaaggcgcggatctactaccaccgcccggaagccgccatcggcatgactccgttgtaaacagatttaccggtctctctgcagtaacagttttgatagcaactatatatgtctgttaggtttttgcatatattatgttgggctggtatgtgacagtttttcaggaccatgtatctgactgagttgaactcaatgaaatatgatggctgctggtgctggaccggctcatccttagttcc

SEQ ID NO: 28879 - DNA, 582 bp, Zea mays
  Clone ID: LIB4766-004-D9_FLI
ccgggcttctcctctgtgactctctcagaactcaagcaaccaatttcaaatccaatcatggggagctcaaccttctgtgccttcttcctcctgtgtgcaatcttggccgtccacgtggcacaatcctcatcctccaccctcgacctggacgccttcttcctccctctcaagtccggctgtcgcggatccgtcgccgagtgcagcctcctcgccggcgacgacgccgagtttctgatggagtcggagagcaaccggcgcattctagcaggaaggagctacataagctacggtgcgctgaggaggaacactgtcccttgctcccgacgtggtgcttcctattacaattgccgccccggcgctcaggccaacccctacagccgcggatgcagtgctatcacccgatgcaggcgttgaatctattcttcttctcttttttttttatttcatttttttatttatatttttgtaattgatgaaaattgttatattattattgtcgtgctactaaatatatatacacaagtagagaagagaaagagaagtagagatgaataaaatctaattgccgccgtttgtatctgt

SEQ ID NO: 28880 - DNA, 880 bp, Zea mays
  Clone ID: LIB4766-005-D6_FLI
ccgggatccatctcttccggtgccccgacgccgttgacatcgtcgccaagctctcggaatgcatcgcctcccgcggtggcaacatccacagcgtcgacgtcttcgtccccgacgacaaacccgtcttctactcccgcagtgagtttacctacaatccaaggctctggccgcgtcatgagctccacaaggatttcctcaatctctcccgctgcttcaatgcgcaaacctccaccgtacgagttcccgatcttgaccccaaatacaacatctccatcctcgcatcaaagcaggaccactgcttgttcgatttgctctatagatggcaagaaggcaggcttccagtacacatcaattgtgtcattagaggcatggaatcccataccactacttacccaccgcacctgccaacaaaagagagaaagagatcttggaattgatccagggtacagattttgttgtgctggcaagatacatgcagatactctcagaaaacttgttaaaagcatatggtaaagacattatcaatattcatcatggccttcttccctcatttaagggagggaatccttcaagacaggccttcagtgctggggtgaagttaatcggggcaactagccatttcgttactccagaacttgatgctgggccaatcattgaacagatggttgaacgagtctctcaccgagacacgttacagagttttgttgtcaagtctgagaaccttgagaagcagtgcttagcagaggctatcaagtcatattgcgagcttcgtgtcctaccatatgaactcaggaagactgtcgtgttctgatctgagctccctttattttctgtcttattgtacttttatatggattgataaaatgaatttttttagctc

SEQ ID NO: 28881 - DNA, 1736 bp, Zea mays
  Clone ID: LIB4766-006-E10_FLI
ccgggcttcccaaatcctagcccccccccaccctagcaccaccgcggcctgccttctctgggcgggtccttcccagatccatcacgggaggttaaaaaggaggcgggcaggtggtggatggacgggccgaagcgacacctgcgggtgcgcctccgcgtcactgcgcgccggcggggcgcctacggcgatggcgctggaggcgcgttggggcccaggcggcggaagtgccggatggagacccccgttctcaactccgctgccaagcttcagcgccgcgagatcgggggtcgccagctcgcggcacgcggcggcggccccgccgccgccgtgcccgagcgcttccggaacatgcagctccaggaggagttcgatacatatgatgacaatgctaacctatttgtgaagctgcagtttcttaaaagaagatccaaaattaatgagattgttgcagcaaaggatatcatatttgcccttgctaattctgggctttgtgctgcttttaaccgagtaacaaacaagcgcataggcttcttgaatttgagcccagatgaagtgattcggagcttgttctacaacaagaacaacgattcccttattaccgtttcagtttatgcatctgacaatttcagcacattgaagtgcagaacaaccccggttgagtatattagaaggaatcagttagatgctgggtttcccctctttgaatcagagtctctgaaatggcctggatttgtggagtttgatgacgtaaatggaaaagtactcacatattcagcgcaggatggtatatataaggtctttgacttgaagaactactacttcctatattcaataccagatgaaaatgtgcaggagataaagatcagtccaggaatcatgctcttgatatacgacagaacaccaagttatgtcccattgaagatattatctattgaagatgggaaacaactgaaattttttaagcacttgttacatcgcaacaagaaaattgatttcattgagcagttcaatgagaagctccttgtcaagcaagaggacgaaaacttccagatacttgatgtgcggagttctgagctaattgaagtcaatgtctccaagtttatgaccccttcagcattcatttttctttatgagaacaatctcttcttgacattccgaaacagaacagtcgctgtatggaacttccgaggagatcttgtgacttcatttgaggaccatttactttggcatcatgattgtagcaccaacaatatttacatcactagcgaccaggatcttattatctcatactgcaaatcggaggcagtggctgaggatggtacagttgttccagttggatccatcaacatgagcgagatcatgactggcaagtgtatcgccaagattactgccaacgatcctgccctaagtgcgccccctcgcagaaatggtcgcagcaagcggcggtcctcggtctggagcaccgttccagaagctctggaggacgtcacggcactgttctatgacgaggacaggaatgagatctacaccggcaacagtcatggactggtgcatgtatggtctaactagatggtaacatgtccatacatctcgcccttttgatttgacttggctagcctgactgcattctgtataatccccggcttggggctcacctagattttgtatttggcaatagaatgtgtttccttgagaaattgtgaatgcaaatcgttataaatatctcatgttcgtcg

SEQ ID NO: 28882 - DNA, 1429 bp, Zea mays
  Clone ID: LIB4766-006-G11_FLI
gccggccgggaaaaaaaaaaaaaaaaatctcacaagaacattgctaccaccaagtgtcaggacccatggttctcgctcctgcgctcctcgtcgtggcggcgctcctggcccagccgctcgggagccgctccggcgacgacgccggggccgcgaacttgcacccggtcgtgctcgtgccgggctacggctccaaccagctgcaggcgatgctgacggcggcgtacgagcccccggcgcctgcctgtgccggctccgcggaccagggttggttccctctctggccaaaccacacggcgatgcgcgacgctagccaggtcccctgcttcgccgaccagatgagcctcgtctacgacgccggcgccgacgactaccgcaacgccgacggcgtcgctacccggaccccgttcttcggctccgcgcgcgccctcatcgggtgggacaggctggtgcagcagctggaaggcatgggctaccgcgacggcgagaccctccacgccgcgccgtacgacttccgctacgccgtggcgcctcccggccacccgtccgcggtgggggaccgctacttccgcgacctcgggcgcctcatccaggagagccgcctcatccatggccgcccggccatcgtggtcgcgcacagcttcggctgcgcgctcacctaccagctcctcctgtcccgcccgctcccctggcgccgccgctacgtgaagcacgtcgtcctcctgggccccgcgctcggcgggttcgcgcatgggatgcgcctcctcggcgccggcatggactacggcctcccgaacgtcccgcggccggcgatgctccggatggcgcggacccagcagagcgccctgtggcgcctgcccacgccgctcgtcttcggggaccggccgctggctggtgaccagcgccgcggcctactcggcgcgcaacgtgtcggcgttcctcgaggccatcggcttccaggaaggcgtgcggccgtacctgacgcgggtgctgccgatgtgggaggcgctgccgccgccgatggtgccggtcaccagcgtcgtcgggttcggcgtcagcacgcccgagacgtacgtgttcggggccgacgggctcgagggggaggccgaggtgctgtacggcgacggcgacggggagatcaacatggtgagcctggcggctgtcgagagatggtcggaggtggaaggccaggtcttgaaggtcgttaggctgcgcggcgtccatcacgacggtttcttcagcatcgatttcgcgttgaatagcacacttgctgagatatcggaggcaggagaaagcgtcattgaacagatcggcattgtatcgtgtcagcagaaacgcagtgattactgagaatttggtggacgggtcctaaaacgtgtcctgcctcacgattgactgattgagaataaaaatggtaggtgatgctagtgct

SEQ ID NO: 28883 - DNA, 1387 bp, Zea mays
  Clone ID: LIB4766-007-A12_FLI
ctcgaggccggccgggattcgtacgcttctcagagaagaatgggaatccaaaatcctataagaccctcctcccttcatgcacagctctgccgcttgcctccgccggcgagggaagggacgaggcgccgagccggcaaccgttttcggggttgctggcggcgattggctgcggttccgcatcaaggctggtcgaacgctgcccctcctgattggtaggtagctcgagatggatctgattcttccatataaggttggggacctcgcggagtccaaatccttggtgagcggttacagaggtgcatggtttcgctgtaagatacataatatgcgtgtcaggcttggatacctggagtgttacttggaatacattgattatccaggcgaaacaattgttgatgaaacctggcaaattggtgatcgagttgattggttgaaggaaggttgttattggtctgggacaattactaagataatcaatgaagatctggtcgagatagagctgccggcacctcccataggtgaaggaaaatgttataaagctaaatgtagtgatctgcggcctactctcgagtggtctctagcaagaggttggatggtccctctttcacaggcaaatggaaaaggttggcatgctgctcgtctacttcaacattataaatctgaatcagatgatgataatgacgacaacgatagctgcgatgcccggcaaacggtgtgcagagcttcaaacacgcatgaggaagctccaggccccatggtccctgcacctccgtcagccacaaacaacgctcccagccacacatatcagaaggatgctgctgtcgcatccacagaggacctgctgaagcccggctcaacatccaagtcgccagaccccaggcacgacgcccaagctagcgctcaacctgcaggtacgggggtctccatgaagccggaaccggttattggagtctcaacaatcaagaaagaggactccttgacagaaggtgaggttgatggcgacacggaagagtgtctggagaagctgggcgcgatcaaagccaggctcaaatacctcatgcagggcacgcggctggaacatgagcgcagcgccaccttccgtgggtagtcaggcagatgaagctgcatcaaaggtgcaacttcacgcaggggccagggccatctaacgcctgttgtggttgctgaattttgtttcctgtggttacaggtattattgtcctgaataatgatgctgtgaataagtggtttgttttttgagtgcggcaatttgtaggagctaagaggaatgtgttgcttttgcattagactgtatccactagttcactcatatggtcatcccaaacactgcacaatggagtttgaatattgaaatgaggatagataagat

SEQ ID NO: 28884 - DNA, 1764 bp, Zea mays
  Clone ID: LIB4766-008-B4_FLI
ccgggaaacccacaaaaccctcgccgtcgcgccgcgcgattgcctctccggccgccgcgagcccgcgacactagtaacggtctacaccactagaatgactgaagaattgaattccagcaaattcaagcttttgttagccaagatttgagattcgatttgaagtgtggaagtccttacaatttgccaatcctatatttgatctctgctgtgctgcgttaaatccctaaacttcacagcgcggcgccggcccagccacgccggaagaagtcgccgcgtgaggtcagtgtccccgttgctgccgcctctaacccgaagcctaggccgctgccggtgcataacaaggagaatcaggcggaggggaaagtagcagaggagggggcagcaactgaggagggggagaagtaccgggcggaaccggaaatcttgccgctgccgccggccatggcgaagctgggcccggggcaggggctcgggtgcgaggcggcggaggggtcgctcgtgcccagccggaagcgggagtacaagccctgcggcaagcacactgaggggaagcgcccgctatatgctatcgggttcaacttcatggacgcgcgctactacgacgtcttcgccaccgtcggcggcaaccgcgtgacaacttaccgctgccttgagaatggtagtttcgctcttctacaagcttacgttgatgaggataaggatgagtcgttctatactctaagctgggctcgtgaccatgttgatggctcaccactgctggtggcagcaggaagcaatgggatcattcgggtcatcaattgtgctacagaaaagttagctaagagctttgttggccatggcgactcaataaatgagataagaactcaaccgttgaagccttcgctcatcatttctgcaagcaaggatgaatctgttaggctatggaatgtccatacagggatctgtatcttgatatttgctggagctggaggtcatcgcaatgaagtattgagtgttgacttccatcctagtgatattgaacgttttgcaagttgtggcatggacaacactgtgaaaatctggtcaatgaaagaattttggctatatgttgacaaatcatattcatggactgaccttccatcaaagtttccaacaaaatatgtccagtttccagtcttgattgctgcagtacactctaactatgttgattgtacaagatggcttggtgacttcatcctatcaaagagtgttgacaatgaaattgtgctttgggaaccgaagacaaaagaacagagtcctggggagggaagcatcgatattcttcagaagtatcctgtcccagaatgtgacatttggtttatcaaattttcatgtgattttcacttcaatcagttggcgataggcaaccgtgaaggcaaaatctacgtgtgggaagtacagtccagccctcctgtcctcattgctcggctgtataatcagcagtgtaaatcgccgataagacaaactgcagtgtccttcgatggaagcacaatccttggagctggtgaagacggcaccatctggcggtgggatgaagtggaccatccgagctccagaaactgaagaagtgttgccgctcaatgctggactgatagttatgctcggttggggttgtgatggttgaatccgttggcggaaagtgccacctggtgtttttttctagtcaaaatggttggtgttaacagaatattgaatgcttcgaatgttgaaaggtggggtgaagtgaacttagtttgttgcaactcg

SEQ ID NO: 28885 - DNA, 1779 bp, Zea mays
  Clone ID: LIB4766-008-C2_FLI
ccgggcccttccgtctgacggcaagtatcacccccttcccctcttctcctgccacacctccgccagcgctagggttttatttttgcattgctgttgctggtggtggttaccttcttctctctctcagtcgtctccctcgcagctgcagtcgtcgtagcagatcttatctcaaaccctaccgaccaacagctgcttgctcgggacgggaaccggagttggattgcgatggcgctgcagtacgtggaggcgcagcggcaggcgcgcccggacctcgccgactggtatgcttccctcgccgacctctaccagcagaagctatggcaccagctcaccctcaagctcgaccaattcctacagctccaggccgcacagaccggagacactatcattcagctctacaacaatttcatcactgattttgagaccaagattaatctgctcaagcttgcccattttgcggtgatagcttctcgccagtaccctgataaggatgctgcaattaccttcttagagggggtgatcacaaagctgcgtgatacaagagagtcacggattaatgaaccgattctctatgtgaagatgcaaattgcagctattaatcttgagaaaggaaaccaaaaagagtgcaagaattcgttggaggatgggaaaaccaccctggatagtatgactgatgtcgatcccacagttcatgctagcttttactggatatcatctcaataccacaagtcatgccaagaatttgcagagttctataagaacgctcttctctatctggcctacacaactgtggagtctctatctgagtcattcaagctagacttggcttttgatctttctctagcagccttgctgggtgataacatttataattttggagagttattagctcacccgattatcaatagtcttattggaaccaaggtggagtgggtttatcatatgttacaagcattcaacacgggcaaccttgctttctaccaagaactttgcagggttcacaatgctgctcttactgcacaaccagctttggtgcaggatgagaggaagctgcttgagaaaatcaatattctttgtctgatggagataatctttagtcggccatctgaagatagaactattccattaagtgttattgctgagcagactaagctttcaatcagtgatgtggagtatctccttatgaagagcctctcggttcatcttattgagggaataattgatgaagtggacagtacagttcatgtttcgtgggtccagcccagagtgcttggaatcccacaggttaaggctttgcgcgaccgcctggatgcctgggttggaaaggtgcatactacattgctttcagttgaggcagaaacacctgatcttgttgctgcctaatttagcacctgttacacttccgcgagaggcttggtcagcaaggtgatgagatgcattgtgacacttgtagtcattttctggataatgaacctgctgccctgagcgtttgtcagcctgcgtcctgatcggggcctgtaatttcttttttgatgtcctctggacatggatgggtacaacttcacgcagtgtcacggaaacgggaccaaatgattgaaatttttatactagtagggtgttactgtagttttcccagttgaatttaatttgtaactgagtttgtactctgctggacatggatgcaggagaatcttgctggaaatttagttgtgcttgatgtttgcatgttgcattgcgataagacgtggatcatcattaatgtattcttattctcagacg

SEQ ID NO: 28886 - DNA, 762 bp, Zea mays
  Clone ID: LIB4766-008-C5_FLI
actcgaggccggccgggcttcgctgcgccgccgcctccgacatcgtctcttcgtccccacgagcaaccgataatccgccggcgctgagatgttggtttatcaagacctcctatctggcgacgagctcctgtcggattcattcacctacaaggagctcgagaacggcgtcctgtgggaggtcgagggaaagtgggtcacccaaggtcctgttgatgtagacattggtgccaatccatccgccgagggtggtgaggatgaaagcgttgatgacacagccgtgaaggtggttgatattgttgacacattccgtctacaggagcaacctccttttgacaagaaatcatttgtctcttacataaaaaaatacatcaagaatctcactgctgtgttggagccagagaaagcggatgagttcaaaaagggtgtcgagggtgcaaccaagtttctccttagcaagctgaaggaccttcaattttttgttggtgagagcatgaaggacgaagcgtccgtggtattcgcctattacaaggatggtgccactaatccgacattcctctatttctctcatggtcttaaggagatcaagtgctagattagttacccatgttgggtactatatatgttctattgttatagccacaactatagctgccctgcctgaactgaactcaggttttttttaagaaagaactgtccaagattggattgcttgttaaagctaaatattgttattgacgtgttattgcttagttgtcattgtct

SEQ ID NO: 28887 - DNA, 1069 bp, Zea mays
  Clone ID: LIB4766-008-C6_FLI
ctcgaggccggccgggccccatttcgaagcccaccgaattccctgcgattcctctcccctcgcctcctcgtctccccctaggggatcgtcggagaggaatcgcaaagagggccgtctcatccgagttaaggaagccatggagcacaaggaggctgggtgccaggcccccgagggacccatcctctgcatcaataactgtggcttcttcggcagcgcggcgaccatgaacatgtgctctaagtgccacaaggagatgataacgaagcaggatcaggccaagctggctgcctcctctatcgacagcatcgtgaacggcagcgacgccgtcatggagccggttgttgctggcagcaacacggtagtagctgttgcccaagtcgagttgcaaacaatgaacgtgcagcagcccgctgatgttgccggacccagcgagggggtggcggcgatctccaaaggggggaaggtagggccgaaccggtgcagcgcctgcaggaagagggttgggctcacgggattcaactgccggtgtgggaacttgtactgcgcgctccaccgctactccgacaagcacgactgcaagttcgactaccggactgctgccagggacgccattgccaaggctaatccggtggtgaaggcagacaagctcgacaagatctagggggggttccctacggttggtgtcaggaagattgtaaaccgcggtaactcgtcatgcggaactgctgccttgccccccgcgcctttctcttccatgtttgctgctacaatcttgttgttgggcattgcagtgcacggtgcacacttgtgtagcccgcctccgagaattctcctgcctctgcatctggtcagttcaaaaatgatttgcatgttggctatgttgtgtaagctctatttatggtggtctcgctgagacgggtatttggcttcgcagttatctagctatgtgatgtactgttgtcttgtccctgggtattatatggtacactgcagccagtaatagtaatctgcaactgtgcgttaaatggtccgtcgttttcctatacaaagtatctctcttgtttgcact

SEQ ID NO: 28888 - DNA, 1016 bp, Zea mays
  Clone ID: LIB4766-008-D6_FLI
aaaaaaccccatccaattccaaacaactcttctcgccatttcaccaccgcctccgcccccatcctctccccctcccgtcgcgccagtcaacagcctgtctgcctcttccctcgccacccatggccaccgtagcgcgcaccctcgtcgccgcatgcccggcacgctctcctccgcttccggtctcggcgcctcccgtcctcctcttccatccgtcccgcgcggcaacgtgccggcgtcgggtctgtccgctgcatggctcggcgaccggattcctcctattccccgctgcgttcggggcagggcggtgaccgtgcaccgactgaaatggcgccgctgttccctggttgcgattacgagcactggctcatcgtcatggacaaacccgggggcgagggcgccaccaagcagcaaatgattgattgctacatccagacccttgcccaggtgctagggagtgaagaggaggcgaagaagaagatatacaatgtgtcctgcgagcgctattttggattcggatgcgaaattgatgaagagacctccaacaaactcgaaggtcttccaggggttctttttgtgcttcctgactcttatgttgatgctgagaacaaggattatggtgctgagttattcgtgaacggtgaaatcgttcagcggtcgccagaaaggcagagaagggtggagccagtgcctcagagagctcaggatcggccacggtacagtgaccggacccgctatgtgaagcggagggagaaccaatcttaccagagatgatgtctccgtttctggagatggaaaatgccagggtttccacaggtgtgccatactggagatgcaggagcaacccccactacccacatgagaatgacatccgttgtgtttgctgcgctttctaagcttgacaagttgacattgcttatgcgtttgggcttgtacctctagttgatatgacggtgtatccttttaactccgcataacattgtgtttgaagtcttctttagtcagaaaatattgacgat

SEQ ID NO: 28889 - DNA, 780 bp, Zea mays
  Clone ID: LIB4766-008-G1_FLI
ccgggaaatccgtggctctaatccgtaaccctaaacccccaccaaaacccctcctcgcctccctcccctccatccaatcctcgaaacgagcgcgcgggcgaggaggtccccctctccgagatggctagggtttttcgcgggtccctcctcctgatgtccccggcggcggcggcggcggcggcggcggcggcaggggccaagaaggcggcctccacgaagccgagggcgccggccgggatcacgaagccgatgccggtctccgaagcgttccgcaggttcgccggcggcgcgcgcgaggtcgcacgctccgaggccatcaagctcgtctggacccacatcaaggcccacggcctccagaacccgtccaacaaaaccgagatcaactgtgacgcgacgctcaagagcttgtttggtgggagggacaagatcgggatgatggaggtctcgaagctactgagccctcacttcctgaagaactagcaagcggtgcatggagccggcggcagcgcttcgcggttgatttgggaaatgtttagtctgctaatggcaaatctcagtccacgttcatcccagtctttgattcgtggtcttagcgtcatgttcgtatgcgtggggttgcgttctttccgatttgtatagtcggtctgcagcatgttatatgatatgcttgaagtttgcactcctcccttgtcatcgctggatgcctggataaacaaaaccagctgttgactgactctgtaagttgtacctctgttgcttacgaaatattacttcccctcc

SEQ ID NO: 28890 - DNA, 1604 bp, Zea mays
  Clone ID: LIB4766-008-H5_FLI
aataaaagtgaaattccattaccttgctgtctcggtctgtcggccatcgccggttggcggttgcgcagcgggcagcggctcacgtcgacggggaagactccggaggccacgggcgttacattctcctgccgtatttttgcgatcaaggccttcggcaacgaagccgtcagcttcgtcccatgcctttgcagcatcaatgtttacgcggagctccgcagcttttcttcttcagtatgcaagttgcacctgccgaagatccctggctaaccaaacaaatggtggagacatggattagtgcttatgggaaaatcatccccaacagggattgaagtgacagccagggatccactcatcccctgggtggaaaaattcaggttgtggattggattgctagctaccgaacaagccctcagcgtgctaatttcagtggaatcttggtagacaccactgaacttcttggtttccaattaagttcgagcatagagatcgtcttctctcacactgagttgccagtttattccgaaggtccttcaagctaagttctgatgatggctaaggccaatggagcagtccatgcatccacgaaggaacccttgttttcttttggtgtcatagctgatgttcagtatgctgatatcccagatggtcgctcattcctcggtgtcccaagatactaccgccatagcatcactgtcctccaaagggccgtcaacaggtggaacgaacaaggcaacatcaagttctcaatcaattttggtgacattattgatggctactgcccaaaggacaaatcattgtgggcggtgcagaaggtccttgatgaatttgacaagtttgatggcccgacatatcacatgattggcaaccactgcctgtataaccttccgcgcagccagctggtgtctctgcttaagattgcaacagattctgatcgtgcctattatgacttctcgccatgccctgggttcagaatcgttgttctggatgcttatgacttcagttgccttggctggccccatgatcaccctgtgactatagcagcaatgaagctcctggatgagaagaatccaaacactgataagaacagccctgatggtctggttggtgttgataggcggttcgtgaagttcaatggtgcagttggcaaggagcaggtgtcctggctcaatgatgtcctccaggacgcatcgacgcaacatcaaaatgtcatcatatgcagccatctcccaatggatcccggggcgtcttccccagcagctctgatgtggaactacgatgaggtgatggctattgttcaccagtacaactgtgtcaaggcctgctttgccggtcatgaccacaagggtggccactctgtggactcacacgtgtgcaccaccgcacccttgaggctgccttggagtgtcctcctggtaccagcgcttttggtcacgtcgaagtgtatcctaacaggctgctgcttgtaggttttgacagaatggctgatacagaggtccgtttttgagccattaaacggctttaattcgtgccgacttctactacttctataatgtttttgtctatatagattacagctgcagcagtccaaacgctggctttaatct

SEQ ID NO: 28891 - DNA, 1119 bp, Zea mays
  Clone ID: LIB4766-009-A3_FLI
ccgggaaatcgttccttctacacactgtcgaggagggcagtgggaagggacgagtcgacgccggtgtgcggtggcggcggtcgcgcggtaacgtttcccttcagcttcgatcatgttggtggcggcgccggccacaaaaggctcacccaccaaggatttgacggctgtcgagcccggggacgaggtggcgcagtcggtgttcgacgcagggggagctatgggttcggtctcggtttgtcaggcgaatggcaactacccgccgccgccgccgcaggcagaagcggagcaggtcgtcgaggatggcgttgccgtcgacaggatcaatggcaactaccagccgctggagctggtggctgaggcggggcaggtcgtcgaggagggcgatgccggcgtgaccatggaaggcgtcgcttccatcgccttgctgcctaccggtgccatctccggccatttcattcgcctcccggactccatctgctacgggctacacggcaccccaatatcttgcgagagggaatgtagccgaggagaggactaccgccttataaagctcaccatcattgattttaagagcaagagagagaaggtgcttgtggtggaatgcaggggccatgatgctgctcgattacaaaacattgaccatttgcatgggtgggaagatgacattgttggtttggttgagaaggatcacggaaatcagaaagtcttgctctcctttgaatgcgagacgctgaaggctgataaagatgcggaagatcatattgccaaatatatgccaaatctgtgtggactggacgcagttgaatctgctcggatgaacagcattagatagcatggattaccattaaggtgctgtttgtttcaaagcagtaaatatagggaaaatgagcatctcaggcatcaatctcgacgaggacgccgaaccaagaggggacaactgagcgtgtgaacagtggtcattgttcatcagcactggtaaactctgcacgaatcacatcaaacgcttacactgcactacatatggcagtttgatacgtgtctcattaccagtgcctgtacttaaaattctgtggctgtgaatcggattcaaaaccctttatacgtttcaactttcaagtt

SEQ ID NO: 28892 - DNA, 1257 bp, Zea mays
  Clone ID: LIB4766-009-B11_FLI
agttccatctccatccccaccatctcgtccaccagtcgtgtcttccctatctccacgctaccgcacctgtcgccgccgcctccgccctctttgctcccggccccacttcaagcccaagcgtccgcgtctcccgcccgcgccgccacgcctcgatgtccgccgccgccgattcctcctcctccattgtagtatcgggtgatgcagcggttagctcgctctcacccgagagcatcgagcacaacgatctgctcatagttgggcctggcgtgctcggccgaatcgtcgctgagatgtggaaacaggaatatccaggttgcaaggtttatggccagactgcaaccacagatcatcacagtgaattgactgatattggtatcattccctccttgaaggggtccgtaccgggtccaaaatttccatatgttatcttctgtgctcctccatatcgttctgaggattatgctggagatctgagagtagcagcttcaaattggaatggaaaaggctctttcctattcacctcgagtactgctgtgtatgactgcagtgacaatggattctgcagtgaggattctccttgtgtacccattggtcaaagcactcgtactgatgtgcttctaaaagctgaaaatgttgtccttgaggcaggcggctgtgttcttaggctagtaggactttataaatcagatcggggtcctcatgtttactggctgtcaaaaggaaccttggatgtgcgtcctgatcatatactcaatctgatacattatgaagatgcagcctctcttgtaatttccatcatgaaaaagagattacggagctgcatctttgtgggttgtgacaacgagcctctgtccaggctagagatcatggaccgtgtcaacagaagcaggaaatttgacacacagtttcatggcttcactgggactgatggttcgctggggaagaggatggacaactccaaaactcgggcaaagcttggatggcagcccaagtatccgagctttacagagttccttggtctcagcaatctctaactttcatgcgatgtcactaaatacctgttattaaagatgaatatactgatacataaaagagatgatgacagatttggaagtggaatgttgtttgcttataccgcagttttcgactatcttttgatttcttctgttagatcttgtaaagcattgcagcatggtgtggcatgtacctgtgttgccttctattcgcttctgttaactcatgaaagcattgactcct

SEQ ID NO: 28893 - DNA, 1470 bp, Zea mays
  Clone ID: LIB4766-010-B10_FLI
ctcgaggccggccgggccttaaccattcctcccaacaccacctcgcctgcgatcttcgtagcctccgtcgcgtcgagcatcgatcatgtcggcctactgcggaaagtacaaggatgagctcatcaagaatgctgcctacattggcacccccggcaagggtatccttgctgctgatgagtccactggcaccattggcaagcgcctttccagcatcaatgtcgagaacgttgaggagaaccgccgtgccctccgtgagctcctattctgctgccctggtgctctccagtacaccagcggtgtgatcctcttcgaggagaccctgtaccagaagaccaaggatggcaagccttttgttgatgtcctcaaggagggaggcgtcctccctggcatcaaggttgacgagggcaccattgaggttgttggcactgataaggagaccaccacccaaggccatgacgaccttggcaagcgttgcgccaagtactacgaggcaggtgcccgctttgccaagtggcgcgctgttctcaagattggccctaatgagccatcacaccttgccatcgacctgaacgctcagggtctggctcgctatgccatcatctgccaggagaatggtctggtgccaattgttgagcctgagatccttgttgatggccctcatgacattgatcgctgcgcttacgtcactgagaccgtccttgctgcctgctacaaggcgctcaacgagcaccatgtcctcctggagggtaccctcctgaagcccaacatggtgactccaggctccgactccaagaaggtgacccctgaggtgattgctgagtacaccgtccgtaccctccagaggaccgtccctgctgctgtgcctgctgttgtcttcctctctggtggacagagcgaggaggaggccacccgcaacctcaatgccatgaacaagctcagcaccaagaagccgtggtccctgtctttctccttcggccgtgccctccaggcgagcaccctcaaggcctgggctggcaaggtggagaacctggagaaggctagagctgccttcctcgccaggtgcaaggccaactctgaggctaccctcggcacctacaagggtgatgctgccgccgacaccgagagcctccacgtcaaggactacaagtactgagttgcttctctttgcgtgcccgttttggaacgcctgcctacgagctaggttgcggagtgtggtttgctcgttagagcttattttcggacatccaaaaaacatgcttcctatgtgggatgatggttatctttatatttgtatgttaattagtctctttgctgttaaatttcgtgtaagttggtcctgccgatggagaatcgagcagctccctttttttgttctatcaactatgctgtaattctggctatgtatcggcaaaaacaattctatatgctgagttggagtcggcaaaaattcatatatgctgagttggaggc

SEQ ID NO: 28894 - DNA, 761 bp, Zea mays
  Clone ID: LIB4766-010-D12_FLI
ccgggactggtgaagtcgaagtctcgaaggttccagcgagcgactgtgtcgagcaggagagagcgcgatggggaagatgcggcagctgatctgcctcgtggccgccgtcgccgccgcggccatcctcctgacagcgtcggccaagaagtccggcgacgtcaccgagcttcagatcggcgtcaagtacaagcctgagtcatgtacgctgcaagcacacaaaggagacaagattaaggttcactatcgtgggacactgactgatggatcagttttcgattctagctatgacagaggtgacccgtttgaattcacccttggaaatggccaagtgataaaaggttgggaccaaggattgctcggtatgtgcgtgggtgaaaagaggaagctaaagatacctgcaaagatgggttatggtgagcgaggctccccaccaaagattccaggtggagcaactctgatcttcgacacggagcttatcgccgtcaacgggaagacatccggcggtgcaaaggcagagagtgatagtgagctctgatacaatgcattggagagttccaaagctcgagaggagtagtagcagcgtcgcatagttcattaggtgaaacggttgctgtttcctccacatagcagtttatgctacagagatgtaacagaaacaagtcaggttttgcccgatggtctatcagtctatgcaaccccgactgcctacgtactcccagaacagtttcctttacatctcatgaaaactcgaatttgtctat

SEQ ID NO: 28895 - DNA, 1783 bp, Zea mays
  Clone ID: LIB4766-010-D3_FLI
ccgggccggcagcgaagctcccccctccctgcctccttccccggcgccccgctcttcctccttccgctccggcgatgggcactggccgccgcggcggcggcggcggcggcgtgttccaccgcctcctcgccctctcgtcgctgctgctcctcgcttccggcgaggtcgtcttcgaggagcgcttcgaagatggttgggagactcggtgggtggaatccgactggaaaaggagtgaagggaaagcaggaaggttcaagcacacagcggggagatactctgcagatcctgatgacaaaggaatacaaacaacaatagatgccagacattttgctatctcagccaagttcccggaattcagtaacaagaaccggacgcttgtggtccagtactccattaagtttgagcaggatattgaatgtggcggtggctatattaagcttatgtccggttatgtcaaccagaaaaaatttagtggggacactccgtacagcttgatgtttggaccagatatatgtggtactcaaacaaagaagctccatcttatactctcttaccaggggcagaactatcccatcaaaaaagatctagaatgtgagacggacaagttaacacacgtgtatactttcattcttaggcctgatgcatcttatagcctgcttgttgataaccgtgaaagagaatctgggagcatgtacactgattgggatattctccctcctcgtaaaattaaggatgttcacgccaaaaggcctaaggattgggatgacagagaatatattgaagatcctgatgaagttaagccagagggctatgattctatcccaaaacagattcctgatccgaaggacaaaaagcctgacacatgggatgaagatgaggatggaatatggaagcccagaatggtatcaaatccagcatacaagggaccttggaaacgcaagagaattaaaaatcctagctacaagggtaaatggaagaccccatggatcgataatccagagtttgaggatgatccagatctttatgtgctgaagcctttgaagtatattggaattgaagtttggcaggtaaaagctggttcagttttcgacaacattctgatttgtgatgaccctgagtatgcaagaaaggttgttgaggaaacttggggtgcaaatagggaggctgaaaaggaagcttttgaagaagctgaaaaggagaggaaagctagggaggatagggaaggtcaaaaggcaaaggacgatggtggccggcatcgaatacacaggcgtcataaaaaacactacagagatcactgggacgactaccatgatgagctataaaagtccccaaatattgcattcctcaaaagcataagctggaagttgcttcggacattgtgggtgcttttcaataataataattgattcgcctggtcagaacaacctgaagtgtttcttgctatgcgccaacaaattgttgaactacaggatttgatatgtaatggacaaccgaagatctgcagggcattccagcgaaaacttggctctggtactgaaatagaggggacgagagactgtagtttgtgtctgtacaacggtgccggccatgtgctagctttgtaatctcaaaacattgtctttgcatgaataatgtaagttacccaaaaattactgcataccaagttacaaagtgttgtagctgacatatgaggaacactttaattttaatcttcatatatatacttctgtaatcttcaaaaaggatacgatgcaattggtctatctctgtcatcaccttgcac

SEQ ID NO: 28896 - DNA, 857 bp, Zea mays
  Clone ID: LIB4766-013-C2_FLI
ccgggcccaaaacctaaacctagcttttcgtcagtacaacgcctccgccgctccttccattagctcagacatggttctcggcctctacaccttcgccgacatcgacgccgacggagcaccccgcctcgaggttgccgatggcgaggagttcgtccgtgtcgatcgcgttgtcgagcttgccctcggtccccgggtgctgaaggcccctggaaccctttacctcaccaccaggagggtgatttgggtcagcgatggcggcgagggctacgctgtggacttcgttgccatctcgctccacgccgtgtcgcgtgatcccgaggcgtatccatacccctgcatctacacacagatcgagacggaagctatttctgacgaggagtctgatgtgtcagattctgaaacaaatggagaactcgagctctcaaaagttatggaaatgcgcatcataccttcagatcctggtcaattggatgaactctttgaagcattctgcaattgcgctgagcttaaccctgatcctagtgctgagagtgatgaagaacatggctgggttcatggtgatgagggttatgaagatacggtagatggaagcgacactgagttttcagatgtcaacccaattggtcaaactggtgagcaggatattaaccatgctgtaatcgagctccagatcaatgaccaacgttttgaggacgcggtagatgaggagagtcacaggaacgggaactagggaccatgtgaattggtcgtcgtcgatgcagcatacttgtctgtaaagacttcacttttctcatgttgtcagatcatgtggaccaacttgaatggcaacaatgggggataacgagctttattatatg

SEQ ID NO: 28897 - DNA, 1163 bp, Zea mays
  Clone ID: LIB4766-014-A10_FLI
agacgtcatcattcctctcgagtagtcgatcggagtcaggagatgggcgcgtctggtggtgaaaagcttggtactcttgtgtgtgttcttgcacatgtatcgttattattggtgctcgtgctagcaccgtgtgtgtgcaaggcgactggtggtgactacggcggcctctccaacgaccactacaccgagtcctgcccggagctggagaccatcgtcaagaagtccctggcgccgatcttcgccgtggacatcacctcgccggccgccctcctccgcctgctcttccacgactgccaagtccacggatgtgacggctccatattgctcaactccgacgagcgccggcacataacctcggaactgggctcacgcaagaacctcgggatccggcacgtcggcaccgtcgggctcgtgaaggcggccgtggaagcggcctgccctggccgggtctcctgcgccgacatcgtcgtcctggcggcgagggaggccgtggcgcacaccggcggcccgcgcgtcgccagcgtgccccttggccggagggacgccacgaccaccagcacgcaggccgccgatgcgcagcttccgtcccgtttcctcgggattgacggcgcgctcgacatctttaccagccgcggcatgaccgtcgaggagacagtcgccattctagggagccacacgctggggggtggccattgcgtcaacatagacaccggtcgcgcgcgacgcgacaaggcatttgaggccctgctgcacctgcagtgcccaaagaccatgccgcctctgatcacagaggccgtcgtctttgtacccagcgacctgacgccgacatggttcgacacccactactaccggggcgccgccgcaggccgggggctcttcaacgtcgacgacgaggcctccacctacgcgcgcacggcggggtacgtgcggcggttcgctgaggacagggagggcttcttcggggtcttcgcctcggccttcgtcaagctctctgggtttggcgtgctcaccggtgagcagggtgagatcaggaagaaatgcgacgtcgttaactactgatctgctagcattattttggtggtatatcgaaagataatattgtgattgtgaatttgtgattctactgtcatggcatggattgaataataagttgaaataatatc

SEQ ID NO: 28898 - DNA, 1408 bp, Zea mays
  Clone ID: LIB4766-014-B1_FLI
gacccaaacccacgccccccgcccccctattattctatatatataatacacacactagtgtggagtagtacttcaattggcgttggccgaagaagaggagaagcgaagcaagcaggcttcgagaacaagactgcagggggagggggaggaccaagcgaaaggggaactagagcaagatgggcggcgcactgctgcttgcgctcctcctcgtctctgctgctgccgcccctcaggtacttggagttggcaatggagacaatcacatgagaatcatccaggaggacatcatcgagacagtcaacaaccatcccagtgctgggtggacagcctcacgtaatccttacttttcaaactataccattgcgcaatttaagcacatacttggagtgaaaccagcaccacagaatgcactaagcaatgttcctgtcaaaacttattcaagatcactggaacttccaaaagagtttgacgctagatctgcatggtcccgttgcagcacaattgggaacatacttgatcaaggtcactgtggctcttgttgggcttttggtgctgtggagtgcctccaggaccgtttttgcattcacctcaacatgagcattttactttcagtcaatgacctactggcatgctgcggttttatgtgcggcgatgggtgtgatggaggctatcctatagaggcatggcgctactttgttcaaaatggtgttgttacggatgagtgtgatccatacttcgacccggtcggttgcaagcatcctggatgcgaacctgcttatcctacaccaaagtgtgaaaagaaatgcaaggagcagaaccaagtttggcaggaaaagaagcatttcagcatggatgcgtacagaataaattcagatccacatgacataatggcagaggtctacaaaaatggtcctgtagaagttgctttcacagtttacgaggatttcgcacactacaaatctggagtgtacaagcacatcaccggtggcattatgggtggccatgccgtcaagttgattggatggggaaccagtgatgctggagaagattactggcttctggcaaatcagtggaatagaggctggggcgatgatggatacttcaagatcataaggggcaaaaatgaatgtggcatcgaggagggcgttgttgctggaatgccatccacaaagaatatggttccaaacttcggcggtgccgttggaagagctatagtttaatggttacgtttgcatggcctcaaatgctgttggaattagctaaagtaattttaaaatgcaattgttaaagggccacgatggtgtatgtattttgtacactagctcatttcaaaggtcgttatgttgctggtgccacatcactttggtcaagtggaataatattaataagaactagaatttcgattcgt

SEQ ID NO: 28899 - DNA, 1263 bp, Zea mays
  Clone ID: LIB4766-014-H7_FLI
gaaaagctcgcccggccgcccggggtgaggatgactgccactcccaccgggctcctccggctccacatctgccgtcgaccaaacccgccctgctaaatactcgctccctacagctcccctcgcaattgacacctcccgacctccgttagcacgagctgcagggagggagttgggaggagaaacagagctaccggggcgatgggcaccgtgctcgattcgcacttcctggcgctcaccgccatcgttactgtggggtaccagctgctgttcttcatcatcacagctctcctccggttcgataaggtcaccgatttcgcaggcagtacaaattttatcataatcgccatcctaacattagctttgaagggagcatggcatttccgtcagattgtgctgacagtgcttgtcaccatttggggtcttcgtctaggattatttttattgatgaggattttgcaatggggtgaagaccgaaggtttgacaaaatgcgtgataatttggggaaattagcagttttttggattttccaggctgtgtgggtttggtctgtcagcttgcccgtcactgttgtaaatgcaagtgacagaaacccctcgattgaagccagggatataatcggttggataatatggttggtcgggatatgtgtagaagcagcagctgatcagcagaagcttgtgttcaaaagttctccaagtaacaggggaaagtggtgcgacgccggtctttggaagtactctcgccacccgaactactttggggagatattcctttggtggggagtatttgtggcatcaacgccagttatctcagatgccgaatggcttgtgattcttggacctatattcctgactctcctgcttcttttcgttagtggaatcccactcctcgagtcatctgctgataagcgctatggacgattggaggaataccgtgtatacaagaacactacaagccctcttatcccattgccacctgctgtgtatggttccctgcctgcgtggttcaaggttgccttcctccttgagctcccgctctacaatcctgggcctggaggtgatccaatcagttgagtggtgcttgcaaactgttctgctgcccttcagtgatgaacttgtatagaatacccctgcagtatatttacgttttttttttgttttggtttgacagaactagaatgagcccattgatgggtcagcctcatatttatgttgctattgtatgcgtggcagttattcccccttcgattccaaggggttacc

SEQ ID NO: 28900 - DNA, 1321 bp, Zea mays
  Clone ID: LIB4766-015-E12_FLI
ccgggatcgcaaatcctcgctcgggcaagaagagccaactgaaaagtattcatccaagaacaccaccccacccgctccaagcacaagtttcgtcttgaagagagccgccaccaccaatggcttgttacaacactgcatctttagcggcgactctgctggcgttcgcgctgacgtttcaggcctgcctcgccgggaggaggctcaccgcgctggtgcaggagccggccataaccatgaggtaccacaagggcgcgctcctgtcgggccccatcgccgtcaacttcatctggtacggcgacttctcggcgccgcagcgggcggcgatcaccgacttcgtctcgtcgctgacggcggcggccccggccgcggcgcagccggagccgtccgtggccacgtggttcaagacggcgcgcaagtactacgccagctccaaggtgccgttcccggcgctgcgcctcggctcccacgccgtcgaccggaactgctccctcggcaggcgcctgacggagagggacctgctcaggctcgccgccaggggagccccgagccgcgccatcaacctggtgctcacggccgccgacgtggccgtggacgggttctgcgagtcccggtgcggcacgcacggcgcgtccccgcggtcccgctccggccggttcgcgtacgcgtgggtcggcaacccggcgtcgcagtgccccgggcagtgcgcgtggccgttccaccagcccgtgtacggcccgcaggcggcgccgctcaccccgcccaacggcgacgttggggtcgacggcatggtcatctcgctggcgtccatgctcgtcggcacggtcaccaacccgttcggcaacgggttctactaccaggagggctcggccgacgcgccgctggaggccgccacggcgtgcgccggcgtgtacggcaagggcgcgtaccccggctacgcgggctcgctgctggtagaccaggccagcggggccagcttcaatgccaacggggcccacgggaggaagtacctggtcccggcgctcgtcgacctggacacgtcgtcgtgcgccaccttggtttagatttcgctggtcgtaatcagtgttttgtggtggcgggtgctgtgcgtggagagtgttccacgcggctgacgattctagtagtgtagtgacctgtgaccatggtggattctttcatctgttcaatgaaaaaaaagaaatattttcacgcacacacgtcggtcgattttgccaacaatatactctgttcccccaaagattttgcctggtttgagcatgagcaagatgcatgaatctgtacgacatgaaatcatgtgctatct

SEQ ID NO: 28901 - DNA, 1092 bp, Zea mays
  Clone ID: LIB4766-015-G9_FLI
ctcgaggccggccgggctcctctatccaccccttcacttgcttggtcttccactcacccctctctcgttattcacccggtctcctctcctgcaaagaggaagatgagctcgctacacgccacacgagcggagcttggcctggttgtcctgtacctgaacaaagccgaggcccgggacaagatctgcagggcgatccagtacggctccaagttcgtaagcaacgggcagcctggcactgcgcaggaggtcgacagatcgaccaccttggctcgcaaagtcttccggctcctcaagtgggtcaatgatctgcatgctcttatcagcccgccggccaaagggactccgctcaccctcgttctgcttggcaaatccaaaaacgcgctgctttcgacgttcttgttcttggatcagtttgtgtggctcggacgaacggggatcgtcaagaacaaggaggcgacggaccgcgttgccaggttatccctgtactgctggatggcttcttctgcctgtgcaggtctagttgagcttggagagcttaaaaggctatcgagatcgatgaggaagcttgcaagagagctgagggacacagataaatatgagtgtttatcacatggccattctcagaacgagcagtaccaggacaaaatgaggcagtcagatgaacggctcctggccctggtcaaggcggccatggacgtggtcgtggccgtcgggcttcttcagctggcgcccaagaaggtcactccgagagtgacaggagcctttgggttcgtcacctcgcttatctcctgctatcagcaacttccctcccgcgctcctgttgccaaagtcaaagtttgagaggtgtcgccgtcctagtaaaaaaaaaagaggcgacgctggaaatcgatctctgcttcaacaatggatcgtaatataattttattatgcgaatataaggcaggctagctatgtattttttttattaaaaaaatagtacaacaaaatagaacaccagtgattgcacgtatgggcttatcactatcttctctttttgcctagcaatggacaagtaatgttcacgtgattatgtctttggatatgctttgctag

SEQ ID NO: 28902 - DNA, 2326 bp, Zea mays
  Clone ID: LIB4766-015-H12_FLI
cgtcgaaacacggtttcctctttctcattcggttcaaccaacaccctccactcctccagagccttccagaaccccaatctaacggccaaggtcgccccgtgcccgaatcttctggacgcgccatctcctcaataaaacctcctcggctcctccagtgtccctcgtctctcgcctgagaaaaaaaaaaaaatccacgaaccaatttctcagcaaccagcagcacgacctgtgagggttcgaaggaagtagcagtgttttttgttcctagagggaggaagagatggcaaagggggaggggccggcgatcgggatcgacctgggaacgacgtactcgtgtgtcggcgtgtggcagcacgaccgcgtcgagatcatcgccaacgaccaggggaaccgcaccacgccgtcctacgtcgccttcaccgacaccgagcggctcatcggcgatgccgccaagaaccaggtcgccatgaaccccaccaacaccgtatttgacgcaaagcggttgattggtaggaggttctcggacccttccgttcagagtgatatgaagctatggccattcaaggtcgtggcgggccctggcgacaagccgatgatcgtggttagctacaagggtgaggataagcagttctctgccgaggagatctcctctatggtgctgaccaagatgaaggagatcgctgaggcctacctcggctccaccatcaagaatgccgtggtcaccgtgcctgcctatttcaacgactcgcagaggcaggccaccaaggatgccggcgtcatctccgggctcaacgtgatgcgtatcatcaacgagcccaccgccgcggccattgcctacgggctcgacaaaaaggccaccagcagcggcgagaagaacgtgctcatcttcgacctcggtggtggcaccttcgatgtgtcgctcttgaccatcgaggagggcatcttcgaggtgaaggccaccgccggtgatacccatctgggtggggaggacttcgacaaccgcatggtcaaccacttcgtccaggagttcaagcgcaagcacaagaaggacatcagcggcaacccgcgcgcgctgcggcgtctgcggacggcctgcgagcgggccaagcgcacgctgtcgtccaccgcgcagaccaccatcgagatcgactcgctgtacgagggcatcgacttctacaccaccatcacccgcgcccggttcgaggagctgaacatggacctcttccgcaagtgcatggagcccgtggagaaatgcctccgcgatgccaagatggacaagagcaccgtgcacgacgtggtgctcgtgggcggctccacgcgcatccccaaggtgcagcagctgctccaggacttcttcaacggcaaggagctctgcaagagcatcaaccctgacgaggccgtggcgtacggtgctgctgtccaggccgccatcctgagcggcgagggcaacgagaaggtgcaggacctgctccttctggacgtcaccccgctgtccctgggcctggagactgccggcggcgtgatgaccgtgctgatccctcgcaacaccaccataccaacgaagaaggagcaggtgttctccacctactccgacaaccagccgggggtgctgatccaggtgtacgaggaagagcgcgccaggaccaaggacaacaacctccttggcaagttcgagctgtccggcatcccgccggcgcctcgcggcgtgccccagatcaccgtgtgcttcgacatcgacgccaacggcattctgaacgtatcagcggaggacaagactacaggacagaaaaacaagatcaccatcaccaacgacaaggggcggctgagcaaggaggagatcgagaagatggtgaaggaggcggagaagtacaaggcggaggacgaggagcataagaagaaggtggacgccaagaactcgctggagaactacgcgtacaacatgcgcaacaccatcaaggacgacaagatcgcctccaagctaggtgcggatgacaagaagcgcatcgagaacgccgtggacggtgccatcagctggctggacagcaaccagctcgcggaggtggacgagttcgaggacaagatgaaggagctggagggcatctgcaaccccatcatcgccaagatgtaccagggcgctggcgcggacatgggtgctgctgccggcatggacgaggacgcaccggccgccggcggcagcgccgctggccccaagatcgaggaggtcgactaagtgcttccacctgtggtcgtgttatcgtggtagaagttgaattgcttctgtttctgtgggaacagtaaactctgaggttgtggttgatctgatgac

SEQ ID NO: 28903 - DNA, 924 bp, Zea mays
  Clone ID: LIB4766-015-H6_FLI
gggcccacttctcgccagttcacctccgcctccgctcctcccctccccctcccgtcctgccatggccaccgcagcacgcgccctcgtcgccgcacgcccggcacggccgctgctgccgtctcggcgcctcccgtcctcctcttccatccgtcccgcgcggcaacgtgctggcgtcgggtgcgtccgctgcatggctcggcggccggattccacctattccccgctgcgttcgggccagggcggtgaccgtgcaccgactgaaatggcgcctctgttccctggctgcgactacgagcactggctcatcgtcatggacaagcccgggggcgagggcgccaccaagcagcaaatgatagattgttacatccagacccttgcccaggtggtagggagtgaagaggaggcgaagaagaggatatataatgtgtcctgcgagcgctattttggattcggatgcgaaattgacgaggagacctccaacaaactcgaaggccttccaggggttctttttgtgcttcctgactcttacgttgatgctgagaacaaggattatggtgctgagttatttgtgaacggtgaaatcgttcagcgatctccagaaaggcagagaagggtggagccagtgcctcagagagctcaggatcgaccacggtacagtgaccggacccgctatgtgaagcggagggagaaccaatcttaccagagatgatgtttccgtctctgaagatgtaaaatgtcacggtttccacaagtgtccaaatgcggtactgaagatgcagcagcaactccccactactcatatgagaatggcatccgttctgtttgccgcgcattttaagctgtatatgcttattatgcatttgggcttgtacctcagtcgatatgaacgatgtatcctttgaactaacgcattataatttttgg

SEQ ID NO: 28904 - DNA, 689 bp, Zea mays
  Clone ID: LIB4766-016-B5_FLI
ctcgaggccggccggggtttctgttcggacttccgccgcgcttcgccctctcgctccagccgcttcacagcgccgccgctcgcctctccgaccgccgcgagaatgccgttcaagaggttcgtggagatcgggcgcgtggccctggtgaactacggcaaagactatggccgcctcgtcgtcatcgtcgatgtggtcgaccagaacagggcacttgtggacgcccctgatatggtcaggtgccagattaacttcaaacggctctcacttactgacatcaagattgacatcaaacgcgttcccaagaagtcaaccctgatcgaggctatggaggaagctgatgtgaagacgaagtgggaaaacagctcatggggcaagaagctgattgtccagaagaggagggctgcgctcagtgactttgacaggttcaaggtcatgctggcaaggatcaagaggggtggtgctatcaggcaagagctcgccaagctgaagaaggcgtccacggcttaagtcccttttggtggatggcatgttagtttttggtttcatgttgcatcagcattttgttttgagtgttgtcaaagccagaattagtaatatgtttcatgtgtacccttttcaaacttcatcaagaatgggtgtgctctggatattttgtcgggaatgatatgaaatacttaagttagcttgcg

SEQ ID NO: 28905 - DNA, 662 bp, Zea mays
  Clone ID: LIB4766-016-D10_FLI
ctcgaggccggccgggatcgtgtccatttcgtgatccactctctgagccccaatctcttgagcagcagaatcttcaggccaagccaggtaagcaagcacaacacaaccccgaaatggcttctgcttctgttcccatggctttctcgctgagctctgttatcaacaacaacaagccttcatccgaagccttcttcaggccactacccctacggcaaccaaagaggaccctcttcaccacaaaggcagtgtcaaactccaaggctcaaatcaatgcatctttgaaggagaaggcagttgcaggactcacagcagcttctgtgacagcatctatggtggttccggaggtggctcatgctgctggatatgagttctccccttccctcaagaactttctgctaagcatctttgctggtgggtttgttctagtagccatatttggagccgttattggggtttccaactttgatccggttaagagaacttaaagcccgcatgctccaatgctttttaatttcatatgtctttttcactactcttctatcttcttctttcatgtatgttatatgcaactggtatatgttatatgcatactatctatatcccagctgcactttattttatgttatattctccttatatatgcttattaatcttcatggttc

SEQ ID NO: 28906 - DNA, 2099 bp, Zea mays
  Clone ID: LIB4766-017-A10_FLI
ggccggccggggagtatttcgtgtgcaccgaatattgggatttgggaggacaggcgcccgcactccgcctccgcttccctccgcctcgactctcgaccgcatctgagcactcgcgccggaggtccgcctccgcaggcaccgccacgccatgtcgaagcccgcggatcagcagccgtcggacatgcaggtcgactcctccgtcgccgaggagaagccggccatcagattctccatcaacgtgcttgagctcatgagggaggcgcagatgcagcatggtctccgccagagcgactacacgcggtaccggagatactgctctgcacgactcagaaggccgtacaagtctctcaagtttttgcatggccgaggtaaatacaacagaaggaatataaccgagtcaacagtcacggatgtgaggtttctccatgtagtgttttatatggccgagcgagcatggagtcatgccatggagaagaaaactgctggtacaaacgcaaaacaacgcatctacatgttgggtcgatttcggaaagcagttaaatgggcatcacttttttcacaattatgttctgtaaaaggagattccaggacatctctagaagctgaggcatatgcttcatatatgaagggtgctttgttttttgagcaagacaagaatatagatgccgcaatgataaatttcaagaatacgagggctatatatgaggagcttgggaagtatggcagtatagaaaatcaacttttatgccgtcagcgcatcgacgaagtggagcctatgattgatttctgttcacataaactaggtggatcatatttacaagcacatgaactcctggatactgctaatgatcttctcaaggcgaagatggaggctgtattgtctgagacaagatcacagcaggcagcttccatgactgagtttaactggcttggtcgcacttttcctattacaaatgcaaagacccgtgtctctattttgaaagcccagcagcttgagagagacttgagtgctgcagccacagaatcagttgctgctgacaaaaagcttgctatatttgataaaatattttctgcataccatgatgctcggagctgcatccgcaatgacctggcttctgctggcaatgctgaggatataaaagatgacctgaatggtcttgacaaggctgttagtgctgttctaggattgagaactatagaacgtaaccagttacttgttagcattggtaaaagtaaattcacaaagcatcgagatgaaaaaaatgagcgaatcacaaagccagaagaacttgttcggctatatgatctgcttattcagaatgtaacggacttgacagatttagttagctctggaagaaacaaaaatgaagaagaaaactcttttattcatgagtatgagctgaaaggcttggctttccgagctgagagatgtttctttttggctaagtcatatagttcagcaggcaaaagagctgaagcatatgcattattctgccatgcccatactctcactggttctgcactgcaacagcattcaaacagtcatgacaaggctttaatacaagatctggagtttctatctaacaactgtagatcaaatagctgcatagaacatgcaacaggcattatggaggaggagattgttcctttaaaactttctaaaggagtctcaactatgtcacttgctgataataaaacaaaggagaacaagtatctccttgatatgctagagagctatgaatcagcgattggtgagccgaacaccaaagctccatgtcgcattgctcaattcccacctcctttccaagcagttccatgcaatcctattgtgcttgatatggcttacaactcagttgagttcccaaaccttgagaaccgtatgaaaaaagaaaagaagggtcttctgagcaggttctggggttgaaagatggcatatgcctaggattttggtacattgtcccatcatttgatatgctttgtgcatgaacagtgtaaaactagaatgtcctgataatacctctctgatgggtgaaagatcttcagtatcccgcccaaggatttttgagattctttatcagaaggttaatttagccgttgcg

SEQ ID NO: 28907 - DNA, 1405 bp, Zea mays
  Clone ID: LIB4766-017-E2_FLI
ctcgaggccggccggggtctccctccaccctcctctgtcagggtcctccgattcggacttcctcacggccgccgcgcgaaatcccgtctcgttgctccggtccgctgcgcatcctcaggaatggaacttggcgccaccactgccctctaccctctgcaccgctgcaaaaccatttacctggtcaggcatgcccagggcattcacaatgtcgcgggggagaaggacttcggcgcgtacatgtcacatgaactgttcgatgctcagctcactcctttgggttggaaccaagtaagattttgctctttcttttttttcccacaacttaaccagccctcacgcactggaatagtaactgctcatagggtgttagtttctaccgacaacacaagttccaaggatggagctgtgcttctactaacaaattttactttggcctaagctagcaaggtcgatggtctgcgtgagcatgtgaagaaaagtgggcttgcagaaaagattgaattagttatttcttcccctttactgaggactatgcaaactgcagttagtgtctttggtggtgaaaagtatactgatggtgtaaatgcacctccactaatggtcgaaaatgccagacacagtggccgtccggcagtttcaagtttgaactgccccccatttattgcagtcgaaacctgcagagagcacttgggtgtccatccctgtgacaagaggaggagcataacagaataccggcctctctttcctgcgattgatttttcattgatagagaatgatgaagatgttctttgggaaccagatgtgagagaaccaaatgaggctgtcgcattgaggggtatgaagttcatggactggttgtggacaagagaagagaaagagatagctattgtcagtcacagtggtttcttgtttcacaccttaagcatgtacagcaaggagtgccatccaaccataagagacgaagttagcaagcactttgcaaactgcgagctacggtcgatggtgttggttgacagaagcatgcttgggtcatattcctcaagattcaactatgctggcaagaatccaaccggactagatgtgccaagtgatattgcagataagaagcaggttgacgaagctcagaagaactaaggcaaccttgaaagcataccatatatgacttggattatcaagaaattctgacctttgcgaagcttgtttgctttgaagaggacaagctaagagggcatctacagatagagtttacgcataccattttgttagtcaagttgaactacgcagcaatgtattagcatgtctgctcttttgtctcagcctacattgagattcagggcattggactaggatcatctatttatgataataataaccggatcacctacattcaccaggtgatgcatag

SEQ ID NO: 28908 - DNA, 622 bp, Zea mays
  Clone ID: LIB4766-017-H11_FLI
gctattcgtgtcctggcatccgcagagagcttgttccgtccaggcaaccaaaaagcaagttgccccgccgcgcagaggaagaagagagcagaggaggatggctcgtacgaagcagaccgcccgcaagtccacgggaggcaaggccccccgcaagcagctcgccaccaaggcggcgaggaagtcggcgccgacgaccggcggcgtgaagaagccccacaggtacaggcccggaaccgtggcgctgcgcgagatccgcaagtaccagaagagcacggagctgctgatccgcaagctgcccttccagcgcctggtgcgcgagatcgcgcaggacttcaagacagacctccggttccagagccacgccgtgctggcgctccaggaggccgccgaggcctacctcgtcggtctcttcgaggacaccaacctctgcgccatccacgctaagcgcgtcaccatcatgcccaaggacatccagctcgcccgccgcatccgtggcgagcgcgcgtagccatcatccccggggatctgatgaatgtctagttaccaaacaaataggctgtattagcgtcgttgttctgtattcgttattttggattcggttgcagtgaaaaacagctttact

SEQ ID NO: 28909 - DNA, 1158 bp, Zea mays
  Clone ID: LIB4766-018-F2_FLI
ccggacctctaattccccagacccggcaagcgacgccatcgcgcaccagcgctgctggaccaccgcccgtctgacgcaaacccagccgtccagaaccgtcgtcgccgccgcagcccgtccttccaccacgctcgcgccgttgcgcgctcttagggttccgcagggtcgggatcgccggagatggactggagcgcggtgacggcggaggacctggtggacgcgctgcgggaggtggactggtccacgccgccgcggactgtctcggagttcttctcccggttcaccgtcccacgctcctattccaagtggaccagccgcctcaagtgcaacctctactactacaggacaaactatttcatcttgatcatgttcatccttgggatgggcttcctttggaagccagttgctatccttgctgcttttatgactggacttagcatcgcatttctcaatgatagttttgcagtcactttcaatgagaaagtcacaaggaccataagacagttttcaccacatttagctgcaaagatgaggccaccaacaacacctgttcttcgtggtcgaccaaactcgaagagatcaattcatatttgtgggcgaccgcgcagggtgtttgtcatattcttttctgcagttagctgtatactctggttgacctcatgcagtcttctcacagtcctctgggcacttctgattgctctatttgcaactatgctccatgcaagcttcagaacaccaaatctgaaagcacgtctgaatacattcagacaggaattccgggctgtctggcggaattatagtgagctttaaggtctcatttgtttctctcatgttcattgtggtaaggaaaggtgtcttgtgcagaaacgtccatgctgtttgtgagttgcactaggagatctagttggaggtgaaacgccattggacattactacatggattatgggaggtgggatttgggttgggttggctccgaatgcgatgttatgccttagcacgtgatcccccaagaacaataatttttctttcaggcttctccctaaccgaacattggagaggacagcatgtaaagaaatgtaaaaatgtaccggttctcgatcaaaacttgtgttgtttgtagaaatttttactaattcgtatcgcatcatcttttgaacg

SEQ ID NO: 28910 - DNA, 912 bp, Zea mays
  Clone ID: LIB4766-019-A12_FLI
ccgggaccaatcctggtaggtgcctgccatttatgatggctgggctggctctcggagcaactctctccaatgagggctttccgtcattgatgccggtgcagaccgtttttcttcgccttgctctcaggcagcagctagctctttgatccctgttggattggatggaggtccgtggcagtgcacccagcatgaagccaaaggtggagccgccgttggaggcttcacacgactgggaggtgaccccgctgtccggcgacaaccccttcttcaccagcgtcatgcgcaagagccaagtccagaaaccctttcagctggtcatcccggttcgcttccaccgccacctcccagaggcgcgcgcgcccgcggtgctcctctgccgcgaccagtcgtggacggtgagctacgcgggcgtcggcaagtggaagaggcttcagggggcgtggagggacttcgcccgcgacaacgggctccgcctcggggacgcctgcgtcttcgagctccttgtgcccagtactgatgcaacccaaggagacggaggcggcagcaaggatcagggggaggtggtgttccgtgtgcaggtgctccgcggcggcctgccggctgagatcacctcccggggcgccacctccgacgatccactcgtcattgtggactagatccaactgcggggagagtagtggagtggtgcagtgcagtctgtagaggagacgagacgctcaggagctaggtagcatcgtcgttgtattttgttgttgcccctgctctagctagctcgctggtcctcgtggatcttgtagccagtttctttctttcagctgcagatcttcctcttcctgtggacacggttgctccatcaccaagtgtgctgatgctaccagctttctgctgtgacagtacacagtagacgctatg

SEQ ID NO: 28911 - DNA, 727 bp, Zea mays
  Clone ID: LIB4766-019-H10_FLI
gaaaaatattccacagcaactaacggccatagaaatcgaccgagcgaatccctcgcatcgcattcgcagcctttgctgcatcacaccaccgcgaaaccccagcagccgcatcgatggcgcctaaggcggagaagaagccggctgcgaagaagccagcggaggaggagcccgctgccgcgaaggccccggcggggaagaagcccaaggccgagaagcgcctcccggcggccaagtcgtccggcaaagaaggcggcgacaaggagggtaagaagaaggcgaagaagtcggtggagacctacaagatctacatcttcaaggtgctgaagcaggtccacccggacatcggcatctcttccaaggccatgtccatcatgaactccttcatcaacgacatcttcgagaagctcgccggcgaggctgccaagcttgcgcgctacaacaagaagcccaccatcacctctcgggagattcaaacctctgtccgccttgtccttcccggcgagctcgccaagcacgcggtctccgagggcaccaaggccgtcactaagttcacatcatcttagatttgaggtagtagctattgggtggcgttggtagctgtgtctcaatttgtctgctactaatagtggtaggagtatccatgtgtagttgggttgcggtaagaattgtgttaaactggcaatatgtttgaaattgctttttatggatgtggaatagttgtgttgcc

SEQ ID NO: 28912 - DNA, 1209 bp, Zea mays
  Clone ID: LIB4766-020-B12_FLI
ccgggattgaaattttccgtttgcacctaccgagaggtgacgacgagtgaggagtctgtgtgaccagtgctcgccgtcgtcccctgcctctggccctctgctagccgctaggcgacgggcctttcgccgggcgacgggcacaccgcccctgttaccatggcagcgatgaatactggtatgggaggtttaggtggcaggccgatacatccacaagcaaatccttttggaactgcattgcagggtgctggaccaggattgatccgtactgggctagaaacatatggcggaaggattttagattcaagttctgagtttatgcagagcaatataacacaatatttgtccgaccctcagtactactttcaagtcaacagccagtatgtgaggaacaaactgaaggtcatcttgttccctttcttgcacaggggccactggacaagaataactgaaccagtaggaggaagactatcctacaaacctccagtccaggatatcaatgcaccggacttgtacatccctttgatggcatttggcacctacattgtagctgctgggtatgccttgggtgttcttggaaggtttacccctgaggcactgaccctacagttttctaaagggatacttgggtggtttctgcaagtcgtcctcatcaaaggtctgctgtactccctgggaagcggcgaagctcccttgctggacatcgtggcgtatgctggatatggcttcgctggcacttcccttgcaatggtggcccgcatcttctggagctacctttattacttcatcatgccatggttctgcctctgcacgggagtcttccttgtgaagaccatgaagagggttcttctgggcgggccaaggagctacgagagacaccccggccggaaccactacttcctgatcttcttggcggtcgtgcaattccccatgctgttctggctcggcaacatatgtggctgacctttgatcctattggtcgggccacagacctgtttcttcttcttcttcagaataggcatgtgctacttctggcttgctgatgaatcttaggtttatcgtggagatggtacagaactattagctatagatatctgggcaatcgaattataaactgtttttgtttctgttagctatagaggcgaaaagtaaaaacgatcgtttgggataggataaagatgaactgcttcgtgtgtacccttttgtgtcacg

SEQ ID NO: 28913 - DNA, 1061 bp, Zea mays
  Clone ID: LIB4766-020-G1_FLI
ccgggatttgattcgagccaggcagccagccccggagccctggacagcagcagcgaactcgaggccgctccgccacctcgccactcgcctcttctcgctctcgccaccgggccagggaagggaccatccgatcggctccgtcatggctggagctgctgctctcaatgagggtatcctttcttccgtgtccgagaaaaatgttgctgctcacccatggcatgatttggagataggaccagaggctcctgaagtgttcaattgtgtggttgagattcctagaggcagcaaggttaagtatgagttggacaagatatctggtctgatcaaggtggatcgtgtcctttactcctctgttgtttacccacataactatggtttcattccacgcacactctgtgaggatagcgaccccatggacgtcctcgtactgatgcaggaacaagttgtccctgggtgtttcctgcgagctcgtgctattgggctcatgcctatgatcgatcagggtgagaaagatgataagatcatagctgtctgtgctgatgaccctgaattccgtcactacaaggacatctcggacctccccccgcatcgccttcaagagatccgccgcttttttgaagattataaaaagaatgaaaacaaagaagttgcagtgaatgatttcctcccagccgaagatgccatcaaagcaatcgagcactcgatggacctgtatggctcgtacgtcatggaaagcctgaggaggtgatctgctgctgcttgattgtggatgctacgtaattttctcaacagctcatcgagagtaccgtagtccgtagtacggcaaatgttaacacgcacgaactggaatcatgaccaagggatattaccttctgttcatgctgaaacgatcagcagtttctttctttgcatcatatgccacgtcaaatcaaggcacttgcctctgaaatctttgtggtcaagtcaaaccagcacttcgacagaacgattgatggatgcatgtattactgctacataaatgtccatttgctcaacttcatttcttatatgagatgcctacc

SEQ ID NO: 28914 - DNA, 560 bp, Zea mays
  Clone ID: LIB4766-020-H11_FLI
ccgggcctctccggtcacaagcctccacagaactctccccgactttgccgtccactcccccgccgcagccgcgccgttcgccgggacaggagggatagtagagcaccaggatgccggcgacgccgacgatcatcggtgccctcctggggctgggcacccagatgtactcaaacgctctccgcaagctcccctacatgcgccatccatgggagcatttgttggggatgggtctcggtgcagtgtttgtgaaccagctggtaaagtttgatgagaagctcaaggaggacctcgacaagatgcttgagcgcgccaggctagccaacgagcagcgctacattgacgatgatgaatagatgcccagatttatttgccagcgacctgtattttttttgcaacatgttgtcagtacacatggccaggactgatgatcccccatcgtcttagttctctcagctttccgcatttcaactgtgatcttgtaataagatgtcggatctcatggattaccaatgtaatacaccaattatgggttcttgatctgatggttggctttctctgag

SEQ ID NO: 28915 - DNA, 756 bp, Zea mays
  Clone ID: LIB4766-022-A11_FLI
ctcgaggccggccgggggcactggtgaagtcgaagtctcgaaggttccagcgagcgactgtgtcgagcaggagagagcgcgatggggaagatgcggcagctgatctgcctcgtggccgccgtcgccgccgcggccatcctcctgacagcgtcggccaagaagtccggcgacgtcaccgagcttcagatcggcgtcaagtacaagcctgagtcatgtacgctgcaagcacacaaaggagacaaaattaaggttcactatcgtgggacactcactgatggatcagttttcgattctagctatgacagaggtgacccgtttgaattcactcttggaaatggccaagtgataaaaggttgggaccaaggattgctcggtatgtgcgtgggtgaaaagaggaagctaaagatacctgcaaagatgggttatggtgagcgaggctccccaccaaagattccaggtggagcaactctgatcttcgacacggagcttatcgccgtcaacgggaagacatccggcggtgcaaaggcagagagtgacagtgagctctgatacaatgcattggagagtttcaaagctcgggggggaatagtagcagcgtcgcatagttcattaggtgaaagggttgctgtttcctccacatagcagtttatgctatagagatgtcacagaaacaagtcaggttttgcccgatggtcgaacagtttcctttccatcttatgaaaactcgaatttgtctataaagctaccatggtcttc

SEQ ID NO: 28916 - DNA, 927 bp, Zea mays
  Clone ID: LIB4766-022-F10_FLI
ctcgaggccggccgggatccgtcctgcgattttcgtttcctctgtgtctccgttcttcaagccgaggtcgaggacccagacgcacacgcagcgcgccttctccaccgcgaagtcatcgttccgcgctgccgccgccgccctagcaaggtgttggattctgtgttgcggcttcggagtgtcattgctacccttctcctgacaacatggtttctttcgagatgaatgacctcaagaagattgggctaggcctaacaggctttggaatattcttctccttcctgggaatcattttcttctttgacaagggccttattgcaatgggcaatatcctctttctatctggtttgggtttgacaattggtttgaaatccactatgcagttcttcaccaagcctaagaactacaagggtactatctcatttgctgctggcttttttctggttcttattgggtggccctttcttggcatgctcttagaagcatatggctttgttgtactcttcagtggattttggccaacccttgctgttttcctccaaaggattcctatcattggatggatttttcaacaaccgtttgtcacatcggtatgcaaaggctccaatagcttccgtctgctgtatgggaaagaaaggagacttggcagaatcgaagttacttgtgattcttgtgacgccatgtggttattttcttcagtaattccccttccaggcctagtatgggaactcagctttgagttgtaaagaaaaattgcattggtaatctggtatgagttctggtctgctggagtggcgtctacgcctcgccatgttggctttgtaaggttccgcagctaatcaaaagtgagccgtttatcaccttgcaagtacctttcaaaatacaagctgtaaataagcttcataaatgtgcatatggtccgtcttattg

SEQ ID NO: 28917 - DNA, 698 bp, Zea mays
  Clone ID: LIB4766-024-B8_FLI
aatccacggtgccaggcgaccgccgccgcttccctactcacccttggccggcgacgacgagcgcccactacggcaggatgacgacgctcaggaacctcaagatcaagacgtcgacgtgcaagaggatcgtgaaggagctgcgctcgtacgagaaggaggtggagaaggaggctgccaagaccgccgacatgaaggagaagggcgccgatccctacgacctcaaacagcaggagaatgttttggctgagtcaaggatgatggtcccagactgccacaaacgacttgaaactgcactggctgacttgaaagcaacactggctgaactgaaggagtcaaatgagcaaggtgccgagattggagaagctgagagtacaatcgcagaagttgaagcagttgtcaagccagcagaagattaaactaaaaaaaactcttggtttgctgaactgttagcgcacatcctattttctcatattcagcccttgtgagcttattacgatatgtttgaggcgtcaaatcctgtaccattatcatcacttctgtcttgaaatttgagttttatgttcccaagttcaaagcgttactgtttgttgtctgggagagcgcacatccctggcttctccgggaagttgttagtgtaaattgaaattaagaaaaaatggacgaatttgaatacagacgaaatttgcgacggtcgatag

SEQ ID NO: 28918 - DNA, 1265 bp, Zea mays
  Clone ID: LIB4766-024-C5_FLI
atcgaggccggccgataaaattggaacgatacagagaagattagcatggcctctgcgcaaggatgacacgcacaaatcgagaaatggtccaaattttttaaaaaaaaaaaaaaatcacctcagtatttgtcagaagctcaaatactgatctcactgatccagtatggctatggcaaaggcaggcgcgccgagggtctcggcggcccagctggtgactctcgggctatcactcctctgcgctgtcgccggcccggccgccgcgcagaactgcggctgccagccaaacgtatgctgcagcaagtttggctactgcggcacgaccgacgagtactgcggcgacgggtgccagtcgggcccgtgccgctcgggcggcggcggcagcagtggcggcggtggtgcgaacgtggctagcgtcgtcaccggctccttcttcaacggcatcaagagccaggccgggagcgggtgcgagggcaagaacttctacacccggagcgcgttcctgagcgccgtcaaggcgtacccaggcttcgcccatggcgggtcgcaggtgcagggcaagcgcgagatcgccgccttcttcgcgcacgccacgcacgagaccgggcgtaagctggctctatctattaacctcgctcttcagcgcggcgcaggttctttgatttttgacccatcatgctgatcaattttttttttggaaaattttccgctgctgtgtctgtgtccacgggcagatttctgctacatcagcgagatcaacaagagcaacgcctactgcgacccgaccaagaggcagtggccgtgcgccgcggggcagaagtactacgggcgcggcccgctgcagatctcgtggaactacaactacgggcccgcggggagggccatcggcttcgacgggctcggggaccccggcagggtggcgcgggacgccgtggtggcgttcaaggcggcgctctggttctggatgaacagcgtgcacggggtggtgccgcaggggttcggcgccaccaccagggccatcaacggcgccctcgagtgcggcgggaacaaccccgcccagatgaacgcgcgcgtcggctactacaggcagtactgccgccagctcggcgtcgaccccgggcccaacctcacctgctaggctaggcggcatcggcggacggcgggggccttcaggccttgtgctcggcgtcgcatcgcaccctcgcgcgcgaaaccgagcaatagtgacaataaaacgccggggctagctgagcctgtttgttcgacct

SEQ ID NO: 28919 - DNA, 1008 bp, Zea mays
  Clone ID: LIB4766-024-G6_FLI
ctcgaggccggccgggacggcccaaagcccaatactgcagccctagcgctagcggccagctgagtggaagcatctccgcctctcgtccagcgccctgccgccctaggcaccaaaacctcgcgagccaaccgcccgccggcgccgccgtcgtaggaagagggtgaactgaggattagaggagggggaagatgtcgttccgggcgcgggagatgtacaagaaggtggtgcggcgcgtgggcggcgaggggaagctgccggcggagcttatgaattcggtgaaggacatgcttcccgacagcaacgtcatcatggggcgggccaagcgcggcatcttcgctgggcgacacatccggttcgggaacaaggtctccgaggacggcggcaacaaatcaaggcgatcatggaagccaaatgttcaggagaagcgtcttttcagctatattcatgaccggcacattagagtcaaggttaccacacatgcgcttcggtgcattgacaaagctggtgggatagatgaatacctcctgaagacaccttacaataaaatgtatactgagatggggatagtgtggaaagcaaaaatcgaaaagatgtattcagacttgggtgagatggaagtaggcttcttccctcctgaggaagaggctaaggttaaagagggctttgacgaggttcgtgctgccaagaaagactttcgtagggaagcaaaacgagctttggcaaagcaaaggcagctagaagcaagtagtgctggtgatgaccaagcgggtgaagtcacgcataaaaaggaaaaggtatcagctgctgctgctgaactctgagcctggcaatcattggatgtccctgggcaaataatgggaggcttgctacttgatacaaactggggaaggtttctagtgcaataactataccccttttcagggagcaggcggtttatgttaagccagcgtattgtaaacacttgtcacgaggtcgaaattttgtacaatttgaaaattcaagagccct

SEQ ID NO: 28920 - DNA, 1205 bp, Zea mays
  Clone ID: LIB4766-075-G4_FLI
taccctcgaggccggccggcctgctatattaaaccactttaccccccctctcgctcacgctcgacacagctcccttttccttgcttgcttattgcaagtctctgcaagaacctgctagagaggaacaagctggtatcgtcgccagcatgggtagaggaaggattgagatcaagaggatcgagaacaacacgagccggcaggtcaccttctgcaagcgccgcaatgggctcctcaagaaggcgtacgagctctccgtcctctgcgacgctgaggtggccctcatcgtcttctctagccgtggtcgcctctacgagtatgccaacaacagtgtcaaggctactgttgagaggtacaagaaggcacacaccgttggctcttcctctgggcccccgctcctagagcacaatgcccagcaattctaccagcaagaatcagcaaaactgcgcaaccagatccagatgctgcaaaacactaacaggcacttggttggtgactccgtgggaaacctgtcactcaaggagctgaagcagctggagagccgccttgagaaaggcatctccaagatcagggccaggaagagtgagctgctggctgcggagatcagttacatggccaaaagggagactgagcttcagaatgaccacatgaccctcaggaccaagattgaggagggagagcaacagctgcagcaggtgaccgtggcacggtcagttgcagcagcagcagctgccaccaacttggagctgaacccattcttggagatggataccaaatgcttcttcactggcggccccttcgcgacgctggacatgaagtgctttctccccggcagcttgcagcagatgctggaggcacagcagcgccagatgctcgccaccgagctgaacctcggctaccaactggcgccgcctggttctgacgctgccaacaataaccctcatcatcagttctaaactggatgcatgtacgagaagcttttcaagcgaactgtgaacggtggaagctggctgttgcctctagatgttcttggcttccatgacctagcttattgcggtgtgtattgttgttgccttttgtgtgtgattctccttgtgctactctacctgatggagaactaaacctaatcgattggacataatgatcaaatgctacagatcctgtgaggctgggatcaggttaaggcaaaacaagtatactgattgccg

SEQ ID NO: 28921 - DNA, 1759 bp, Zea mays
  Clone ID: LIB4767-001-A11_FLI
ccgggacgatggtcgcatttgtgcggccgtgaggcctcgacgcctcgtccaacaggagccggcgacgtcgcccccttcgtcccctccgctgcgcccacgccacgaatccattccattcccattcctccccacgccgcgcgcctccataataccacaccgccacccccatgccgctcgcccaccaccacaatccccagccctcacgcgccattggaattgacattcgattcccagcgcagctatcgagctccctttccccgccttgttggcgcgcgttagagcgcgagagagaaccggctaacccccggcggcgaagaagttcatgaaggtgctgtgcagtgcatgcgaggcggcggaggcgagcgtcctctgctgcgccgacgacgccgcactctgcgcgcgctgcgaccgagaggtccacgcggcgaaccgattggcaggcaaacaccagcgcctgcctctcctcgcccccggcggccaaggcgccgccgccgtgtcgccgcccaagtgcgacatatgccaggaatgcgacgcctacttcttctgcctggaggaccgcgcgctgctctgccggagctgcgacgtcgccgtgcacactgccaactccttcgtctcggcgcaccgccggttcttgttaaccggcgtccaggtcggccaggagctcgagcctgacgacctctccctggagcagcgagaggcgtcgtctcccccgccggcgaagagcgagccgaccccgccgctctacagcgagagcgacttcggctgggcggccggcgccggcgctaccgggagcctcacggactggtcggccgtgcaggaggagttcggctcccctgccccccgcctcgcggaggcggcgcccagggccacgccgaagcggactccgcgggcgccggctttcggtgccgggcagggccgcatcgccggcggggtcatggattggccgctgggcgagttcttccgcggcgttagcgacttcaacggcggcttcagcttcggcgagagcggcaactccaaggtcagcgcagacctctgtttttttggatcgtagatcgtgtttactgtctagtcgtctttctgacattctgccgtcgcgtttcctgtcatctcggcaggccgacagcgggaagctcggggacagcgcgggtggctccccgtactaccgctcgtcggaggaggagcgggacgccaacgagctgttcggccaggtgccggagatccagtggtcggtgccggcgctgccctccccgccgaccgcgtccggcctccactggcaacacggcggccccgacagcggcgccttcgtgccggacatctgcaccccggacggcgccggccgctgcttcccgaccgccagtggcgccgcgaagcgccagaggaaccgctagctccgcgaggacaaaggaggttcatactaccggtcgctatgttccagatcgttcttgcagctaagctaagcaacaggagatcacagtgaatgctcctactagtgaggagtacgtcgcaccgcgtcgtcgatcacatccctgatccaaggtgaaggccttgagctcgtgcgcctgtttaacggatgcatcagatctggacgatgctagaaacaacttgtgctagtgctacctagcctttgacttccaatgacgctttgaaagattgaaactgatgcgctaaccgatagcttagacattggacagtagtatgatgctgatgcttcgttttcttgtccgttcaatcaatgtaacaaagagaagttggggatgcc

SEQ ID NO: 28922 - DNA, 1890 bp, Zea mays
  Clone ID: LIB4767-001-F3_FLI
aaaaaaaaaaatcacacagcgacaccgcgtggttcgttaggaaaggaaatcgattccccccgcatctgatctcttcggtgctagagaaatataggccgccgccgcctcctccttgttcggtgaaaggtgggcagttagggttgggagatctcttgactcacgacacgaacagcagaattcgtcgagggccgctggttgctgcgagaggtccgggccttcgtgggatcttgaaaattgaatgttctaatggagtccaagggtggcaagaagaagtctagcagtagtcgttcctccctgatgtacgaagctccccttggctacagcatcgaggatatccgccctgcaggcggcatcaagaagttctccgctgcttactcgaactgcgcgaggaagccatcctgatatctctgtcgtcatccccaccctagtagcgtagaaacctcctgcattttcattttgatctccctaacctctccggctagctgctttccagtgaccaaaagatatcagagaccacctcccgtggctgtctgccatctggctctgaaacgatggcagtcctacaagctgctgcccctccccctgtctctgtgattggattcgagggatttgagaagcgccttgagatcagcttctctgaggcacctgtcttggctgaccccagcggaaggggactgcgtgcgctctcgcgtgcccagatcgactctgttcttgaccttgctcggtgcaccattgtgtccgagctctcaaatgacgactttgactcttatgtcttatctgagtcgagcctgtttgtctacccgtacaagattgtgatcaagacctgtggaactacaaagcttctgctcgctattccgaggatccttgaacttgctgaagagctcctgttgccactcgctgcagttaaatactcccgtggaacgttcatattccctgaagcacaaccttccccacacaagaacttcgctgacgaggttgccttcctgaatcgcttcttcggtggcctcaagtccggtggcaatgcttatgtgattggtgactctgcgaagcccgggcagaagtggcacgtctactacgccgctgagcaccctgaggagcctgttgttactctagagatgtgcatgactgggctggacaagaagaaagcttctgtcttcttcaagaccactgctgatggttactcgctgtgcgccaaggagatgaccaagctctctggtatctcggacatcatcccagagatggagatctgtgacttcgacttcgagccctgtggctactccatgaatgctgttcatggccctgctttgtcgaccattcatgtgaccccagaggacggcttcagctatgcaagctacgaggtcatgggcttcaacccgggctctttctcttatggtgacctggttaagagggtgctgaggtgctttggtccaactgagttctctgtcaccgtgaccatcttcggtgatcgggacaatgcgaagacctgggggacgaaactggatgctgaggcctatgcttgcagcaacatggttgagcaggtgctgccgtttggtggcttgctcatctatcagagcttcactgttacggccgaaacgacccatgggtcgccgaggtcagtcctgcatgacttcgctggtgacattgtcaagaatcgctcagagagtgatgctccctgggaagctgatgctgtggatgagagcgaggaaagagatgtaaagaagatgaaatgctgatgtggtcgacgatagatcagattcagagttgctgccactggttatcttgtgaagcagccaagcctaattatttatgccacataaacctgtgctattgtaatgtgtcacatgcttatatttgcaataaacagctctaggtggtcagctttgtctgccg

SEQ ID NO: 28923 - DNA, 1578 bp, Zea mays
  Clone ID: LIB4767-001-F7_FLI
acggccgggaacgaaccaattcctctaccattcctcctccctcctttcctgccattctcccatcccggcagggcgtctcctcctcctccctccctcctttccatcccgtttcttcgccgcctccatctccaggccgcgtcgaattcttccatccaccgcaccggtcgacgacgacgacgaggatgctgggcgcagcgaggaggcagcttggatccggtcccatgctgggacaggttttgcgaagactccgaccagcggtggcggctgaggtggcgaggggctactccgccgcggcgaaggagatgactgtccgtgatgcattgaactctgcattggatgaagagatgtctgctgatccttccgtttttctgatgggagaagaggttggagagtaccaaggtgcatacaagatttctaagggcttgcttgataggcatggtcctgatagggttcttgacacgcctatcacagaggctggttttactggcattggtgttggtgcagcttatcatggtcttcggcctattatagagtttatgacatttaatttctcgatgcaggctattgatcatatcatcaattcagctgccaagtcaaattatatgtcagctggtcagatatctgttcctattgtttttagaggaccaaacggagctgctgctggagttggtgctcaacactcacagtgttatgcagcttggtttgcacatgttccaggacttaaggttctcacaccatactcttcagaagatgcccgaggcttgctcaaagctgctatcagggaccctgatcctgttattttcctggaaaatgaattgctttatggagaatctttcccagtttctgctgaagtgcttgattctagtttttgcctaccgattggcaaagctaagatagaacgtgagggtaaagatgttaccattactgcgttctccaagatggttggctatgctctccaggctgcagagatactgtccaaggaaggaatcagtgctgaggtgatcaaccttcgatcaatcagaccacttgatagagctgctattaatgcatctgtcaggaaaaccaaccgattggtgactgttgaagaagggttcccccaacatgggattggtgccgagatatgcatgtctgttgtagaagaaagcttcgcgtaccttgatgcaccagttgagaggattgctggagctgatgtacctatgccctatgctgccaaccttgagagaatggctgttccgcaggtcgatgacattgtgcgggcggcaaagcgggcctgctacagggcagtaccaatggcagcagctgcctgattggtggacaagcctttctgttttccttccatcggttttcgctctctagccagaaacatgtagtattcataaggcgcaggcaaattggccggaacccagactccaagcgagctaattttgtagatctgccatggtgtgctttgtcccgttagtcgatatatgtggcgttatttctagattcaagtccatttgcttctctatgatttttgtacaccgctaaataatcttcttaagcccctgaatgaatgcaaaatatttaagatgttttaag

SEQ ID NO: 28924 - DNA, 1870 bp, Zea mays
  Clone ID: LIB4767-001-H9_FLI
ccgggactggtcactgtgccattgccgccgtccgtcctaggctcctagctagctagctagcaagctccgccgacgacggtacgtcaatcgagctagccctgcccatccactacactaccgcagcggcaagcaatggcgtgcggctctgctaccgccgctcgaccagcagcccgcctctggctgctggcggcggtggtggtggcgacctccttcctcgccgtcgcggcgccgccgggcgcgctggtgacgagcgtcccggggttcggcaacaagcagcagctgccgtcgaagcactacgccgggtacgtgacggtggacgagcggcacggcaggcggctgttctactacctggtggagtcggagcgcgacccggcccgggaccccgtcgtgctctggctcaacggcgggcccggctgctccagcttcgacggcttcgtctacgagcacgggccattcagctttgagccatcaggagggtcagctgggagcctgccaaagcttcatctcaacccttatagctggtctaaggtgtcgagtgtgatatacttggactcccctgccggcgtcgggctttcctactcaaacaacgtttcggactacgagactggcgacttcaagaccgccgccgattcgcacactttcctgctcaagtggttccagctctaccctgagttcttggcaaatccgttctacatagccggagagtcgtacgctggcgtttatgtccctaccctttcaagcgaagtcgtcaaaggaatccacaaaggagtgaagccagttataaactttaagggctacatggtcggcaatggtgtgtgcgacaccgtctttgatggtaatgctcttgtgccgtttgcgcacgggatggctctcatttcagagagtatatacaaggaagccagcactgcatgtcaagggaattactggaactctagcagtgcaaaatgcgacgaggcgctgtcaaaagtcgagacggaaatcgacggattaaatatctacgacatccttgagccatgttaccacgccccagctgataccaaacaagcagcagtgaccccacaggcacagagtactagcgagctgcctcagagtttcaaagacctcggcgtgaccagcaacaagcctctccctgtaaggacaagaatgcacggacgggcgtggcctttgagagctccggtaagagacggccgcgttccgtcgtggcaggagctggcggctgatgtagcttcgacttccagtggagttccgtgtatgagcgatgaggttgcgacagcgtggctaaacaacaatagcgtcagatccgctatccatgccgaaccagtcagttcaatcggaccctgggaattatgcacggataaactggattttgatcatgatgccggcagcatgatcatctatcacaagaacctcacgagtcagggctaccgtgctttcatctacagcggcgaccatgacatgtgtgtaccttacaccgggactgaagcatggactgcgtctttaggctacgccgtcgttgatccgtggcgacagtggattgtcgacgaacaagttgccgggtacacccaaggatatgaaaagggccttacttttgccactattaagggtgctgggcacacagttcctgagtacaaaccacaggaagcactagctttctacagccgttggcttgccggtgctaaactgtgaggaggcctattttgtgtgcaaaggtcatgcagtactgaatcaaacagaagttggataaagcatgcagcaataaggcagtcgaaggatcaaagtatccaacgcgccaactacaatgttgcattcattttcacatgttataccaatgcagttgctaattacctgcattgttcatgagttcacagac

SEQ ID NO: 28925 - DNA, 1712 bp, Zea mays
  Clone ID: LIB4767-002-F9_FLI
ccgggaagcattgaccccttccgccccgtccgtcatcttccccacctctctccgcactgcaggagcttgcgggcgtggcggcggccgtgaccggcgctggagatcttggacgcgcgcgacatcctggtctccgctctgtgcctctggtctccgaaggcgccgccaccctatttttttttaaaaaaaatcctaagatagtttcttcagtccgacaccgcttctagcttcccctcggcgatctgtgaagctatgaagccacctctcgagaggaacccgactaagaagcgccactcgtggtggtgggacagtcacattagccctaagaactcgaaatggctcgccgaaaatctcgaagaaatggacaagcaagtgaaggaaatgctccagctgatcgaggaggacggcgactccttcgctaagaaagcgcaaatgtattaccagaggcgtccgatgctcgtcacccacgtcgagaacttctaccgtatgtatcgtgctctagccgagcgctatgacaatgtaaccggcgagctgcgcaagaacatccctacaaggctgcagacaaccggatttttaaccagttcagagtacggttctgagctgcggaggtcgccctcaccgtctcctgagccgttacagaggtcgtggacaagggagcagagccctagggccgctggcttcggcttcttcctgagcaataggagcaatgactcgccacctgtctacaggaaggaacccgaggacgcggcatcgcagtcggagtctgacgcgaagtctgcagacggtgaggatgatggcatcgcctacacgctgcaccagagagttcttgagctagaggacgagctcaatgcgacaaaccagaaactacaagatgcaaacgagaagcttgaggttctggaggagaagagcttgaggtgccattgtgattataaagagaatggaaacggtgctcagcgaatacagaagtttcaggcaaagagggggagctggaagccgaaatcgtcaatctccaggaggaagcggactcggcaagaaggcgattcgaagaggcattgtctgaacgagatggagaaatcagcaagctaaagcaagagcttgctggtgcttctgagaagctgcagcgagagaagtacgccaatggcgtgcaggtatctgagctgcagcgatcggttgaacacatcaggtccgaactagagagagtttctgaagagaaactactgtccgagaacaagatcaaggagctggaggcagcaaacgctgaagccggtaagtacggccacgagctcacgcgagctgccgagaagatttccgaggagaagttcgcgctcgaagctgagatcctcacgatgcggcagaacattgaagatctgaaatccaggatcgagagcctcgctcgagagaagtccctgctcaaatcatggtttgaggacttggagcaagttgtggggcgaggaaggggcatcttcgccgattaaccgagtttctatccagaacatcatcggtagctagaatttagcaagttagcaacattttgttttgttttctggtactggtacccataccatcttgcgaaattgagatacgtcagtgtacttcctttttgttggctgaatcttaaacttagacgtgatggatggtggtgatgtactggcaatatatgaaatattatactgaaccgcgctcgacgtcaataataagattcctatggtgcatct

SEQ ID NO: 28926 - DNA, 1777 bp, Zea mays
  Clone ID: LIB4767-002-G9_FLI
ccggacctcgagaaacttgttgcttccccactcctgtagtaccgccgccgtgttccggtgatccgccatccgcctccgttcgccgtcccccgcttgtcccgttagtggttttcgtccttctggttcactcgccggcggactacatgctgatcgacgggatgaggtccgtggtcgcgacggtgagcggttaccacggcgacgagcggcataggcttgtaaacctcattgcggagaccggtgctagctacgtaggatccatgagcagatccatcacccacctggtgtgctggaggctcgaggggaagaagtacgacatcgcgaggaggctggggacacgcgttgtgagccactggtggttcacggagtgtctcagggaggggaggcgcctcccagaggacccctactttatgtggtgaagaagcagggccagtcccagagctgccttctcgttcccgtaaacaagtcaagaaaaatgccatcatggaggacagagttttccaagagttacctgatgatttctgggacactcctcgagctagagccagctataaagttaagcttgatgattctgattttgagtctgccctgctagaacaaacgttaagaaaaggagaaagcgtatgaagcatgtcaatacatcaacggacagagatgtcttaaaccttcaggataatgtgtcaagtgtcatggcaagacagtgccttcatatctcaagtcatagaacgtcccagagcacatcaaagcataagggaaacttgtcacgcttgcttcacaatgaagttcctatccggatgggagaaaggaacaatcttactgaaaactctgaaaatgatagtttgtctgacagcttcagtgaacctcagacttcagatactctgtgtatagaagctcaaagaaaatcaagtgcaccatcatcatcacttagacgaagtaccctagattctctatatgaatttggtgaaactagtaggcatgaaccagcaggaagaacaaaactagacaacgttgaattaagggagacttcaagaagcttacttccatttgatttgtcaggacaggaaccagctttctgtactcaggagcaagtagataaatgtagccttggcactctagctgataacaaacccatggaaaaatcatctaatatggaaaggcaaccggaattatcatgtgtcatatgctggacagatttttcttctacaaggggcatcttaccatgtggacatcgattctgttattcatgcattcaaggatgggtggattgtctggcttctaggggtaaagtctcaacatgtcccctttgcaaagccagtttcacatggatcagtaaggtggacgaggcaggcacctcagatcagaagatatactcgcagaccattccctgtgaagcttctactgatgtttttgtgccgggcaatgtaggctacgatttctctcgaccaacgtctgggcaaggagcatgctaccagtgtcacttccgtgagcccgaggagcttcttctaagctgccacgtctgcagatcacagtgggtacactcgtactgccttgatcctccgctgactccttggacatgcatgcactgcagagacctgcgtatgctgtttcaccggtatcgttagccccagttatggtactcatgtcaaaccttaattgttggaggaaattgtatcagaaggcatgaacaccatttgattactgagatgtaactgccaagttccatttgatgtctatactctaacattgattactgagggtcgatgtgagttttttttatcgc

SEQ ID NO: 28927 - DNA, 2208 bp, Zea mays
  Clone ID: LIB4767-003-B8_FLI
ccgggaaagttgaagcggaactgcagttctgtctgagtcctgatcctgactcccgaggctctcctccaaaaccccctccttaaaccctagcttccgtacgcctccgcgctcccccatggcctcctcgtcgcaatcgggcggcgccggaggcggcgggacggttgcttccaatccccgcgtctggattgtcgcgagcatcgccgtcgcgggcgtcctcgtcctcgcggaggtcgcgcgccgccgccgccggtggctgcggggcatgtccggcacggcacccgacgctggatccttctgcgaccgctttgagcttcaccctccggcgcagccgcctcctcccgcggctcgccacattctctcgggtctgaccttcgccgctagtgacaacttcgagatcgagggctacgtagccgggtttgggaacccagactggaagaaaactcatgagacggcgaggcacactgctgtggctgtcacaatgctgcggaaacagggggccacctgcgttggaaggacaatcatggatgaactaggctttggtgtcactggagaaaatttgcaccatggaacaccagccaaccctgtttcttcttcactcgtccctggtggatcatgcagtggctctgctgtggcagttgctgcacaacttattgactttgcaattggcactgatacaattggtgatgtaagaatcccagcttctttctgtggtttactttgttttaggccttcctatggtgttatatctactcttgggaccatagcaaattcacaaagtctcgacacaatcggatggtttgcacgagatccatgtattcttcatcgtgttggtgaagttcttttaccagccgctgtaggtggacttaagcaaacaaggcaatttgtttttgccgatgactgctttcagctgctaaaggtctctaatcagaaaactgtgcatgccataaaaaatgctgtccaggcattacgtggatatcagccacctaaacacatcaatattggccaatatatttattccaatgtacctagcctgaaggagttttgcgaaccagctacaaagttagaagaaggaacatcagccctgaaagcaatctccacagtgatgttgttattacagagatatgagtttaaagcaaaccacgaggagtgggttaacactgttaaacctaagcttggccttgatatctctactcgtgtgctacaagccgtgaattttgcacgggaaaacatcaaatctttgtacgcaataagaaatgaattgcgggttgcactcaagaatcttctaaaggatactggaattttagttctaccaaccacagctggatatcctctgaagagaaactctaaagaaagactatcatctggatttgaggatagaatgtacaaatttgtaggcgttgctgcactttctggatgttgtgaggtcactattcccatggaaaatctggatcatcatgtatctctttcatttgtagcagcacatggatcagacaagtttctactccgtaatatcttggatacatattctctcatccaggaccaagtagttttggcatccaagttggaaactgcaccagtaaccaatgttgatgttgatgtcaatgcatcagagcttctaaaagaaaagggaaatagcgctttcaaaagaagacagtggatcaaggcaattgagttttactcagaggccatcagtttgagtgacacaaatgcaacatattactgcaacagagcagcagcttatctggaactgggccgttttaagcaggccgaagcagattgtgaccgggccttactgttggatagaaagaatgttaaagcatatctacggcgtggttttgcaagggaagtaactttgaattacaaagaagcacttcaagatttcaggcatgctttggcattggagccacagaataaaacagctcttgcagcggaaaggaggctgcagaaactcctgaagtgatgtggggagcagcagcacatccgacttgtaaattattttgaagacttgcctggttgaaggcaattttgatcggcagcatgtgaaaggaagatgcgatctgctggataagagtcattaaactattttttgtttgccatcattcgaaaatttgtatctcacgacgattgtcagcaagttttgatatagcttcttgctatgaccgtctattaagggaaaatcttgtatatgcattgtatactacttcgatc

SEQ ID NO: 28928 - DNA, 1531 bp, Zea mays
  Clone ID: LIB4767-003-H1_FLI
ccgggaagatcagatccccctttcgctggtttctttccccttggccaagcccaaaccgtctttaaatacacccgtcgtcgtccgcatcccccgcctgccttaaccattcctcccaacaccacctcgcctgcgatcttcgtagcctccgtcgcgtcgagcatcgatcatgtcggcctactgcggaaagtacaaggatgagctcatcaagaatgctgcctacattggcacccctggcaagggtatccttgctgctgatgagtccactggcaccattggcaagcgcctttccagcatcaatgtcgagaacgttgaggagaaccgccgtgccctccgtgagctcctattctgctgccctggtgctctccagtacatcagcggtgtgatcctcttcgaggagaccctgtaccagaagaccaaggatggcaagccttttgttgatgtcctcaaggagggaggcgtcctccctggcatcaaggttgacaagggcaccattgaggttgttggcactgataaggagaccaccacccaaggccatgacgaccttggcaagcgctgcgccaagtactacgaggccggtgcccgctttgccaagtggcgcgctgttctcaagattggccccaatgagccatcacagcttgccatcgacctgaacgctcagggtctggctcgctatgccatcatctgccaggagaatggtctggtgccaattgttgagcctgagatccttgttgatggccctcatgacattgatcgctgcgcttacgtcactgagaccgtccttgctgcctgctacaaggcgctcaacgagcaccatgtcctcctggagggtaccctcctgaagcccaacatggtgactccaggctccgactccaagaaggtgactcctgaggtgattgctgagtacaccgtccgtaccctccagaggaccgtccctgctgctgtgcctgctgttgtcttcctctctggtggacagagcgaggaggaggccacccgcaacctcaatgccatgaacaagctcagcaccaagaagccgtggtccctgtctttctccttcggccgtgccctccaggcgagcaccctcaaggcctgggctggcaaggtggagaacttggagaaggctagagctgccttcctcgccaggtgcaaggccaactctgaggctaccctcggcacctacaagggtgatgctgccgccgacaccgagagcctccacgtcaaggactacaagtactgagttgcttctctttgcgtgcccgttttggaactcctgcctacgagctaggttgcggagtgtggtttgctcgttagagcttattttcggacatccaaaaaacatgcttcctatgtgggatgatggttatctttatatttgtatgttaattagtctctttgctgttaaatttcgtgtaagttggtcctgccgatggagaatcgagcagccccctttttttgttctatcaactatgctgtaatgctggctatgtatcggcaaaaacaattctatatgctgagttggagtcggcaaaaatcc

SEQ ID NO: 28929 - DNA, 1723 bp, Zea mays
  Clone ID: LIB4767-004-C6_FLI
ccgggaaagttttgtttacaccctcgcagctggctgggatcttctccctgcacctgcaaagatgaggaggagcaacaccaccaccttcgtcctcctctccgtcgcaatcctgctgggcacgtcccacgtcgttgcttcgtcgcaggaggctcagctcagcaagctcatggcgtccggaagaagcaggcccaggctcagcctcagccgaaacgggcgtgccgagaccgacacatgctcagactccggcacctacgcgccgctgcccgagcgctgcaggcgcccgccgagcggcggcaaggaggcggacaggatcaaggagctgcccggccagcccccgcgcgcctgcaggttcggccagtactccgggtacgtgacggtgaacgaggagcgcgggcgcgagctcttctactacttcgtcgagtcccccgccgacgcggcctccaagccgctcatcctgtggctcaatggagggccggggtgctcgtcgctgggatacggggcgatgatggagctcggcccgttccgtgtcaaccccgacggcgagacgctgagcgagaacaagcacgcctggaacagtctggcaaacgtgatcttcctggagtcgccggcgggcgtcgggttctccttctcgagggacgccgccgactacaagaccgccggcgacaggaggaccgccgaggacacgtacatcttcctggtgaattggctggagaggttccccgagtacaaggggcgcgagttgtacgtggcgggggagagctacggcggccacttcgtcccgcaggccgccaccgtcgtcacgctcatgaaccgccgcctccccgcccggcagacgcccatcaacctccgcggcatcttccttggcaacccgttgctggatctgtacctttacgagaaggggaagctggagttcatgtggagccacggcgtgatctccgacgaggtgtgggcgagcaccctccacaactgcagcttcctccacgacctgtgctcctccaacgcatcggagcacacgttcgagggagggaggatggactgcttcgacctctacgctccggtctgcctccagtcgcccaacggaacctactactccagcagccacttacctggctacgatccgtgcagcgaccattacgtcagatcttacctcaatagcgtcgaggtgcaagaggccctgcacgctcggatcagaaactggtcagcctgcatgccgaacttggtctggaacgattcccctgctttcatggtgccaaccatcagatacctggtcgattgtgggctcagagtatggatctatagtggcgatttcgattccatatgctcgcttaccgcgacaaggtactccgtcaaggatctcaatctagccgtcaccaaaaagtgggggccctggtacacccctaacggcgaggttggaggctatgttcagcagtaccaaggaggtttcacgctggcgtcggtgagggcggctggtcacatggtccctacgttccagccggagagatcgcttgttcttctcaaggctttcctgagtaacacgctcccgccggctgacatcgtcacgaactgaagaacgtacgaaagccttcacattttccactttgtggtcgaaatcttcagtgtctagctctacctattccaacactagtatagacgtacagtgtacatgtgttcggaaaaagcactcgttgacaatcaaaaaatcgagcggtagtgccgttcaccg

SEQ ID NO: 28930 - DNA, 1609 bp, Zea mays
  Clone ID: LIB4767-004-F11_FLI
ctcgaggccggccgggttggactgaagggtgctccctgtctatcgaatttttacaccctcactccgtcccaccgtaaataggcagacacatcagaagagagagggagcacccttccgaagccacgccaccgacatcgcctcgtgacccgacgcactgcgccagggacccagccagctagctacatccactgatccacgcgcattccccgtaccaccgccaccgcgccgcgtcacggaaggaggaggatgtcgtcgtctccctcgccggcggccacccgcctggatctggatggcaaccccatcgctcccctcaccatctgcatgatcggcgccggcggcttcatcggctcccacctctgcgagaagctaatggccgagacgcaccacaccgtcctcgctgttgacgtctactgcgacaagatccgccaccttgtcgaccccgcgccgccgcacctcgccgggcgcatctcattccaccgccttaacataaaaaacgactccaggctagaggggctcatcaagatggccgatctgaccataaacctggccgcgatctgcacgccggccgactacaacactcgcccacttgacaccatctacagcaacttcatcgacgcactcccagtggtcaagtactgctccgagaacagcaagcgtctcatccacttctccacctgcgaggtctacggcaagaccatcggcagcttcctccccaaagaccacccgctccgcaaggagcctgaattttatgttcttaaagaagatgagtcgccctgtatttttggtccaatcgtgaaacaaagatggtcctatgcatgcgcaaagcaacttattgagaggcttgtatttgctgaaggtgcagaaaatggccttgatttcacaatcgtgagacctttcaattggattggaccaaggatggacttcattcctggtgttgatggtcctagtgaaggtgtgcctcgggttttggcttgcttcagtaacaatctgctccggagagagcccttgaagcttgttgatgggggtcagtctcagagaacctttgtctacatcaaggatgctatcgaagctgtagtgctgatgattgaaaatcctgctcgagccaatggccacatcttcaatgttgggaatccgaacaatgaagttaccgttagggagttggcccaaatgatgacagaggtctacgcaaatgtctcaggagaggcaccgctggatgagcccatgattgacgtgagctcgagtcagttctacggcgaaggatacgatgatagcgacaagaggatccccgacatgactataatcaacaagcagctaggttggaacccaaagacgcctctcaaggatctgctggagacaacgctgacgtatcagcacaagacatacaaagaagctgtgaaaaggcaaatgtcgcaggcttcagcgtcgacttagatagcgtgcccctggctctcgtctagagcctagtcgcagctgttaagttgtttcggaagcgcaggtcacacatacgctagtgatcttttttttttgaggccctagatgtccgtgttgttagataaccaagggatgctgtatcagtatgatatatttgtggcagagttgatgtattccg

SEQ ID NO: 28931 - DNA, 1557 bp, Zea mays
  Clone ID: LIB4767-005-A1_FLI
ccggatgcatatggcgccagccaagatatttgttgccgccctcgtcccgtccccttcttaaaccttggcagtgcaagcccaggcagcctcatcccatcccctcaggcctcagtcgtcagtccctcacacactcactatacactgctctgctgcagcaagaaggaagaagctagcgcctccctagctctcgttgtcagcaatggccaccaccgccgcgtccagcctcctcaagtcctccttcgcgggctcccggctcccttcggccacgcgcaccaccaccccgtcgtccgtggccgtggccaccccgcgcgccggcggcggccccatccgcgcgtccatctcctcctcccccaccccgccctacgacctgacgtccttccggttcagccccatcaaggagtccatcgtgtcccgcgagatgacccggcgctacatgacggacatgatcacccacgccgacaccgacgtggtgatcgtgggcgccgggtccgcgggcctgtcctgcgcgtacgagctgtccaaggacccctccgtgagcgtcgccatcgtggagcagtccgtgtccccgggcggcggcgcgtggctgggcgggcagctgttctcggccatggtggtgcgcaggccggcgcacctgttcctggacgagctgggcgtgggctacgacgaggccgaggactacgtggtggtcaagcacgcggcgctgttcacgtccaccgtgatgagccggctcctggcgcggcccaacgtgaagctgttcaacgccgtggcggtggaggacctgatcgtgcggcgggggcgcgtcggcggcgtggtcaccaactgggcgctcgtgtccatgaaccacgacacgcagtcgtgcatggaccccaacgtgatggaggccaaggtggtggtcagctcctgcggccacgacgggcccttcggcgccaccggcgtcaagaggctccaggacatcggcatgatcagcgccgtgcccgggatgaaggcgctcgacatgaacgccgcggaggacgagatcgtgcgcctcacgcgcgaggtcgtgcccggcatgatcgtcaccgggatggaggtcgcagagatcgacggcgccccgaggatgggcccgacgttcggcgccatgatgatctccggccagaaggcggcgcacctggcgctgaaggcactgggcaggcccaacgccgtggacgggaccatcccagaggtgtcgccggcgctgcgcgaggagttcgtgattgcgtccaaggacgacgaggtcgtggacgcctgagcgagcatccacgcgccagcatgcaagcagcgtcttatctgggccggcgccatcacggggtttcttcttttaatctgggactttgttgctgttggacgaatgaattcccttcgatcggttagctttaatctgtctcgttagtgtgtcgtgttcgtgtagcaccatgccacacaccagccgtgtgctctgtcacgtgggggccactcgtggggtctcctgctgctgtcagaacgaataagagaagatggaattgtgatgaaacaataaaaatgcatggttttaattgacgg

SEQ ID NO: 28932 - DNA, 1674 bp, Zea mays
  Clone ID: LIB4767-005-B4_FLI
ccgggctactctcactagaacagaaccctaaacccgcatcccgaacatagacgccggcgatctccgccgccaccgccatgttcgggaccccatccatcactcccgctttcgggaacccctccagcaccccggtttttggcacgccatccgccacccccgcatttggcgcgacgtcgtccaccccggccttcggcaccctctcgtcgacgcctgccttcggcaccccttcgtcgactcccgctttcggtaccccgtcgtctacgccagcgttcgggaccgcttccacgacccctgcgttcggggcatcgtcgtcgacgccagcgttcgggaccacttccacgaccccgccgttcggctcgctgaatttcgggacgccctcgtcgacctcagcattcggcacgccgtcttcggcgccggcgttcggcgcactcaatttcggaacaccctcgtcgacctcggcattcggcacgccctcttcggcgccggcgtttggcgcgactccttcgccctcgccctttgggttccagcagcaggcgacgccgtgcccatctccgttcggcttgctaggaggtggcggcgcgcaaatcaccacccagatggcccccgttgcgccgctgccgctctccccgtccgaccgtgacatccaggccattgtggatgcgtacaaagaggaccccggtaatccacgttatgctttcaggcatttgttgttcagcgtgacagaaccttcccaaagggtgaagccagttgctgcctcagatattatgtgggcagaagcaatggggaaacttgaatgcatggatagtgcagacagggagaggctgtggcctcagcttgtgcagggttttaaagacctttcccatcggcttaagcttcaagatgaagtccttgtttcggacactgatagattgagcatgactcactctaatgttaaaaagctgcaaaggcatttccaagctgacacgtatccttggatccagcgattgaagcaacaagagctggctattcagagacgtcttttaaggtttgttagaatagtggaggcattggagaatcggggctaccgctgtcctttaacaaaggaggaagctgacttgtatgaaagattggttgctatattaaagcggctaaaaggacataacgctgatctttctaagagggtcaatacacttgtttcgacgtcgcgtcttctggctagcagtggtggtgctggtggttccgtttatattcccagttctgcaaaagttgatgagcggagtgttacaaagcttcttgaggccttacaacaacaaacagaggcagttgccaagctaggtaatgtgttgaagagggatatcagggacatggagatcatccagtcagaaggtacggatatggctgaagacaatgtggggagaagggcacagaaaatataagattgaagcacggtctttgtcgtaggctcgtagctaagtaataagcgggtgatggaagggatccatcgtcgctagaaggatctgagcctccaacttatttggagtaatgggccagggaaatgatatccctgtgtaactgctgcaggcaagcttgattctgcattctttgggaagctaaccatggtcaattagtagtggtatgtgtagattgtatgttgaactgaggcagtattcttagaactcagttttctcctcgtgc

SEQ ID NO: 28933 - DNA, 1689 bp, Zea mays
  Clone ID: LIB4767-005-C2_FLI
acgccccggattcttcggattccaggatggaactacacagaaatagcactaatggttcctgcctcagtgcatgtgggccactgacagactactacattcctgattacatactgaagccggcctatgaaccggtcactgttgataatgtgccatgttgtcctgtggtagtcttcatcaactctagaagtggtggccaactgggaagcagtctgataaaaacataccgtgaacttctcaatgaagcgcaggtttttgatctctcagaagagtctcctgataaggttctacatagattatacagcaactttgaaaggctcaagtctagtggtgaccatgttgctactcaaattcagaagagcttaaggctaattgttgctggtggtgacggtacagcaagttggctgcttggagtagttagtgacctgaaactatcacatccacctcctgttgctaccgtacctcttgggactggaaacaacctccctttttcatttggatggggaaagaagaatcccgctactgaccaggcagcagtgaaatcattcctgggtcaagtaaaaggagcaagagaaatgaatatcgatagctggcatatcatcatgaggatgcgaattccacaggaaggcccatgtgatcctattgctcccttagatcttccacattcgttgcatgctttccaccgcgtatcagtttgtgactctctcaatttggagggataccacacattccgtggaggattctggaattattttagcttgggaatggatgcacaagtatcctatgaattccactctgaaaggaagagaaatccagagaagttcagacaccagctaagaaaccagggtacatacgctaagcttggatttaaacattccctaaaccatctttcatcgaggaacatttctcaacttgcaaaggtgaagatcatgaaaagacctggttcccaatgggaagagctaaagattcctcgcagcattcaatcagttatctgcctcaacctgccaagcttctctggaggattgaatccatggggaacacctggcactaggaaagcacaagacagagacctgactgcaccttacgttgacgatgggcttatcgaggttgtcggcttccgtgatgcctggcatgggctcatcttgctggctcctaatggccatggaactcgtctagcgcaggcccaccgaatccgtttcgagttccacaagggagcagccgagcacacgttcatgaggatcgacggggagccatggaagcagcctctccccaaggaggacgacaccgtggtggtggagatctccaacctccgtcaggtggccatgctggccaacgacccgtgcaggtccaagagcgtgaacgagccgtcctccccgtcgtgccacggccatgaggacaacgacagcaacagcctggaggacgaggacgaggacgagtgggaggacgggaggaagaagttcggtgcggcggccaccttcaagatccccgacgaggtggacatcgctcatctcagttagaacctagaaaccccgccggctgcttctgcgtcggttggtggtgctgactgctgagtctgtgcatttcagagagtttgctgcttgctacagcctacagtgctactgccccctttttttttgttttttggttgcctccacgagctcagatttcagaagctaaccactgctgttggcg

SEQ ID NO: 28934 - DNA, 1476 bp, Zea mays
  Clone ID: LIB4767-005-C6_FLI
ccggggaactgcgggttgatatgacaaaagcaaacaattttttccccagaacctcagccttccgacatcaccgccgacgccatggccggctctccccgccacctctccctctttcccctgcgcctcctgttacttcttccgctgctcgctgcgggtaaacccgtcctcgaggacggttacacggtcaccaccttcgccgacctcaacccgctcccggcctccgggccacacccctacgcagtcctcccgcggtcccgcgccggcgacctcctcctcctcgactccgccggctccgcgctctacactatctccctctcctcctcccccggcgagccgcgcaggctggcagggggcaaacgaggctccgggttcaacgacggcgggcccggcgacgccgcctttgaccgcccgcgcagcgtcgccgtcgatgccgccgacaacgtatacgtcgccgaccgcctccatggtgccgtccgcaaggtcgcgccctccggttacactactacaattgctggagggttctcatcagggcctggtcacagggatggaccagcacagaatgctactttctcgccagattttgcactcgtttatgtcccgaagatttgtgccttgttagtagctgacagaggaaatcgaatggttagacaaattaatctaaagccagaagattgtgcacatgaaaaacaatcaggcttgggaaatacattggtgtcgttcattgcagtattgtgtacattgctcggttcattgatcggattcttagctcgtcatttttaccctgtcaatgcaggaagtctccgtcaaccactttttcagcaggatacggaagcaattcctgaggacacagaggaaggcaactccgatcagcttctgcgacataaaaagcgcagttgctagcttcgtgccctacaccctcctgctgaaactagtaagacttggttccggttatctacacgtgatgttatctagtgttaggttacagcaagaagttcaccgaaagccttctcgtcgacctgagttacacaagaccatcaatgctcctaacattggtcttaacaacaaagctcccgttcctcctactgagcaactgggtgatctgataagctttgccggagatgctggtgttaaggaggatagtggtaatgccgatagtcaggagggtaaggtgtcatcctatcatggtgacttgatggggcttccctacaccccaccgtgcagcgttaagaaaattgatcacatgatagaggccaacctatcgagcttttcaagtcacaagaaacgttgtagattaactgttagtggttgtagtgtaagcaggagggtgcatggagacaaataagagggtgtttggtttgatcatgacatgtaatgttaccctgggcattgtgggttcgtgtgatgatgcctaagaattctgttctggcataacagctttgtagcaaacccaattactccataatgttctcttattgc

SEQ ID NO: 28935 - DNA, 1935 bp, Zea mays
  Clone ID: LIB4767-005-D4_FLI
ccggggccgttctcctacatcccttttccctctctgcccctgcgaacggggcgccaccacctaccagttatctccctccgctgcgcagcccctctgttagaccgtcgttgccgccctactccaggtgggtaggtcttcttcaggcccttcgccggcgacaaacaccaccaggggacctcgccggcgcaggggagggggcaccgtcgccaggagcaaagagccagcagccgggaaccagagccgccgccacttctagagctcaatcgatcagcggctcagattttcatctgaggatgggtagggactatgaccctatggagattgacgaccagaagcagcaacagctagaagtcaccgctgcggtgccagaagggttcaacactgactatctccgtgtctactacggaaagctcttcccatatggtgatttcttcaaatggctttgctatggaaatgatggaaagcaccctggatgtgatcaatcatatgttggacgtcgagagttttcgtttacactggagaatgacatttacttgcgcttccaatcctttgatactgctactgaattagagagttctatcaaggagaagtgccctttcaagattgatattggacctgtctacagcgtagatccttcaaagcgtcacgcttacgcccaatctggcaataatgtctttgtaccagtcgagagggaactaatttttgacattgatatatctgattatgatgatgttcgctactgctgctctggagctgatgtctgcagagactgctggcccttgatgacaattgctatcaaaattttggatacttctcttagagatgattttggtttcagtcacatactatgggtatacagtggacgtcgtggtgtccattgctgggtctgtgatagcagagcaagaaagctcagcaatgaacaaagggctgcaattgctgactactttcgagtctacaagggtggtgaaaatgcactgaagaaagtatccttggctggacctgttctccatcccttccttgcccggtcatacatggatgttcttaaaaccttctttgaagataggttgctccttaaccaacaactctttgcatcagaggagagatgtcggaagatactcgatctcatccctgatgaaagtgttgctagtgaggtccatgacaagtggcagggaaatagacgatcttctatttcaaaagaagatgtcaatgcgaccagatgggagcaattgaagatgactttacagtctggaaaaaaggctcaggggcttcgtagatgtgtggaagagattgtcttctcatacacataccctagacttgacatggaggtatcaaagcacatgaatcatttactaaaagctcccttttgtatacatccaaagacaggccgtgtttgtgttccgattgaccccagtaactgtgatgattttgatcctgcggctgttccgactctatcacagcttttaggagagctgaatgctactggttttcagacagatcctgaaaataattgggaaagaacgtcccttgggaaatccatcagttttttcagaacttccttcctgcacccattgctgaaagcatgcaaggaggaactggaaagtgcatatagcgcgaagcttcagcagtccaagaattccttggactggtaaaatctacgcatgtttctgcctctgttttatcatcagcccccgttcggccctccctgagcatccaacgggtaacatggacctggtgctaggtggaatatctatgacgctgccaacccgtgttgcatgcctgggatgcatgcaaccatgtcagtttgaagttgcgtcttaggattcatgttaacatggaacaagtccgagtacatgctttgtggtatttttacctttggattagtttattaggttgaagggttataatgacggtcaaacactcgaaaatggatgcatg

SEQ ID NO: 28936 - DNA, 1050 bp, Zea mays
  Clone ID: LIB4767-006-A12_FLI
atcttcactcacctcccccatttctgtccacctcctggcctggccagccactgccgcaagcccgcaccgcaactgcagttgagtgagaccagttcgccgcccctagataatctctcctctccagggacggcaggccgtgccgtgccgtcacgacagaccagactagaccagagagagctagtgcgtgccggcgcgcggtgggagagagagactaattcgttctagagctcccgtgaggacgatggagcgcggcagttcctggcggctcacggtggtcgccggcacccttgtctgcgcgtccctcttctcgccgcccgccgccgcgctcaacgtcggcgtccagtacgccggcgacgacgcgagcaagcagcaggcgtgcagccgcacgtgcgagtcggaccactgcacgacgccgccgttcctgcggtacggcaagtactgcggcatcatgtacagcggctgccccggcgagccgccgtgcgacgcgctggacgcctgctgcatgcaccacgacaactgcgtccaggcaaagatggactacctgagcacggcctgcaacgaggcgctgctggactgcctggccaagctgcgggagggcacgtccacgttcgaggggaacaggtgcatgatcgaccaggtcatcgacgtgatctcgctcgtcatagaggccgccgtcgtcgccggcagggtgctgcacaagccctagccgcacgcgccggggcgccgggcgtggtgggcgcgcagggacatgtgtagcacagcagcctgcgccctgcggttggtgggtggcacacatctttttcgtgcttggcagggtggcggcgtcctggacggggggccgggctgcgtcggctcacatggcagctcgtgtcgttgtgtgcctactagctggctagctcccagtccctcagcccggcctaaaccgacgacaagatatatggagatcactccttaaagaaagcttctttggttttaagcaactcgtgtccctatcacactgtattaccgtacaagtataaagaaagtttcctcatgctggttttggtttct

SEQ ID NO: 28937 - DNA, 1596 bp, Zea mays
  Clone ID: LIB4767-006-B3_FLI
cccgggaaaaaaaaaacaaattcccgagacgccattctcaccatccacacaaagccacagcccaagagcagagtcgtcgtcgtcgtcgggcatggcggggttcaaggtgacgcggatctcggagggccccgtgaagccggcgtcggcgacgcccgaggagacgctgccgctggcttgggtggaccggtacccgacgcaccgtggcctggtggagtcgatgcacatcttccggtcgggcgcgggcgaggccccggccgtgatccgggcggcgctggccaaggcgctggccttcttctacccgctggcgggccgcatcgtggagggggagcagccggggcgccccgccatccgctgcaccgccgatggcgtctacttcgcggaggccgaggcggactgcagcctggaggacgtgcgcttcctggagcggcccctgctgctgcccaaggaggacctcgtgccttaccccggcgacgaccgctggcccgtcgagccgcacaacaccatcatgatgatgcagatcaccaagttcacctgcggcggcttcgtgatgggcctgcggttcaaccacgcgtcggcggacggcatgggcgcggcgcagttcatcaacgcggtgggggacatggcgcgggggctggcggagccgagggtgctgcccgtgtggcaccgggagaagttcccggacccgagcatcaagccaggcccgctcccggagctgcccgtgctggcgctggactacgtcgtgctcgacttccccacggcctacatcgacgggctcaagcgggagtacaaggcgcacagcggcaggttctgctccggcttcgacgtgctcacggccaagctctggcagtgccgcacccgggcgctggccctggacccggccgccgaggtcaagctctgcttcttcgccagcgtccgccacctgctcaagctcgaccgggggtactacggcaactccatcttccccgtcaagatgtccgcgccggccgacaaggtgctggcctcctcgctcgtggaggtggtcgacatcatccgggaggccaaggacaggatggccgtcgagttctcccgcttcgctggggaggagacggaccaggacccattccagatgaccttcaactacgagtccatctacgtctccgactggagcaagctcggcttctccgaggtcgactacggcttcggcccgcccatcttcgccggcccgctcgtcaacaacgacttcatcgcctccgtcgtcttcctcaaggcgccgctcccgctcgacggcaccaggatgctcgccagctgcgtcaccaaggaacactccgaggagttcgcccgtggcatgaaggaagacctgccctgaacttgttcttcctagcttattatatactgctgatgatcatcctgagccctggctgcagggagatgatgaatggtgacgtaaacatgcttctgtttcgttgatgctgttgttacttttggttgtattttttttggggttcactttatcttggtcaatacgtaccacattagatcacagcaagcaaattcgatcttaatttgtactacaccatttgatatgagaccgagacaataaaaaaggttatactgtcc

SEQ ID NO: 28938 - DNA, 1455 bp, Zea mays
  Clone ID: LIB4767-006-D6_FLI
ccgggctctcccacgcactccgcaattccgcatcacgcaccccaccccaccgcccgcaaccgcaagctcagattccctcccaccccaccccaccgtcccgctcactccagcccagcccgcgtccccacagcccagcgacagcgagcaccggcggcatccagccatgtgcggcggcgccatcctgtcggacatcatcccgccgccgccgccgcggcgggtcacggcgggccacctctggcccgagagcaagaagccgaggagggctgcagccggcaggaggagagcccccgtggagcaggagcaggaggaggatttcgaggccgacttcgaggagttcgaggtggagtccggcgagtcggagctcgagtccgaggacgagcccaagcccaagcccttcgccgcccccagcagcgcgctcgccagaggtggactaaacactggtgcagctggtgtcgatggccctgctgcaaattcagttaaaaggaagaggaagaaccagttcaggggtatccgccggcgcccgtggggcaaatgggctgctgagatcagagatcctcgcaagggcgtgcgcgtctggctcggtacattcaactctcccgaagaagctgccagagcttacgacgccgaggcacgcaggatccgcggcaagaaggctaaagtcaacttcccggatgaggttcctacggcggtttctcagaagcgccgtgctgctgggcttgcctctctgaaagcgcctaagatggacgttgaggaggagaagccgatcatcaagccggcagtgaacaatatgaccaactcaaacgcatatcactaccctgccgtcgtcggccacaacatcatacccgagccattcatgcagactcagaacatgccattcgctcctctggtgaattatgctgccctcgtgaacctgtcttcagaccaaggcagcaactcgttcggttgctcggacttcagcctcgagaacgactccaggacccctgacataacttcggtgcctgcacccgttgctaccttggccgccgttggtgagtctgcgttcgtccagaacaccgccggccatgctgtggcgcctcctgcgacggggaacgctggtgttgatctcgccgagttggagccgtatatgaatttcctgatggacggtggttcagacggctcgatcagcactctcttgagctgtgatggatcccaggacgtggtcagcaacatggacctttggagcttcgacgacatgcccatgtctgctggtttctactgaggctgaggcccagcgactggtgcttgtgtacatagggggggacaaagggtaagagcctgcagtaacagagattggctctttctggtacttgcaatttctatcccttcaactctttcttccgcccccgtgtttcaggaataatgttctggagatgaagaaacgcttgcgtgggcgtgcctgcaggcacgcgtgtagtt

SEQ ID NO: 28939 - DNA, 1514 bp, Zea mays
  Clone ID: LIB4767-007-B1_FLI
gtcgaggccggccggaaaaaaaaaaaaaaaaaaagtcttgccaccggctacacgctctcggagtctcggtcgctgcttgccaccgaccacaccctctctatcgacgccgcccaaatggaggccatccggaagcaggcctcaaagctccgggagcaggtagctcggcagcagcaggcggtgatgaagcagttcgggggcgggtacggcgcagacggcgtgttcgctgacgaggctgaggcgcaccagcactccaagctcgagaaactctacatctctacgcgcgcggccaagcacttccaaagggatatagttcggggcgtcgagggctacatagtcacggggtcgaagcaagtcgagatcgggaacaagttatgtgaggatgggaagaagtatggcactgagaacacttgtaccagtggtagcacactgtcgaaggcggcattaagttttgctaaggcacggtccatgatggaaaaggaaaggggtaacctgctgaaagcccttggcacacaggttgcagaaccactgagagctatggttatgggagctcctttggaggatgcccgccacctcgcccaaaggtacgacagaatgcgtcaagaatctgaagcgcaggctattgaagtttcaaaacgccaaatgaaactaagagaagcatctggaaatagtgatatgatttcaaggctagaagcggctgagtcaaagctgcaggagttgaaatcaaatatggggggtttgggcaaagaagctttggccgcaatgactgccgttgaaggccaacagcaaagactgacactgcagcgtcttattgcattggttgaatcagagagaaactaccaccaaaaggtcctacaaattcttgatcaacttgagagagagatggtatctgagcgccaaagaattgaaggggcacctcctccggtggttgagagttccatgcctccaccgcctgcatatgaagaagtcaatggtatattcatgaggaatacggtcgcagagttggtcgagaccgtggagtatttcctggctgaggcaatccaatcatatcgagcagagagcgacactgagctcaacctttcagctggtgactacatagtggtccgaaaggtgtcgaacaatggatgggccgaaggtgaatgcagggggagagctggctggttcccctacgattacatcgagaaacgagagcgtgtgcttgcaagtaaagtcgcgcaagttttctaaaactaaaacttttgccgagacatccatatattcccggggatgtgcaatgtgtattatgcttgatcgtcagaagagaagatctgtaattttgctggaagctgcctgttggatggcttgttcctgcctggccgtctgcattgttcaaattcatgtggcaggaactgaacattattaatgcttaatcttcattcttcagttatcccgttaatatgtatccatactttttgtttgtttgtttgaagcatacaacaagacgagaaatcaagcgctaattattctgtatcgacagc

SEQ ID NO: 28940 - DNA, 1886 bp, Zea mays
  Clone ID: LIB4767-007-C2_FLI
ccggccggggcccggccccatccatctcggcatctcgctcgtcgtcctcctctcccctccataaaatccgatcggcagctcctggccgctgcccactcctccccgctctggctcttcctcgcgcctcgcgcgcccacccaccttcacgcgctctcccagctagatcgaccccactggcaatcgcgcaggctcccctatcccttcctgttccttcaaaaagactggactggatcttcccagagttcccgttcggagagccgccggatcttcttcgacgaggcttcgatctgctgctctccgtcggcgtgttggggacttgcaccttatccgaagatgtcttttcggagcatggttcgtgatataagggaaagttttgggaatatatcgaggcggaactttgaggtgagaattcaccacagagggaggtctcttgggtcttcaggtgacttgcaagacaggcctgctgaagttcagcaaagcaggtgggctagccttcctcctgagttgctctgcgatgtgatgaaaaggttggaggaagatgacagtagctggccggatcgcaaggatgttgtttcctgtgcatctgtttgtacaacctggagggatatgtgtaaggatattgttagaagtccagaacattgtgcaaagctcacatttccagtatctcttaagcagcctggaccccgagacggggtaatccaatgtttcataaaaagggacaaatcaaagctaacgtaccggctctacttgtcccttagctctggtgtgcttgatgagaacgggaagttcctgctagcagcgaaaaggagccgcaggatggcgcacacggagtatgcaatttttatggactcgaggaatttctcccgatcgagcactggctacattgggaagctaaggtcaaatttccttggaactaaatttatcatctacgacacacaggctccgtacaatggcgggagagtttgcacacaggaacgtgcccccagccgtcggttgtcttccaggaaagtttcaccaagagttccaagcggcagctaccccgtcgctcaggtgaactacgagctgaatgtgctgggaacccgagggcccaggcggatgcagtgcgctatgcattccatccccgcatcagcggtggagcccggcggcgtggtgcctgggcaaccgaaagagctcctcccgaggctgttcgacgagtccttccgcagcaccgcaacttcctctttctccaagtactccgtcgcggacagctccatggacctgggcagctgcccgttctccgaggtcgaggtgggcgggggaagtctgcgagaaggtgacgagtcggagaaggagaggccactggttctgcgcaacaaggcgccgaggtggcacgagcagctgcagtgctggtgcctcaactttcgcgggcgcgtcaccgtggcctcggtcaagaacttccagctgatagctcctgcaaagacgcagccgcagccgcaggcctccggccccccgccgccgccgccgccgtcgtcgtcgtcgtaccatgacccggtgatcctgcagttcggcaaggtcgggagggacatgttcaccatggactaccggtacccgctgtcggccttccaggccttcgccatatgtctgacgagcttcgacaccaagctggcctgtgaatgaatgaatgaatgaatgaatgaacgaacgaacggtgagagagtcgttcgttttatgtgttccaaagtgataagcattctgagccttggcatgtaaataatttaagaagtaggtgtttgattcaagtattgtattgtttcgtgagacaagacaatgttgcttctgaaacctaaaagtgtttcttggtcagtgaagcaaatctactaaactagctgcctgcaattatttattct

SEQ ID NO: 28941 - DNA, 1727 bp, Zea mays
  Clone ID: LIB4767-007-E2_FLI
ccgggaccgccctgtgcctgcagctgcaccctgcagcgctcactcgctcactgactcactcccctcccctggcctcctcctcctcctcctctctctctctccactatctcccacagccgaaccaacatgcaggggcgcagcagggacgccgccaccgtcgctgcagcggtggcgtgcgcagctgtgctgctcctcggcgacgcctggaccgtgtcggcgcaggcggcggcggaggaggacaagataagcgccttgccggggcagccaccggtgggcttcgcacagtactccggttacatcccggtggacgccgcggggaagcgctccctcttctactacttcgccgaggcggaggcggatccggcggccaagccgctcgtgctctggctcaatggagggcctgggtgctcatccgtgggagtgggggcgttctcagagaatgggccgttcaggcctagcggcaatgcgctaacgaggaacgagtacagctggaacaaagaggccaatatgctgtatctggagagccctgcaggggttggcttttcatactccactgatcctgccttctacgagggtgttggtgacagcatgacagccagagacaacttgaagttcttgcaaggctggttcgccaggttccctcagtacaagggcagggacctgtatatcacaggagagagctacgctggccactacgttccacagttagcccagcgcatggttgagttcaacaagaaggagaagctattcaacctgaaaggcattgctcttggcaaccctgtgctggagttctccaccgacttcaactcgcgggccgagttcttctggtcgcacggcctgatatcggactccacctacaacatcttcacgacggtgtgcaactactcgcggtacgtgagcgagtactaccgcggctccctgagcacggcctgcgacagggtgatgagccaggtggcgagggagacgagcaggttcgtcgacaagtacgacgtcaccctggacgtctgcatctcgtcggtgctcatgcagtcccaggtcctcgtccctcagcaagggagcagggagctggacgtgtgcgtggaggacgagacgatgcggtacctgaaccggaaggacgtgcagcaggccatgcacgcgcgcctcgacggcgtgcagaggtggacggtctgcagcagcgttctggagtacaagcagctggacctccagatcccgaccgtgaacaccgtgggcgcgctcgtgaaggcgggcatccccgcgctggtgtacagcggcgaccaggactcggtgatcccgctgacgggcagcaggacgctggtggggcggctggcggccaggctccggctcaacgccacggcgccgtaccgggcctggttccaggggaagcaggtgggcgggtggacgcaggtgttcggcggcggcgcgctgtccttcgccacggtgcgcggcgcgtcccacgaggcgcccttctcgcagcccgagcgctcgctcggcctcttcagggcgttcctcgccggacagcagctgccggaatcgttccagtgacgacggaacgtgcctcttcctcgtctagtgtatgttcattgtaagcgtatgtacgtgcagctgaccgtctgtcgtcatcatccggccgctcgacactggcaaaaacaacccaaatgggttcttctccaagtgtaatcaggacgaaaataatatcattggaaggaatgagactgtgtgtcgtcggg

SEQ ID NO: 28942 - DNA, 1496 bp, Zea mays
  Clone ID: LIB4767-007-H12_FLI
ctcgaggccggccgggaaaaaaaaaaacaagctcgaccaccaacccagctcgctcgtcccagctgatcaggtcgagcacctagtagcgacctgctcgatcatcagtgtagagtgtcggtaggtgtctgtctctcttggtggctggttgcaacggtcatggcgacgtcgtctcgtcgggtgcccttgctgctgctgtgcctgggcgtgctggtgtcctgctccttcgcggcgggcagcttggaccaggagctggacatcacgtggggcgacgggcggggcaaggtccttgacaacgggcggctgctgacgctgtcgctggaccgcacgtccggctccgggttccagtcccggcacgagtacctgttcggcaagatcgacatgcagctgcggctggtgccgggcaactccgccggcaccgtcaccgcctactacctgtcgtcgcagggcggcgcgcacgacgagatcgacttcgagttcctgggcaacgtgtccggcgagccctacacgctgcacaccaacgtgttcacgcgggggcaggggcagcgggagcagcagttccgcctctggttcgaccccaccgccgacttccacacctactccatcctctggaaccccaagcacgtcatgtgagtcgtcgttcgttgctctgcttccttcttctgcattcctatcgcctgcagcttcttcatttcatggttggtgtccatgctcttttgctcctccgccagcttcatggtggacgacatgcccatcagggacttccgcaacctggagagcaagggggtggcgttccccaagagccagccgatgcggctctactccagcctgtggaacgcggacgactgggcgacgcagggcgggcgcgtcaagacggactggtcccacgcccccttctccgcctcctaccgcgggttcaaggccgacgcttgcgtcgccgtcgcgggcggccggacccgctgcggcgccaccgtcggcaccgagggcaccggcgcccccgcctccgccgccggcgccggggactggtacaaccaggagctggacctcaccctgcagcagcggatgcgctgggtgcagcgcaagtacatgatctacaactactgcaccgaccccaagcgctaccagcagggcctccccgccgagtgctccatgcagtagcgcccggttattcctcgcccgtccaacaatggcgcgcgcgcgcgtgtgtgtgcatgtggtccgctctactgctaccgctacgacgatcggtgtcgatcaccggatcaaggcaagacgaaaggcatcgaaacatggtagataaataaaggacttgacgatttgtaacgcagtagctggtgcgtgcgtggtgtggtggtaagaaattcttctgctgcctgtgttcttgtagcctcctcgtcctcgcccaccctgttggtacgtgtacggtgtacgtagtctgccgccgcgcgctgttcgtgttcgtcgtgtctcgtgtctgtattatactcgtcctccccatc

SEQ ID NO: 28943 - DNA, 1095 bp, Zea mays
  Clone ID: LIB4767-009-A5_FLI
ccgggaaaaaccaaacacccgtagcctccgccgagagtcgcagccgccgacacccagtcgcccaccgaggcaccgacccgaccccaaccttggagctgctgtgccccggcggtccgtctctggccagagctccgccaccgcccgccgatcagagctccgcctccgagacgacgcgcctccccccagtggctcaggccgcctgcccgcctggcaggacgccgcgccgagctctttcccggcagctgctcgcccgcgccgatcttttcttcggcaaccgcgcgcccgcgtcgagctcctccccgtccccggcagccgcgcgccagcgccgagctcctccccgcggatccgcctctgctcagtctgagctccggccagccgcgagctccgtcgaggcgtcgacgccgaggcccagctccgcccgtgagtgcctgtgccggattcagcaaacagaaatttgctctgctggttagatagatggaggtgccaatgaacaccacgcaatctggtcctcacttccctgtgcagcatcggtccctctcgttagacatcaagggaaataaaacagatattgttatcaataaatacgaagatacctttctggtgattgtgacccaaatcggctgcatgggaaccatactagctgccaagaaagatgaaagtgttttctccgacccaacctacaacgtgtctgttctttttgggaagagagatgagccactcctactagcttgcgcacgtcaacttattgagcacataagtggcagtggctcagcccggtcattggtgatttctctgggtctgaaagatcattctcagggaacgctgaaggatattactgtagctgtgatcgagaatcgcctttggtgatgattgaatagctgagctgggcatgggaacgctgaaagatactgtttagcattgcgcaataggagccatcgtttataccatgcactaaattctggtacttttgtagttagaccttctatctactgggattaacaaaaggtgggtttaagctgctgtcaaaattggagtgtcaactttaacgctaaacaaaaggcaatgtacactggtaaagcacttctgagtcgaatc

SEQ ID NO: 28944 - DNA, 1673 bp, Zea mays
  Clone ID: LIB4767-009-F8_FLI
atcgcttcagctcggcgtcttcacaaacgccggcgcaaactctcgcccgagcccgacagatcttcaattccccattccgcccaccgatcgaccttcacgccagtctcggtctcttccgaaggcgtcgcgcgcggttgtttgagaggagaggaggaagatgagggagtgcatctccgtccacatcgggcaggccggcatccaagtcggcaacgcgtgctgggaactttactgcctcgagcacggcatccagcctgatggccaagtgcctggagataagaccgcgggacatcacgatgatgccttcagcaccttcttcagccagactggtgctgggaagcacgttccccgtgcaatcttcgttgatctagaacccactgtgatcgatgaggtgcgcactggcacgtaccgccagctcttccaccctgagcagctcatcagtggcaaggaggatgccgctaacaatttcgcccgtggccactacacaattggcaaggagattgttgatctgtgccttgaccgtatccgcaagcttgctgacaactgcaccggcctccagggcttcctggtcttcaatgccgttggtggtggcactggctctggccttggttctctcctccttgagcgcctgtctgtggagtacggcaagaaatccaagctgggcttcactgtgtacccatctccccaggtgtcaacctctgttgtggagccttacaacagcgtgctctccactcactcactcctggagcacactgatgtctccatcctgctcgacaacgaggccatctatgacatctgcaggcgctccctcgacattgagaggcccaactactccaacttgaatcgccttgtgtctcaggtgatctcatcgctgactgcttctctgaggttcgatggtgccctcaatgtggatgtgaacgagttccagaccaacctggttccttacccgaggatccacttcatgctctcctcctacgcaccggtgatctcttctgcgaaggccttccacgagcagctgtctgtggcggagatcaccagcagcgcgttcgagccggcttccatgatggtcaagtgcgacccacggcacggcaagtacatggcttgctgcctgatgtaccgcggcgacgtggtgcccaaggacgtgaacgccgcggtggccaccatcaagacgaagcgcaccatccagttcgtggactggtgcccgacggggttcaagtgcggcatcaactaccaggcgccgacagtggtgccgggtgccgacctcgccaaggtgcagcgcgcggtgtgcatgatctccaactccaccagcgtcgtcgaggtgttctcccgcatcaacagcaagttcgacctcatgtacgccaagcgcgcgttcgtgcactggtacgtcggcgagggcatggaggagggggagttctccgaggcacgcgaggacctggccgccctggagaaggactacgaggaggtcgccgcagagggcggcagtgatgacggtgacgaggaggaggaatactgatctgcttgcatgaatctgtttggctgtcgagccaggttgtggtgttgaaaaacctttgtttgtgtcctggcccccctgggtaatgtttgggtgtttccttccatcatcacttgctgaactgctctagtatttgcatttgtaattgaagtctgtcgctttaagt

SEQ ID NO: 28945 - DNA, 1501 bp, Zea mays
  Clone ID: LIB4767-009-H3_FLI
ccgggatcaattattccaccgagccgaccgatcgagacctcgctcatctttgtagtacacccgcaccctccgcgtcgaacacccgatccggacaccgctccaggctccacctctctcccatctcacgccaacgctcactggaccattcctccgtgctggggagcggcggagagctatccacctcgtctcaggcaccctctggcgtccccctccccccgccgcgtgccggcgagccgcggagatccggggttctgacctcgcctccttctgctgacttgtgaacgaggcagcatcatagttcagtttggaaacatgtcatcgaagaagatagagttggatcacaaggacatggtccatgattctgccatcgactactatggcaagcgccttgccactgcctcttcagacttcaccgtgaagatcgtcaacattggtgctgcaaatgccccatcccaggtccttgcaacgctaagtggccactatggtcctgtgtggcgtgttgcttgggcccatccaaagtatggtgcaatccttgcatcgtgcagttatgatggccgtgtcattatttggaaggaggatgcacgaggcaattggtctcaagtccacgtcttcagtgacaacaagtcatctgtcaactccattgcttgggctccgtatgaggttggcctctgccttgcctgtgcatcttctggtggaagaatatccatcttgacgatgcaagctgacgggggttgggatactgcaaccattgagcgagcacatcctgtcggtgcgactgccatatcctgggcccctgcaacagcgtcactagctggtgcaggggagcttgtttacaagcttgtctcaggagggtttgactctgttgttaaggtctggggattcaacaatggtagttggaagctggagagtgctcttatctctgacatgcacacagattgtgtgagggatgtcgcctgggcaccagttttgggattgtccaagtcgaccattgccagtggttcacaagacgggaaggttgtcatctggaccaagggaaaggatggagacaagtgggagggaaagctcatgcgtgacttcggttcccctgtctggagggtgtcgtggtccttgactggcaacatattatgcatagctgctggcgagaacaacataaccctctggaaggaagggtcagatgggcagtgggaggaggcgatgaaggttgaaccataggatgaccggcaaggtttctgaatttcttgtagatccatgtttcgacaaagacaaagcttgctactgttttactagtgtttcgacaaagtttaagtttgccattgtgttttactagtgtttcctgcggatccatgtttcgataaagacaaagcttgacattgtgtttccatagacactcaaattcacatattttagtaattcctgatgagcaattatgctcttggatggatctggtgcgctttagactgacaaattttttattcaggaaacactagtaatgttacctatt

SEQ ID NO: 28946 - DNA, 1881 bp, Zea mays
  Clone ID: LIB4767-010-E6_FLI
ccggggtcgtgtcgtccccccggccccgaccccctccgttggcgaacgactccgggctccactgtcgctctcgctcccttccctcccacgcaatggtggccgatcgcctccgcctcgcgctgctgctctccgcgtgcctctgctccgcgtgggcgcgcccacgcctcgagccgaccatccgcctgccgtccgagcgcgcggcggccgacgaaacggatgacgacgccgtcgggacccggtgggccgtgctcatcgccggctccaacggctactacaactaccgccaccaggcggacatctgccatgcataccagatcatgaagaagggcggacttaaggacgagaacatcgctgtcttcatgtacgatgacatcgcgcatagcccggaaaatccgaggcctggtgtcatcataaatcatccccagggtggcgacgtctatgctggggtgccaaaggattacactgggcgagaggtcaacgtcgacaatttcttcgctgttctgcttggcaacaaaactgctctcaggggtgggagcggcaaggttgtggacagtggccccaatgatcatatatttgttttctacagtgaccatgggggtcctggcgtccttggaatgcctacgtatccatatctctatggtgatgacctcgtagatgtcctgaagaagaagcatgctgccgggacctacaaaagcctggtcttttaccttgaagcatgcgaatctgggagcatctttgagggcctcctgccgaatgacataaatgtgtatgcgaccaccgcgtcaaatgcagaggagagtagctgggggacgtactgccctggcgagttcccgagccctccaccggagtatgacacttgcttgggagacctgtatagtgttgcttggatggaagacagtgatttccacaatctgcgaactgaatctctcaagcagcaatacaacttggtcaaggataggacagcggttcaggatacattcagctatggctcccatgtgatgcaatatggttcattggagttgaatgttaagcatctgttttcgtacattggcacaaaccctgctaacgatgacaacacgttcatagaagacaactcgttgccatcattctcaaaggctgttaatcagcgcgacgctgaccttgtctacttctggcagaagtaccggaaattggcagacagctcacatgagaaaaatgaagctcggagggagttgcttgaagtgatggcccacaggtctcatgttgacagcagtgttgagctcattggaagccttctctttggctctgaggacggtccaagggttctgaaagccgtccgtgcagctggtgagcctctcgtcgatgattggagctgtctcaagtccacggttcgtacttttgaggcgcaatgtgggtcgttggcgcagtatgggatgaagcacatgcggtccttcgcaaacatctgcaacgctggcatccttcctgaagcagtgtcgaaggtcgctgctcaggcttgcaccagcattccttccaacccctggagttctatccacaagggttttagcgcctaagaatcataaggtgaggcgaaatatttcagccgctccaccgcaacgaactggtttacattaccagtcctcaggggggtcctagttcttgaaccataggtgaagcagacttataccactactatagctgttccaccgttccagattacatagctatgcccaatttccggtgtacatatatagtcggaaagttatttggcaattgtattggtcgttgctgtatatattccctatagtttgttagcagatgtgtagtttgtaattccataaaaatgaagaacgcgttactgctatttctatgtagccgactgatgctcatgtgaaactttacccg

SEQ ID NO: 28947 - DNA, 1644 bp, Zea mays
  Clone ID: LIB4767-010-F2_FLI
ccgggcagaagagaaatgacccgtttcgagccaaggcatcctcgcgtctcgctctcacccctcctcggcgcctccccgaccacagtgtaaagcccctgtcccttcctccccgactcgcccctcatggcgaggaggcgctgctgatgcctcgcggcgtcggatcggacgcggcggccacgacacctagccgcttgcggtggcgctcgcctacgcgcccaatccgccgacgctgctcctcggatcccccgagagattcaggccccgtctcgcctcgtcctgcctagtgcctaggtgaggctctggcctccaaaggtgcaaggataggcaacaagtgttcaaaaacacgtctgtggatcaattgacttgtatttcagcctttcagttgaggattaaagtggaggtttaagaagcttgagaattggcatcatctcaagaatacattgaagtgcaagatgccaaaaataaagagtctatctaatgcatgccgagtatcattttctccagaaggtcccatatctgaagaggcgcttgagagagtccgtgcactgttagatatgataagacctctagatgtcggcctagataatgaagcccaaattgcacgcaattggagtagttctacgcgtccatcaaatgggagacgaggacgcaatggggctaaccagttcgcggctccaatcaaatatttgcacattcatgaatgtgaaagcttctctatgggtatatcttgtatgccaccttcttcagttatcccacttcataatcatcctggaatgactgtacttagcaagcttctttatggacgtctgcatgctgaatcttatgactgggttgacatacctgatcatccaattgatcaattacaaacaaggccagccaagcttgttaaagattgtgaaatgactgctccagagacaactattctttaccctaatgcaggtggtaacatccacactatcagagccattacaccttgtgctctctttgacgttctttctccaccatactccgctgaggatgggcgacactgttcatacttccgaaagtctcagatgaatcagccacctgttgttttgcctgctgagatagatagctctcaggtagtttggttggaggagttggaggaccatcagcccccagaaggctttgttgttgcaagaggtctgtataaaggccctgtaattaggagataatttgctttggagcgcagaatcaaccaagctgcaaatcagctgaaagacgatgcaggcttgtagtgcctagtgcaagcatcgtcaggtcatgtgcagcctacggtttatttgtacatctcaaagtgatctttgataatttaacagcagttttacagaacaggaacggatgttttttgtttggctgccattttaactttgtcccactgctggagtatctctgacctagttatggagctcttatcagatcaagaccatggtacttttgatgtaccagcatagctattgtcatgatgtaccagggaagatcaagacaagtgtttccatttggtgatttcagaaagaatttggtgtggggctaccattttgtctgtgtaatagcagcattactattttggagcaagactgtaaattacgggagaggaactataataatatcattaggtttatcatg

SEQ ID NO: 28948 - DNA, 1721 bp, Zea mays
  Clone ID: LIB4767-012-A2_FLI
ctcgaggccggccgggacagaacagatcccttctcaatcgcatctgggtctggcagtcttctcgcggttgcaggccacaaacaactgctcctcctgcattccccctttccccttccgtccgctgcattcctgctctcttgctctcctcgctctcagaccacagttgccgccgccgccgccctaagccagggtgctgaggctttcgttggcctcttcgccggcagcgagcacccaccagcagttctgtagaaatggctgatggtgaggacatccagcctcttgtctgcgacaatggcaccggaatggtcaaggctggttttgccggcgatgatgcaccaagggctgtattccctagcatcgttgggcgtcctcgtcacaccggtgtcatggtagggatggggcagaaggatgcatatgttggtgatgaggcacagtccaagagaggtattctcacgctcaagtacccgattgagcacggtattgtaagcaactgggatgacatggagaaaatctggcatcacactttctacaatgagctccgtgttgccccggaggagcaccctgtgttgcttactgaggctcctttgaacccaaaggccaacagggagaagatgacccagattatgttcgagactttcaatgttcctgccatgtacgttgcaattcaagcagtcctgtcactctatgctagtggccgtactactggtattgttctcgattctggtgatggtgtgagccatactgtgcccatttatgaaggatatgcccttcctcatgctattctacgtctggatcttgctggtcgggacctcaccgactcgctcatgaaaattctcactgagaggggttattccttcacaacctccgccgagcgagaaattgtaagggacatcaaggagaagcttgcgtatatagctcttgactacgagcaagagttggagactgccaagaacagctcctcagttgaaaagagctatgagctacctgatggccaagtaatcaccatcggtgcagagagattcaggtgccccgaggtcctcttccagccatccatgattggtatggaggctgctggaatccatgagacaacatacaattcaatcatgaagtgtgatgtggatatcaggaaggacctctacggcaacattgtgctcagtggaggttcgactatgttccccggtatcgctgatcgtatgagcaaggagatcacttcccttgcaccaagcagcatgaagatcaaggtcgtcgcaccacctgagaggaagtacagtgtctggataggagggtcgatcctagcctcgctcagcactttccaacagatgtggatatccaaggaggagtatgatgagtctggcccggcaatcgtccacaggaagtgcttctaggttccgcaagttcctcattgttatctagtctcaagttatgcccccgtcatttctcgagatatgtgtggcagatttgcctgcgacgtttattttcatcggacctgagtcttctcggggttagcagctacctttgaatgttgtggctccctgtgcgagcgtgctgtgtcgtatcacctggtttgtgagattagttgttgtcaaacttgcttggtttgattggttgtgcgtttaagagctgatagttatatacatatactgctttgctataccgccgctatatctatgtagcctttatgtatgtatctggattctgaaatgcaagaatgaacttcgaac

SEQ ID NO: 28949 - DNA, 1595 bp, Zea mays
  Clone ID: LIB4767-012-A7_FLI
ccaggagccgacacacacaccgcaaaaggcccacgagaagaccccgccggcccgccctctccctccccacctctactccacctccaatcctccccgttgctgtcccgccggcgtcgaagctcgagagaagggtgagcaccttgccgcgaggtgtgtccggtgagctagctagggacgcgccagctcgtgctgatctgacctggaagctctggaggcgatgaaagcgctcggacgggcgatgagggatgaaccaggtaggaggaagaaggacgcatcgtggcggatcttttcactgaaggagcttcagtcagcaacgaacaatttcaattacgataacaaggtcggcgagggtgggtttggcagtgtctattggggccagctctgggatgggtcacaggttgctgtgaagaggctcaagagttggagcaacaaagctgaaacagaatttgctgtcgaggtggagattctggcacgggtgaggcacaagagccttttaagcttgcgcggatattgtgctgaaggccaggaacgcttgatagtctatgattatatgccaaacctgagcatacacgcccaacttcatggacagcacgcagcagagtgcaatctcagttgggaaagaaggatgaagatcgccgtcgattccgcagaagggatcgcttatctgcatcaccatgcgacgccacacatcattcatagagatgtcaaggcgagcaacgttctcctggattcgaatttccaagctcgggttgctgactttgggttcgccaagctagttccagacggcgcgacgcatgtcaccacaagggtgaaaggcacactcggttatctcgcaccagagtacgcgatgcttgggaaggcctctgaaagctgcgatgtcttcagtctcggagtcatgctcctagagcttgccagcgggaaaaagccagtggagaagcttaaccccaccacgaagcgaaccatagctgagtgggctcttcctctagctcgggacaggaagttcaaggaaattgccgatccaaagctcaatggtagcttcgtcgaggacgagctgaagcgaatggagctcgttgggctcgcctgttcccaggacaagccagagcagagacccgtaatgtctgaagtcgtcgagctgctcagaggagaatctaccgagaggctttccaggctggagaatggtgatctgttcaagcctgatatctcgttccatggctcatccggacctgatagctcggactgcgtcacggaggagaggagtcccaaggcagatgcgacagaggaggctgttgattcaagtgagacggttccctcagcaaggtagtgtgatgcacggtggtgtactgtcagtaggtgccctgagctccttgcctgggggaaatgtgtttatcagttcatttttgtggttattccttgctatttagcaagttaatctgggagcctccttgcccggttctcttgtgtggtgtcattccttcgtgttggcatggttctatggcttgtaaaattctgtatgtaaatctgggcctggttccatcccttcgtgtagcaagcagttcactgcactgtggttagcgttttagctacttcagtccagt

SEQ ID NO: 28950 - DNA, 1611 bp, Zea mays
  Clone ID: LIB4767-012-B2_FLI
ctcgaggccggccgggaggccgctttgattctctagcgcggctggggactgggggtctagggtttaggcttccaaaaatcaagcaaagaaaatattcgcagtgttgcgcacttcgcgtctcgataaagccgaccgcccgacccccaactgttccgtcaaagcagagtctgcccctccccgcgccgttctttttggttccccactcctcagtccccgccgccgccgaaacccgcagatggaggtcgtcgtcgccgcgaagcagaaggcgaagaaacacatacacctcttctactgctcggaatgcgaggagctcgccctcaagatcgccgccagctccgacgccatcgagctccaatccatcaactggcggagcttcgacgatgggttcccgaacctgttcatcaacaaggcgcacgacatccgtgggcagcacgtggcgttcctggcctccttcagctcgccgtcggtcatattcgagcagatctccgtcatcttcgcgctgcccaagctattcatcgcctcattcacgctcgtgctgcctttcttccccacgggctcattcgagcgcgttgaggaggagggcgatgtcgccaccgcgttcaccctcgcgcgcattctctcgatgatccccaagtcgcgcggcgggcctaccagcgtcgtcatctacgacatccacgcgctccaggagaggttttacttcggggacgatgtcctgccatgcttcgagacagggatcccgctcctgctgcagcgcctccgccagctcccggacgcagaaaatatcaccattgcctttccagatgacggtgcgtggaagcggttccacaagctgttacagcactttccaatgatagtctgtaacaaggttcgggaaggtgacaagagaatagttcgtataaaggaaggactacctgaaggccgtcatgttgttattgttgatgatttagtgcaatctggggggactcttagagaatgccagaaagttctagctttgcatggcgctgcaaaagtcagtgcttatgtgactcatgctgtgttccctaagcagtcatatgaacgtttcatggcgtctagttctgctgggccaggcgaccaatttgcttacttctggatcacggactcatgcccacacacagtaaaagctattgggcaaagacctccatttgaggttctgagcctcgctggctctattgcagatgctcttcagatatgagcgtacactggtagatgggcatgggcttgaattgttgatgtccaccagattgaaacttgtactatgagaggtggaatgctcccgcttttcctaaatgtaagagttggtttccagttcctggaaaagcaaataatgtgtagtaagttaaattaagcacctgaaggttccataaacagccctgtggtttgtaataaaatcaggcattggatactcaattgttgacagctgcgtatctgtcaatgttcacttctgtttgaagtgcgcgagaccagtgctttactttcctgacccgtctgagtatcggtttagcaacttcaggtactgggctttgttgtgaacaaatagtgcaatgtaactgaacttgaacctaattgaatttctattagattggatggccg

SEQ ID NO: 28951 - DNA, 1502 bp, Zea mays
  Clone ID: LIB4767-012-D1_FLI
gaaactgccactttgccaggcgggcgggttctgcggtcaacagagagaacagcactgtctccgtctatactcgtcaggcatcatcaccgccttctcccgaggctttcgagatggcggcggcggaagcttcgaggacttcggaggcccgccgtgacgccgtgttcgggcggtgggtcgtcttctcgccggcgcgctcgcgccgccccaccgacctcaagtcccacaaccccaccaaccctagcccgggcccaggggccgacgcgccgcccaagccgtcctgccccttctgcgccggccgcgagtccgagtgcgcgccccagatcttccgcgtgccgcccgacggctcgctgccgtggcggatccgcgtcatccagaacctctaccccgcgctgcgccgcgacgtggacccgccgccgcgccgcgacgtggacccgccgcctgtgccagaggcagagggggatgtctcctcggacgagcctggggagcgcgccgtccccggcttcggcttccacgatgtggtcatcgagacaccgcgccacgacgtgcgcctctgggacctggacgccgagggggtccgcgacgtgctgctcgcctacgcggagcgcgtgcggcagctcggggagcaccctgcggtgcagtatgttcaggtgtttaagaaccatggggcatctgctggagcttcgatggcgcattcacacagccaaatgttgggaactccctttgtccctccctctgttacaactcggcttaactgcatgaaggagatttttgacagatcagggaactgtagcctttgtgagattaggcccaaagatatcctgatcagtgaaacacctaatttttctgccattgttccttttgcagcatcatatccatttgagatatggattattcctcgacaacatatttcttattttcatgaaatagatcaagataaggcactggaccttgggtctctgttaaagactatgctgcaaaagttgtctaagcagcttaatgacccaccattcaattttatggtccacagcgcaccatttaagatttcatcatcctgcctgccttatacacactggttcctccagattgtgccccagttaagtgtagtaggcggatttgagcttggaagtgggtgctacatcaacccagttttccctgaggatgctgcaaagattctcagggaactcgactgctcagtctagtggtggtcgacgtctaaccttttaactagataggaacgagggatgtgttcctctgtacttttctgggaagcaaaaataccgtgctaataattcaagcagacagctaacttgattatgtaacatcaggccctgctttggcgagggtgatctgctggggtatctttcttgcccttgcttcaaacaggaagcatgccaagttgggctttcttttttggccctgagattgatgttgcctgtctgtacagactagagagtggttataaacagagttttcgtttgacgattaataagttgtttgatatc

SEQ ID NO: 28952 - DNA, 1607 bp, Zea mays
  Clone ID: LIB4767-012-H11_FLI
ctcgaggccggccggggaactcttttattagctgcttgatgcgatagagactggatcaagttttaagcttcacctccagccatgggtaaggagaagtcccacatcaacattgtggttattggccatgtcgactctggcaagtcaaccaccaccggccacctgatctacaagcttggaggcattgacaagcgtgtgattgagaggttcgagaaggaagccgctgaaatgaacaaacggtccttcaagtacgcttgggtgcttgacaagctcaaggctgagcgtgagagaggtatcaccattgatatcgctctgtggaagtttgagaccaccaagtactactgcactgtcattgatgcccctggacatcgcgacttcatcaagaacatgatcacgggtacctcccaggctgactgtgctgtcctgatcattgactccaccactggtggttttgaggccggtatctctaaggatggccagacccgtgagcatgctctccttgctttcacccttggggtcaagcagatgatttgctgctgcaacaagatggatgcgaccactcccaagtattccaaggcccgttacgatgagattgtgaaggaagtttcatcctacctcaagaaggttggatacaaccctgacaagattgcctttgtccctatctctggttttgagggtgacaacatgattgagaggtccaccaaccttgactggtacaagggtccaaccctgcttgaggctcttgaccagatcaccgagcccaagaggccttcagacaagcccctgcgtctgcccctccaggatgtgtacaagattggtggtattggaactgttccggttggtcgtgtggagactggtgtcatcaagcctggaatggttgtcaccttcggtccaactggcctgaccactgaggtgaagtctgttgagatgcaccacgaggctctccaggaggcccttcctggtgacaacgttggcttcaatgtgaagaacgttgctgtgaaggatctcaaacgtgggtacgtggcctccaactctaaggatgaccctgccaaggaggctgctagcttcacctcccaagtcatcatcatgaaccaccctgggcagattggcaatggctatgccccagtgctggactgccacacctcccacattgctgtcaagtttgctgagctcataaccaagatcgataggcggtctggcaaggagcttgagaaggagcccaagttcctgaagaatggtgatgccggtatggtgaagatgattcccactaagcccatggtggttgagaccttctctcagtatcctcctctgggtcgttttgctgtccgtgacatgaggcagacggttgctgttggagtcatcaagagcgtggagaagaaggacccaactggtgccaaggtgaccaaggctgcaataaagaagaaatgatgcgtcctcccatgtgccctcgtttattttgtacttgtgcccgtatacttcgatctgttaaaatctattggttgtgtgccctgtgtctgttgtttgggtatctatactgttattttgagacatgttgacttgcatggtcatctggattgggttcgcatttctgagtcatttgtcttgacatg

SEQ ID NO: 28953 - DNA, 1511 bp, Zea mays
  Clone ID: LIB4767-014-A7_FLI
actgcttctataacacgcgatcccgcttccactcggcgaccaccgggcaccgccgccggtacaccgcgcatcgaatcgccaccagtgccgattctgctgacccctcgccatcgctggcgggcgaatcgacgccatggccgccgcgcgccggggccgcgccgacggtgccaacggcgtcgtccgtccccgcccccgcgaccgtgtcgtcggcgtcagcggaagcatggcggggcgcgtggcggtcctcgctttctgtgtcgccgggatctggtccgcctacatctaccagggcgtcctccaggagactctatccacgaagcggttcaggccggaggcgcggcggttcgaggcttcgagcaccttgcgttcctcaacttcgcgcagaatgtcgtatgcttcgtctggtccttcctaatgattaagttgtggtcgagcgggagcgggagtagctccgacggccgtgcgccgctatcgaagtactggggcgtcagcgtaaccaataccatcgggccgaccatggggatcgaggcgctcaagtacattaactatccggctcaggtgttggcaaaatcttctaagatgatccccgtggactgtgagttagacgagcctaacacgttcgaggacgacccgcaggacacgttcgagcaagtaatgctgatgggaaccctgctctatggtgtgaagtacacacttccagagtatttttgtacctttcttgttgctggcggtgtgtcctcctttgcgttgttgaagacaagctccaagagaccaagacagttaagaagcttgccaaccctaatgcacctcttggctatacattgtgcttcctcaacttagcttttgatgggtatactaactcgacccaagatttaataaagtcaaggtacccaaagactaatccatgggatataatgcttggcatgaacctctgggggaccatatataatgctgtagttatgtttgttgcgccattactattcagtaactggccatatgcagatggtttcgaggcattgagattttgccaggagaacccagaggtggcctgggacatttttctgttctgcctatgtggcgccgtgggtcagaattatatcttcttaaccatcagctggttcggcgctcttactaacacaacgatcactaccactgtatttttgttctactgtcccgaaagtaacctgttatagaattagaatcaaggtttttattcacgtatacctcttatattgtgtttggaagagcagtgatgtcttggacactttggagacgacttaaattttactaagccacaggccacaggttatttggatgagtaaaattggtctaggaatgtttatagtaaggatttaggttatgttcccaatcgtaatgaatatttgttgtcaggagatgttatgagaccattattcatgtagatatacgaatacaacgggtgctcaatgctccattacgaaatgtaaatgacagactgatactggtaaattccatattttcgttgcacgtct

SEQ ID NO: 28954 - DNA, 1907 bp, Zea mays
  Clone ID: LIB4767-014-B10_FLI
ccgggaagggagaccgagacatcgggatcagcccgtgctcagtgctgacgtcgtcactcaaatgctgtttcgtccccgtccgcccatgtccatctagaattcgatccagctgtccaaactacctttcccggcttggtcaatcctgtcgccttcggtccatctcacacagactccggccggcggctccactccactgccccgccgctcggtgccgtacgtcgtcgtgctccaccgcctctcgatgatccttggtttattgctttgctgcatagctttcttggctagctaggtctcgtttcatcagtctcgatctgctgctcgttggccgccggcggctacgagcatggaaacgtacactacggacgacgcgctgacggccatggggtttggcaagttccaggcgcttgttcttgtgtacgcagggacgggctggctggcggactccatggagctcatgctgctctccttcgtcggaccgctggttcggcagcagtggaatgtctctgcccagcacgagagtctgctctccagcgtcgtcttcacgggtatgctcctgggagcctgttcctggggctatatttccgacaaatacggaaggaggaccgctctattgttctccgttactcttaccgctggagcagggttgacaagtgctctatctcctaactacatatccctgctggcacttcggtttcttgtgggtgtaggagttggtggcacgcatgtattttcgtcttggtttctggaatttgtccctaccaagaaccgtggtgcctggatgcttgtgttctctgctttctggaccatcggaaccatcttcgaggcttcgcttgcgtgggtcgtgttgtcaagactgagctggcggtggctgctggcgttcacctccctgccatgcttcgccttgctcgtgtttttcgtcgtcgcaccggagtcgccacggtacctctgcgcgcagaacagaatatccgacgcgacccttgttcttgagaggatgtccaggacgaacaaggccgctcttcctcccggagctctggcataccaccacacggaaacgcagctgggactgggagggagtacaacagacgacgcctccaaatccggttccggtggcatggctgccctgcgcaggctgttcccgcgcaaactgctgagatccacgcttctcatctggttcgtttggtttgcaaactcccttgcctattacggcctagtgttgctgacgtcgcagctgagtgacgcgaaccggaggtgcgcatcgtcgtctgctcacaaatctcaagcgcacgaaggaaacccgaatctctataaagatgtcttcataactagcttagcagagtttccggggctggttatttctgccattatcgttgattggcttggccggaaagctacaatgtggatcttgctgtttggatgctgtggcttcctcggacctctggctgttcatcagaaggagtcggtgacaaccgctcttctgttcggtgctcgcgcctgtggcatggggagctctacggtgttgtgcttatacgcaccagaggtgtacccaacatcagcgcgctccacaggtgttggcatcgccaccgcaatcggaaaaattggcggcatcgtttgccccctcatcgctgtcggcatgctgcggagctgccaccaaatgcaagccgtcctggtctttgagcttgtcctaggcctcgcgggagtagcctgcatcctcttccctgtggagaccaagggccgagagatgaaatgacagaccttcacatgcacccaaagcgaccgctactttcagcggcgtacgttcgaacataaagtatttttgttgaagacgcgtactcagaaaattgctcaaactatatctttaatgaaatattctgagtatcctttttatcaattagtttttttctaccctg

SEQ ID NO: 28955 - DNA, 1626 bp, Zea mays
  Clone ID: LIB4767-014-C1_FLI
ccgggggaaagtggtgttccctcgtctgaagccgaggaaaaatctcgcattcgcaaagcagacaaaacagcgtccccccttcctttactaaaaaaaaatggaggcatgagctccacctcctcctcgtctatcgccgatctcccccaaaccctagccccgacctgaccgccggcgggcccgccggccggagaaggagtcgctcccacccatccaacttctgcggcggaaggggagcgggcggcggacgagatgccgtcgcacggggatctggaccggcagatcgcgcagctgcgcgactgcaagtacctgcccgaggcggaggtcaaggcgctctgcgagcaggccaaggccatccttatggaggagtggaacgtgcagcccgtgcgctgtcctgtcaccgtctgtggcgacatccacggccagttctatgacctcatcgagctcttccgcatcggcggcgacgctcccgacaccaactacctcttcatgggcgactacgtcgatcgtgggtactattcagttgaaacagtttctctgttagtggctttgaaagtccgttacagagatagaattacaatacttagaggaaatcatgagagcagacaaatcactcaagtatatggcttctatgatgaatgcttaagaaagtatggaaatgcaaatgtctggaagtattttacagacttgtttgattttttgcctctcacagctcttatagaaaatcaggtcttctgtcttcacggtggcctctctccgtcattggacacgttggataatattcgttctcttgatcgcgtacaggaggtcttcatcagagcaatgagtgggaattgcagaatcctgccaaattagttctcagatccaagacatgttcaatcctattcagaagcttgataacattgagataattgcaagacagccatacaaaaatgacagcgttgtcagcgtagaaagatacccagtgcttctagtgtttttctctcattcctcttttcttttggggtggggggtggggagcttgaggcttgacatttcaccattagtgaagtgaccaaccagtagtcatttgcaatgaggttcctcatgaaggacccatgtgtgatcttttgtggtctgacccagatgaccgatgtggatggggaatttcaccaagaggagcaggttacacatttgggcaagacattgcgcagcagttcaaccatacaaatggtctttctctcatttcaagggcccatcaacttgtaatggaaggatttaattggtgccaggataagaatgtagtcacagtcttcagcgcgcctaattattgttaccgctgtggtaacatggctgctattcttgaaatcggggaaaacatggaccagaacttccttcaattcgacccggcacctcggcaaattgagccagacacaactcggaaaaccccagactactttttgtaattgtggtggtgacattaacttactggtgttgatgctcctcttttccgcagcatcagggtctgtagatcatctgtccttagatatgggttccatgagcccgacctgtacgtctcccaattcttttgtttggagattttgttgccgcttaacgatctttatacaatatgttaaaaagttaaatgcc

SEQ ID NO: 28956 - DNA, 1644 bp, Zea mays
  Clone ID: LIB4767-014-E3_FLI
ccgggcggatggcggcccactcgctctcgctctacctccccgtcgtcacgcgctcgcttgtgcccctagcgtttcgccacctcctgctcccgcaccgcctccggctccggctccggctccgcctcgtctccgccgtctccccatcccgggcgcggcccctcggcctcggcgcccgcccgccccgcccccacgccgcacccctcggctacggagttggtgcagggagaaggccgagtggtggactggaccacagagccatgtcaagttccacaaattcaacagtggccacggagttgtcggtgtctgagaatagcagggaaattgagccgctaccttttgtgaatgacaaacatggaggcgtcatcattgagatgaagactccaatggatcctggagtgttttcagcttacttgaaagcagcgctggcaaaatggagggagcaggtgacccccccccccttctctcagcatcaatgttaccatttatcctatcatgccaagtaaatatcccaatatttaagttttgaactgtggacgacatacctcaaagatccatcaatccatgcaagcatctttatatggtaggtttggtaggtgaaaaaaatggtgctgtgcatgacaactattttaaaggtttaaatacactgtatatcttctatgagccttgaagagccaaccatattgcaaggcatgtgacaatagacatgtggagattactgtacatgtacatcattattttcaatctcagttattcatgagtacctcaaggagagatgtggttacaaatgcatagcctgcacttgtcattgaaaagagctttacatctattactgtactttcctcattgtagggaataagaggtgtctggatcaaattacccatcaccctttccaaccttattccaacagttgtagaggaaggtttctggtaccatcatgcagaggaaacttacttgatgcttgcgtactggcttccaaatacaacacatacactaccagtaaacgcaacccaccgtgttggtgttggagcttttataatgaatgacaaaagagaggtcttggttgtacaagaaaagagtggtgtacttcgaggcctaggtgtgtggaaatttccaactggcgtagttgaaccgggggaagatattaacgttggagccataagagaagtaaaagaagagaccgggattgatgcagaatttgttgaagtgctggccttcaggcagagccacaaagctttttttgataaatcagatctatttttcgtgtgcctgctacgaccgctgtcatatgacattacgaagcaagactcggaaatagaagcatgccagtggatgccagtagaggaatttgcagcacaaccatttgtccagaaacatgagcttgtgaagtacatcctcgaagtaggcctggctaaagttgacaagaaatatgcagggttttcgccaatctccataaaatcggcgtttacagacaaattgtccttattttacatgaaccggagggacctggacaaagcctcaggatagagtaatatgtaattaaacacagggaattcaagatagttgaaatttcagttctggtatgtaaaagcaggccaagtcatattcatacttgattattttgttaacaaattggaagtttcgggc

SEQ ID NO: 28957 - DNA, 1696 bp, Zea mays
  Clone ID: LIB4767-014-H5_FLI
acaactccacgctacacagttcacacgccaagcgagggccgcatctagatccgcgccgccgagctgacttgactattgcaagtttgcaacccaccgccacgccttcttctccccccgcgatctacccggcccgggcgccgttgctgctactgctattactaatactactaccacgtcgtagcggaggcagggacttgaggagcgggtgggttgcgatggccgccgcggggaggaatgcgggcgtcctcgcgctcttcgacgtcgacggcaccctcacagcgccgcgcaagggggtgacgccagagatgctagagttcatgaagcagctgcgccaggtaagaattgagaccactcttcctcttggtcctggtgtatttttttttcgttctatgacgagaaattacatcttcatatttttttgggagcttcaccctttttttaataaaatttgggagcagcatgtgacagtgggcgtggttggcggatccgatctggtgaagattaccgagcagctcggcagtacagttattactgattatgattacgtcttctccgaaaacggcctggttgcacacaaaaatggccaactaattggaacccaaagtttgaaatcatttatcggagaagacaagctgaaggaatttattaacttcactcttcattatattgctgacttggatatcccaattaaaaggggtacattcatagagttccgaagtggaatgattaatgtatctcctataggaagaaactgtagccaagaagaacgtgatgaatttgagaagtacgataaggtgcataacatccgacctaaaatggtgtcagtgcttcgtgaaaagtttgcacacatgaacttgacattttctatcggagggcagattagttttgatgtatttccccaaggttgggacaaaacttattgcttgagatatcttgaggaatttcaagaaatccatttctttggggataaggcctacaagggtggcaatgactatgagatatttgaatctgaaagaacagttggtcatcaggtatgctattgctggctgtatggaaaaggctgatattcttatgcctgtaaatttgtaatgtcacctaacaaaaatgacatagcttaagtgagatattctaagttcttcttagaaaataaaaataaattggaaaagagagcatcagtgcaaaatcacacgtcagtattcaactggatatgttattaaccttggatcaaacttagacggcaggttcccacaatttaattttagtgttaaacgatacctctttcatcatagtagtagttgcatattacaattgtgactcaccaagtcaccattgctgtcattcccgtactgattccatatcattttgatttgcagttaccagccccagtgacacagctcagcaatgcagatctctctttttgtcgaagtgatctccagcttatttccaacacatatttattaagtcatctttgactgaatgccttttggtatttttttcaagacaatacatgccaccattttttctttgaataattggatctataccattaaaagattgcaactttagatatatactattggctccacatatcattgactcatgtgaaccatacatgtaagtgagataacaatgatatatatttaaagttgtaatcctttaacgatactactgctccgtattcacaaattttcagatt

SEQ ID NO: 28958 - DNA, 1383 bp, Zea mays
  Clone ID: LIB4767-015-A4_FLI
cgaccccgatccgatctaatgttccccaccgtcgacgacccctccgccgccggcgccatggtgtcggcctccttccctgacgccgacgcctacggcaacggcgactccgacgacctcgacttccccgtggacccaaaccctaaccccgtgttctcctctcccgccgcccccgcgtccgccggcgcggccggggagcggcgcccactgttccagcgcctgtggacggacgaggacgagatcgtgatcctgcgcgccttcgccgagttcacggcgcagcggggcaccgccttcgcgtcgcaccagtacgacaccacccccttctacgaggacatgcgccgccgcctcaacaccggcttcaccaagaaccagctcgtggagaagatccgccgcctcaagcgcaagtaccgcaactgcgtcgagcgcctccgcgtcgccggcgccggcttcaacttccgctccccgcacgagcaggccatcttcgagatcgcccgcaccatctggcgccccgcctccgacaaacacggccgcgactccgacgacgagggcggcggcggcggcaacaacgcccacgacgccaccttcgccatggacgccgccaccttcgccatcgacgccgccctcgccgccgccaacggggggtccgccaggtccccgacctcgaggccacgacgtggccgccgccgccgcacgggcgacttccccgccgacgctgtcccggagacgacgctcgcgctgccgccggcgcccatgctggtgatgaccgaggacgtgctcccctcgttcccgcaggtgactgcggcagcggtcatggacggcggctgcggcgtcagcgtggacccagcctctgggctgcctgccgcgctgtcaacagctgcggcggcagcggccgtctccggcagcagcaccgcggagaaccccatcctggcggcgctgttcaaggagatggtgcacgcgatgctgagcgtcggcgtcggcggcagcacggcgcttctggggctggagccgccgccccccatcgcgggggtgccgatggaaggggagaagtggcggcagcagcggatccaggagttggaggtgtacctgcgtcggatcgacctgctgcaagaccaggcgagggcggcgctggacgaactcaggtccgccccgcacgccggaggaatgaacacctgatgatcagcagctccagagtcgcgtcgtcttgcagatagcgcatcgtccataaccatgagaaaagatcatttttaccggtagatttctctaggctcgagcagcagcagcagaaggggagcttcgtctgtaattctcattttctgtctgcgctgcagactaagccgcctggtcttctcttattttatatataataacttatataaagattgtcct

SEQ ID NO: 28959 - DNA, 1455 bp, Zea mays
  Clone ID: LIB4767-015-F2_FLI
ctcgaggccggccggggcctccagtcctactcctccacccagctcgccgcttcaggaatccggagagctcgcgtcgcgcgcgcgcgcgcgtctcgatggccgacggcgagccttccctcacgcgctggaccttcgaggatttcgtggtccactacgaggcgcgcttcggcctccggcgcgaggccgacggcgacgacgcacccccgccgcgcggatccgatcatggggccagccgccccgccactgcccgcgccaacggcggcgcggacctcgccgtcttcgagcagttcgagcggatggagaggaaggtggagataagcaatggagcaatagaggatggtccactgcagaaatctctacttccttcatttgaatctgcagaaatgcgcaacttagctgagacattgttaagggatataattcgtggaagtccagatgttaaatgggaaagcataaaaggtctggagaatgcaaagcgtcttctcaaagaagcagttgtaatgccaattaaatatcccaaatacttcacaggtctattatcaccttggaaaggcatattactgtttggtccacctggaacaggaaagacaatgctagctaaagctgtggctactgagtgcaaaacaacttttttcaatatttctgcctcgtcgattgtaagcaagtggcgcggtgactcggagaaactagtgaaagtgttattcgaacttgcaaggcatcatgcaccatctactattttccttgatgagattgatgctatcattagtcaacgtggtgaagctcgtagtgaacatgaagctagccggcgattgaaaactgagctattaatacagatggatgggttgactaagacagatgagcttgtttttgttctagcagcaacaaatttaccatgggaattggatgcagcaatgctgcgtcggctggagaagcgtattcttgttccattgccagagccggatgctagacatgctatgtttgaagagctcctgccatatacacctggcacaatggagattccctatgatgttcttgtggagaaaactgaagggtattctggctctgatattcgcctggtatgcaaggaagcagcaatgcagcccctaagacgggtaatggcagttcttgaaggcaggaaagaagaggtccctgagggtgagttgcctgaagttggcccagtaactacagaagatattgaacttgctttgaggaatacaagaccgtctgcacatcttcatgcacatagatacgaaaagttcaaccaagattatggcagtcatgtacatggctaaaggggagaagcttgttgtagggtttaatttgtatgctcatgcgtgggccaataggtgactactgaattcatcgacatgctgaggtatccttgtaaacactatgcttatccttgtatgctgtacactatcattcatttgatgagcaataagctgtttggtaact

SEQ ID NO: 28960 - DNA, 1969 bp, Zea mays
  Clone ID: LIB4767-015-G6_FLI
aacaatgacctcagggacaacaatgacctccaagacgagcggcagcataaccaccaacctgagcaccacggggaagctctcctccgtgggcagcagcttcatggcgtctgccggcagccgcagcaccagcggcggggtttgacaagggggccaagtactccgacgaccagatcctcgaggcgcccaacctccgcaccttcacattcatagagctcaagacggccaccaagaacttccgtccagacagcgtcctcggcgaaggagggttcgggagagtctacaaagggtgggtggatgagaagaccatggcgccgaccaagaacgacaccggcatggttgttgcggtcaagaagctcaactcggagagcatgcatgggtttgaggaatggcagagatcgtgagtcagagcgcaaggatcctgattatgacagaagctatgacaggaaacactaaatcttgtgatgtactccctctgttcctaagtctccagcgtattagtcatctgcacagtgaccaaggagcgctgatatgcttttactcgcagtctttttaaccgtgcactttcgaataaatctgcaattttggatcgtatcagagatgcagtgtttaagaaaggtttccaggccagttatacatggtcatataccaccccgcgtgccccgcgccgccagcccgcgcctccaccccgtgcgatctctgtttagatcaatcgagttgagtttgttcattccaagtcattattgcatagagatatcaagcctgataattttctcatgggtctcgggaaaagagaaaaccaggtttatgttatcgattttggacttgcaaagaagtacagagatacatcaacacaccagcacattccatacagaacaaagccggagggatgacatggaataaaaaacaaaagtattcgggaaggttggtttaatacactgtcagccttctatggtagggcctgaaagctgggaacaaaaaacaaaagtatgaaaagatcagcgaaaggaaaattgctacttcaactgaggctctctgccgtggatatcctaccaaatttgcttcttacttccattactgttgctcacagcgtttcgaagatgcaccggactaccagtacctgaagaatttgttcagagacctttttattcgggaaggttttcagtttgattatgtttttgactggaccattctaaagtaccaacaggcatagatgaccactgcaccacctcgtgcaattgtctgtacaaggaataaacttaccctcctaccttaagtagtagtagagattgtattgggtatagaaatgtacttcttttgttatgttatatttcattgccccctctctattttggttcctggccttggtttttgtttcttgtattttttttccatgtcgtctagctactgtagttgcccatcgtcaaagttttgtagagtggttagtgttcttggttgacagacattggtgctagatttgggatcagccttcctaaacagtaccatttactttagctcaatgatatgaataatgcttgtttgcaggacatattgctaagaatctgccacattatgtttgcttgaggtattaatttatccaggtgtttaatgctggagtacagttagaagatccctaatcaattgcttctcatttcagtcgtgtaactttattcatgctacaacaacgactttgagcgaacatgagaccactgagctctagagtgaatgaaggacgtcgtctttggaagtcagacatcacctagagctagggtgtccattcttgacatgtttctcttagtgataggtggatactgtctagttaggaacagagtcttgagggattgatggacgcatgcatcttcaattcctgtgtgttgtattactactggtacaatctccaattcttgtgaacttatgtatttggacttgtgtgaatttgtgatatgaacatatatccatgtgtttgaaattg

SEQ ID NO: 28961 - DNA, 2293 bp, Zea mays
  Clone ID: LIB4767-015-H9_FLI
ccggaaaaaactgcatcggcatttactccgttgggcctcgcttccgatgcgccggagctcgcacgcgatgggagcgcaagggtttcggctgctgctgcttctgctgctcgcggcggcggcggcggaggcgcgcttcgttgtggagaagaacagcctgatggtgacgtcgccgacttcgttgcggggacgacacgacagcgctatagggaacttcggaatcccacagtacggcgggagcatggcgggcgccgtcgtctaccctaaggacaacgccaaggcttgcgacgatttcgacggcaggcaccccttccgtgccaagcctggcgcgatgcccacgttcctcctcatcgaccgcggtgagtgcttatttgcgaagaaggtttggaatgcacaaaatgctggtgcctctgcagtacttgtagttgatgacaaggatgaaccattgataacaatggatttacctcgtgaagatgacgaggcttcaaagtatatacaaaacataaccattccttctgcattaatagatgaaaaatttggtgaccagttgaagaaggctgttaaagatgggaaatggttaatgttaatcttgattggagggaggctgttccacatccagatgaccgtgttgagtatgagttatggacgaacagcaatgatgaatgtgggcctaaatgtgatatgctgatgaattttcttaaggaatttaaaggagctgcccaactacttgagaaaggtggctatggccaattcacgccccattacattacttggtactgtcctcaagcatttgtgatcagtaaacaatgcaagtctcaatgcataaaccatggaaggtactgtgcacctgatccagagcaagattttagcataggctacgaaggaaaggatgtggtggtagagaacctcagacagttatgtgtgtttaaagttgcaaacgaaaataagaaaccatgggtctggtgggattatgtgactgattttcacataaggtgtccaatgaaggagaagaagtacaataaaaaatgtgcagaaactgtcatcaaatcactaggtctggatgtgaagaaggtcgataaatgcatgggagacccaaatgctgattctgaccacccgttacttaaaatggaacaagatgctcagattggggaaggttcaagaggagatgttactatattgcctacacttgttgtgaacaaccggcaatatcgagggaagcttgagaggaaagctgtcctcaaagctatttgtgctggttttgaggaaactacagaaccaaatgtttgcctgagtgatgatatagagacaaatgagtgtctgaatgacaacgggggctgctggcaagacaaatctgctaatgtaacagcctgtagggacaccttccgtggtagagtgtgtgaatgccccactttcaacggcgtacaattcaaaggcgatggctacagcaattgtgaacctgctggaccaggaaaatgcttgataaaccatggaggatgttggcatgaaactcgcaacggaaaaacattctctgcttgccaggaatctggagatgggaaatgcctgtgcccagctggtttccgaggggacggcgttaaaaaatgtgaagacattgatgagtgcaaggagaaaaaagcttgtcagtgtcctgaatgcaactgcaaagatacatggggtggctatgactgcacttgcagtggtgaccttttgtacatcagagagcatgacacctgcataagcaagacagcagttcaggctaaagcagcatgggctgcagtgtggggtatcttgatagttgttgctgttgtggcagcgggaagttatgttgtgtacaaatacagactaaggtcatacatggactctgagattagagctatcatggcgcagtatatgccacttgacaatcaaggagaggtcccaaatcatacacatgacgaagatcgttcataagtgtgcagatcattacgtggtgggcccatatggcctaatctgacaccaatgcagatcgtcctgagctctacaaacagaaactacaggccaataatagcttaatttttagagtacaaaaatctgttatttgcctgatagtttatctggagcagtttcattttacatatgactgtaatttgtgagaatgtacatcttacgatttttgttgaccagtattcataggtttttagttagcaatgtgttgttggcccgttgctagtccttgtaatacaagcccacctgtttttttttgcgcatggcaagacttaacctggaaacattttgtagtacattttattttgtaaaaaag

SEQ ID NO: 28962 - DNA, 1070 bp, Zea mays
  Clone ID: LIB4767-016-A10_FLI
ccgggccccgcatatttatcgcaacaaccccggcctgccaagtgccacaaccgtagcctgtagcttcatccgttgcgctgctcccggttccatcgcgcggtgcggaatttaacatggccgtgccggaggtggtggtcgacggcgtcgtcttcccgccggtggcccgcccgccgggctccgccggctcgcacttcctcggcggcgcaggcgtgcgaggcctcgagatcggaggcaacttcatcaagttcacggccatcggcgtgtacctggaggacgcggccgtgcccgcgctggccaagaagtggggcggcaagacggccgacgagctcgcctccgacgccgccttcttccgcgacgtcgtcacgggcgacttcgagaagttcacgagggtgacgatgatcctcccgctgacgggcgagcagtacgcggagaaagtgacggagaactgcgtggcgttctggaaggccgccggcctgtacacggacgccgagggcgtcgccgtggagaagttcagggaggtgttcaagccagagactttcgcgccgggcgcctccatcctcttcacgcactcgcccgccggagtcctcaccgtcgccttctccaaggactcgtcggtgccagcggccggcggcgtggcgatcgagaacaagcgcctctgcgaggccgtgctggagtccatcatcggggagcgcggcgtgtcgccggccgcgaagctgagcctcgccgcgagggtgtcggagctcctcgccaaggagaccgccgcgcccgccgacgcgccgcaggcggagcccgtctccatcaccgcctgaggcgaggagcgggcgggcgagcgaacgaaccgcgaggagaaagaaagcaaccagacggttgggcggcacggcgtctcacacctgccgcctgcgcttgcgtgctccggaccggagagatgccgcgcgggtgcagtgcagccgtcgcgtcatgtctgtccgcgctctggcgtcgtgttcctgcctttctggtcgcgtagttgtcttgtgttcgctgttggtcgttctgggtaacatttgaataaaacaagcggatttgttgcc

SEQ ID NO: 28963 - DNA, 1851 bp, Zea mays
  Clone ID: LIB4767-016-C8_FLI
ccgggatcggccccccgcttccttactggggcggcgccgctgttggcgcagaggagcagaggtggcgcatcggcatggactccgccgccgctgccctcctcgactccgcctccgcgtccgcctcttccgccaacgccgcaggcaaggagatgcccaccgcccgccacatcgcccaccgcaccgcccacaacatgtcctcctcctcgctccgcaagaagtccgacctcgcgctcctccgcaaggtcccctgcgccccgctccgacgcctcctcgacaacctccaggaggttttgctcgccaccaagctcgccctcctcttccccgccgttctactcgcgatcgccgcgcgaatcttccacttcggccaggaatgggtctttgtgcttagcttgatcggtctcgttcctcttgctgagcgacttagctttctgactgagtgagtttgttctgcttgttatcataccgtgttcttgatacctcctgttgattgatatctttctaatatatgtaatatatgttaatgttgcaggcaggttgcgttttacatagggcctactgtgggtggactgttgaatgcaacatttggaaacgtaacagaggtcatcattgcgatctttgcactctatcaaggcaaggtagtggtggtgaaatgctccctgctaggctcagtcttgtccaacctgttgcttgtccttggaacctcccttttctttggtggcctggctaaccttggaactgagcagctatacgacaaaatgcaagtagatgtcagcacaggacttctgattcttggtgtgctatgccactctctgccactgatgctgagatatgctgtgagctccggggagcacgcagaatcctcttgggattcaggactggagctgtcccgagcatgcagcattgtcatgctccttgcctatgtagcctaccttttcttccaactgaaaacccaccgccaactatttgaaccccaaccccaagaggttgaagatgatggtgatgattcggtctctcaagacgaggcagtactgggattttccagtgcaatgatttggctgggagtcatgaccctgatgacagcactcctatcagagtttgttgtgagcacaattgaggcagcatcggaatcttgggagctatctgtcagtttcattagcgtcatcttgattccaatagttggtaatgcagcagagcatgctggtgcagtgatatttgcgtttaaaaacaatctggacatcaccctcggagtatctttggggtccgctacgcagatttccatgtttgtggtgccattgagtgtccttgtagcatggatcatgggagtcccgatggatcttgatttcaacttgcttgagactggttgtttgtttcttgcaatattagtaacggccttcacgctccaggatggatcatcacattatctgaagggactgctgcttgtgttttgctacattgtcatctccttatgctttttcgttttgagacagcatggaaatggaagcaacgatgatcagctgggtgtagcaagcaagccatggaggatttagggcgcctgagctggcagtagtttctcaacaagtagcgtggactttggtttgcacgattttgcatggaacactggaggggagacccgtgaagtttgactaaagtatgtagactgcgggaagatgctgttcagctgatgtgtgaatgtaagtacatacaaagactatagatgaaaactgatgttgcgtgagagactatttgtgtgtgtttttcttgttctttccaccaagcaatggctagaattcggttgagctgttgaaattgtctcctgtataaatcagtgacatgtcatactattttccaact

SEQ ID NO: 28964 - DNA, 1603 bp, Zea mays
  Clone ID: LIB4767-017-D7_FLI
ccgggctcgactctgactctacgcggcacgcgagcgcagaggcccgtccgcgaaaaagaccccacaccgcccactacaccggccaatcacccgccggcgagccatggccgccgccaccgctaccggggactccgtcaaggagccgctcctccaccgcgcgtacccgtcccaggtcgcgtcggcctcctcgcccgcgctcccgtccgcactcccggggtccgccggccgtcgcttcccgggggtgctcgacgtccccaacctcaagaagcgcggcggcggcacgcgcagctggatccgcgtcgaggccgtcacggcctccgtgcagacgttggagatcgacaaggccaccatgatgcggcgctgcgaactccccgcgcgggacctgcgcttgctcgacccgctcttcgtgtacccgtccacggtcctgggccgcgagcgcgccatcgtcgtcaacctcgagcagatccgatgcgtcatcacagccgacgaggtgctcctgctcaactccctcgacagctacgtcctccagtacgccgccgagctccagcgccgcctcctccagcgcgctgagggcgaccagctaccattcgaattccgggcgctcgagctcgccctcgaggccgcatgctccttcctcgatgcacaggcagcggaactggaaattgaagcatatccattattggatgagctgacatccaaaatcagtactctcaatttggaacgtgtccggcgattaaaaagtagactagttgcattgaccagaagagttcaaaaagtcagagatgaaatagaacaattaatggatgatgatggtgatatggctgagatgtatctcaccgaaaaaaagatgaggatggaatcatctgtctttggtgaccagtctttgttgggctacaattcagcaggtgctgcgggggcatcagtttcagctcctgtatcgccagtctcatcacccacggaatcacgaaagctggagaaagctttcagtttgtgtagaagcaggcatgatagcacgaagagctccgataacacaacgacagatcatatccaagagttggagatgttactggaagcttatttcgttgttatcgacagcactctcaacaagctgacatcgcttaaagagtacattgatgacactgaagacttcatcaacattcagctggacaatgtgcggaaccagctgatccagtttgagttgctgctaacgactgcaacatttgttgtggccatttttggagtggttgctgggatatttgggatgaactttgagacatcagttttcaaaatagagaatgcattccagtgggtccttgtaattacttcagtggtgggcgttttcatcttctgctccttcatttggttcttcaagtacaagagactgatgcctttgtagagtgtatatatgccctcctcctcctcccatatagcaccgatgaatcagttcaccgtgtagaccttctaccctgttgaggaacttgatcagatccctgaatttctgccgatgtaaattaccattcttatagaggttcagggcatgcctgccgagaattcgggtgaaaattgtaactttctcgacatgatccctaagactgtcgcagct

SEQ ID NO: 28965 - DNA, 1967 bp, Zea mays
  Clone ID: LIB4767-017-G1_FLI
ccgggacttccgtttccggattcttgcgtttccaagtccgatacaaaccagcgccgcgccgcgcgagcacgtcgggcgacgttgcggcaggcgagatccgagaacactcctccctcgcgcccccgcacccgcatggccgccgctggccgcagatagggaggcgcaggcgggggcgtgcagatccagatccggtgggcggcgaggacgagatcgccccctaccaccatggcgggcgccgtgtcggcgctcttcctgctggacattaagggccgcgtcctcgtctggcgcgactatcgtggtgatgtctccgcgctccaggccgagcgcttcttcaccaagctcctcgacaaggagggcgactcggaagtccactcgcctgtggtctacgacgacgccggcgtcacgtacatgttcatccagcacaacaatgtcttcctcctcaccgctgctcgccagaactgcaacgcggccagcatcctcctcttcctccaccgtgtcgtagatgtgtttaagcactacttcgaggaactggaagaggagtcgctcagagataacttcgtcgttgtgtatgagttgctggatgagatgatggatttcgggtacccacaatacacggaggcgaagatcctaagtgagttcatcaagacagatgcgtacaggatggaggtcacacagcgtccacccatggccgtgacaaatgctgtgtcatggaggagcgaggggatccgttacaagaagaatgaagtcttcttggatgtagtagagagtgttaacattctagttaacagcaatgggcagattgtgagatcagatgtggttggggcactgaagatgcgaacatatttgagtggaatgcctgagtgcaaactcggcttgaatgatagggttcttttggaggctcaaggcagagcaactaaaggaaaagcgatagaccttgatgatatcaaatttcatcagtgtgtacgtttagctagattcgagaatgatagaactatatcgttcatacctcctgatggatcttttgatctaatgacatacaggcttagcactcaggtaaaacctcttatctgggtcgaagcacagattgaggaacattctagaagccgtatagaactcatggtgaaggcaaggagtcagttcaaggaaagaagcacagcaacaaatgttgaaattgaagtgcctgttccttcagatgccacaaacccaaatataagaacttcaatgggttctgctgcatatgctcctgagagagatgcaatggtctggaaagtaaaatcattccctggtggcaaggaatacatgtgcagagcagaatttagtcttcctagcataacagcggaagaaggggccccagaaaagaaggcaccaatacgagtgaaatttgagataccatatttcaccgtatcaggtattcaggtccgttatctgaagataattgaaaagagtggttaccaggcactcccctgggttagatatatcacgatggctggcgaatatgagctgagacttatatgagttttctcttttctggctgatggaagacatttatgaagctgcaagatacatatttgctcgagacagcaaccgtatgacatttgaatgttagcctggacgtcttctgccgaccacacaaggttttccccctgggggcttgttcatcttgttaggctcaccttaccttggttattgtacgttacccatcaagtatagtttttgaaaaaaagagaggataattttaattttcatctctcttgtattattattgatttatttttgtgggtaccaaacttggatttgtttcatctgatcgagttcacaaaaacactgccattactgggtgatggttctgaactgcaggttgaaacaattgtgccctttactgtaaatgtcgtcgtcttgtatccaggcaaaagaaaggaaacctaccgagacctattatgacatcaataatttcaactttaaaaagt

SEQ ID NO: 28966 - DNA, 1651 bp, Zea mays
  Clone ID: LIB4767-017-G6_FLI
ccgggcctcacttaaaaactagtccccttgcgaaaaaattggtccgtccctgcctcagtctgcactctacgatggcggcgcctccggccacggctcccgcgaccgcccggtgtctgtccgtcgccaagtcgtgctgggctgccgagcggagctccagctcgtttgtcctctcggctcctgcgactggcctccggcaaagtgggagccgcgtcctcagcatccgtgccaaggttgccactggcctgcagagggcctgcattgcggatgatggagcggaaaggccgtggaagctcagtgatgctcgtcttgtcctggaagatggatcagtgtggacggccaagtcttttggtgcttcaggaacacaagttggtgaagttgttctcaacacatcactgacaggctatcaggagattttgaccgatccaagttatgctggtcagtttgtcctaatgaccaatcctcatattgggaacactggcgttaatcctgatgatgaagaatcaaaccaatgttttcttggtggcttaatcataagaaatctaagcatatgtacttccaactggcgatgcaaagaaacacttgagaagtatctgattaagaggaacatcatgggaatatatgatgtggatacacgtgctataacacgaagattaagagaagatggtagtcttattggtgtcttgagtactgatcagtctctgacagacaatgagttgttagaaatggcccaaaagtggaaaattgttggagttgatttgattagtggtgtcacatgtgatgctccatatgaatggtcggacaagactgattcagaatgggagtttaagagggatccgtcaagtgaaacttttcatgtggttgcctacgactttggtatcaagcataatattttgagacgattgacatcatatggatgcaaaataacagttgttccagcaaattggcctgcttcagaggtactcaatttgaagcctaatggtgttctttttagcaatggtcctggggatccagctgcagttccctatgctgtgaagacggtacaggaaataattgggaaggttcctgtttttggcatctgtatgggccaccaattgattgggcaggctcttggtgggaagacatttaaaatgaaatttggacatcatggcgggaatcaccctgtctgtgatctccgtagtggacgtgtagacataagtgcacagaaccataattacgcagttgacccagaatcactcccagaaggagcaaaagtaactcacgtcaatctcaacgataatagttgcgctggcctccagtactccaagatgaagcttatgtctctccagtaccatcccgagtcttcccctggtccgcatgactccgacacagccttcggcgagtttatagagctcatgaagagcaacagattgtaagaaaggggatcaggggagtacttgaaaaggtcaataattgtattggtgctccctcgcaccaacctcaaaagaatttgttgtatctgtagtgtttttcttttggttttgggacgttcatgtgcttgaatttttgggtccagaggacatagcataagatgctctgcgcattgtaccatgaaatggcctggttggatttcgtgaagataacatgtcatcaaactgtacggtacggtacactc

SEQ ID NO: 28967 - DNA, 1667 bp, Zea mays
  Clone ID: LIB4767-018-C1_FLI
gtgccacacatccatccccgttcgcctcttctcctccctcctgccgggtccttaataaagagcagcagcgcaagaggttggtagagcgagcgagaagaaggcaatggcggcggagagcttcctgttcacctcggagtccgtgaacgaggggcacccagacaagctgtgcgaccaggtgtcggacgcggtgctggacgcctgcctggcgcaggaccccgacagcaaggtggcctgcgagacctgcaccaagacgaacatggtgatggtgttcggcgagatcaccaccaaggcgagcgtggactacgagaagatcgtgcgcgacacctgccgcgagatcgggttcacctccgacgacgtggggctcgacgccgaccgctgcaaggtgctggtgaacatcgagcagcagtcccccgacatcgcgcagggcgtgcacgggcacttcacgaagcggcccgaggagatcggcgccggcgaccagggccacatgttcgggtacgccaccgacgagacccccgagctgatgccgctgagccacgtgctggccaccaagctcggcgcgcgcctgacggaggtccgcaaggacggcacctgcgcctggctcaggcccgacggcaagacccaggtgacggtggagtacgtgaacgagggcggcgccatggtgcccgtccgcgtgcacaccgtgctcatctccacccagcacgacgagaccgtcaccaacgacgagatcgccgccgacctcaaggagcacgtcatcaagcccgtcatcccggagaggtacctggacgagaagaccatcttccacctcaacccgtcggggcgcttcgtcatcggcgggccccacggggacgccggcctcaccggccgcaagatcatcatcgacacctacggcggctggggagcccacggcgggggcgccttctccggcaaggaccccaccaaggtggaccgcagcggggcctacgtcgccaggcaggccgccaagagcatcgtggccagcggcctcgcccgccgctgcctcgtgcaggtgtcctacgccatcggcgtgccggagcccctgtccgtgttcgtcgactcctacggcaccgggaccatccccgacaaggagatcctaaagatcgtcaaggagaacttcgacttcaggccagggatggtcaccatcaacctcgacctcaagaagggcggcaacaggttcatcaagaccgccgcatacggccactttggccgtgacgacgccgacttcacctgggaggtggtcaagcccctaaagaaggcatccgcttaagaatgtattgggaagttcactggacatgaggttcatcttcgtctggctctgctgatacctgcaaggattgctgctgctgctgccgcccctggatgtgtgtttgatcagtgactggctgctctgctccatagaagatgaatgaagagagagatggtgaagaaggctttggcaaatggcaattgccgcagcaagccatgtcggcgccactgaccggcttagtgattggtataatttggtgtggcagcagccaggattaatgcgctggtcttttatctttactactagtttggtctcgtccggtatcttatttttctttccccttttcgagtctgtactgaaactgctgagagatttgcagttttgatctatcatatccttcggtaag

SEQ ID NO: 28968 - DNA, 1486 bp, Zea mays
  Clone ID: LIB4767-018-H9_FLI
ccggagccgacgaggcgaggagcgtgcaattccgtagctgcaacgaactccctcgaccgtatcgcccgctgctcctctatccctttcctgctgctgctactaccttaagctatcactatcatggccttgatgctgctagcgcgcaacctgcgctcccgcctccgcccaccgctcgccgccgccgcggcgttctcgtcggccgcggcggaggcggagagggcgatacgggacgggccgcggaacgactggagccggcccgagatccaggccgtctacgactcaccgctcctcgacctcctctttcacggggctcaggtccacagaaatgtccataaattcagagaagtgcagcaatgcacacttctttcaatcaagactggtggatgcagtgaagattgttcttactgtcctcagtcatcaagatacaacactggattgaaggcccaaaaattgatgaacaaatatgctgtcttggaagcagcaaaaaaggcaaaagagtctgggagcacccgtttttgcatgggagctgcatggagagaaaccattggcaggaaatcaaacttcaaccagattcttgaatatgtcaaggaaataaggggtatgggcatggaggtctgttgcacactaggcatgatagagaaacaacaagctgaagaactcaagaaggctggacttacagcatataatcataacctagatacatcaagagagtattatcccaacattattaccacaagatcatatgatgatagactgcagactcttgagcatgtccgtgaagctggaataagcatctgctcaggtggaatcattggtcttggtgaagcagaggaggaccgggtagggttgttgcataccctagctaccttgcctacacacccagagagcgttcctattaatgcattggttgctgtaaaaggcacacctcttgaggaccagaagcctgtagagatctgggaaatgatccgcatgatcgccactgctcggatcacgatgccaaaggcaatggtgaggctttcagcaggccgagtacggttctcgatgccagaacaagcgctgtgcttcctcgctggggccaactccatctttgccggcgagaaacttctcacaaccgcaaacaacgactttgatgcggaccaggcgatgttcaagatccttggcctgatccccaaggctccaagctttggcgaggaagaggcgtctgcggcggctcccacagaatccgagaggtctgagcaagctgcttcgatgtagaatatatacatatcattaccgattatccgtatcacggttggggcgaaactagaactaccgttgtagctagagcattggattgtagaaaccacaacatttcattattttgtaattgcttgagactgaatgggggatacccatgtcgggctagatcaatggacaacttccacacaaccaaatccaaacattgaaactcatttttcatcacagttttaataaacttctcccactt

SEQ ID NO: 28969 - DNA, 2702 bp, Homo sapiens
  Clone ID: LIB4803-009-H3_FLI
cctgggctgctggcgcctgcgcagagccctctgtcccagggaaaggctcgggcaaaaggcggctgagattggcagagtgaaatattactgccgagggaacgtagcagggcacacgtctcgcctctttgcgactcggtgccccgtttctccccatcacctacttacttcctggttgcaacctctcttcctctgggacttttgcaccgggagctccagattcgctaccccgcagcgctgcggagccggcaggcagaggcaccccgtacactgcagagacccgaccctccttgctaccttctagccagaactactgcaggctgattccccctacacactctctctgctcttcccatgcaaagcagaactccgttgcctcaacgtccaacccttctgcagggctgcagtccggccaccccaagaccttgctgcagggtgcttcggatcctgatcgtgagtcgcggggtccactccccgcccttagccagtgcccagggggcaacagcggcgatcgcaacctctagtttgagtcaaggtccagtttgaatgaccgctctcagctggtgaagacatgacgaccctggactccaacaacaacacaggtggcgtcatcacctacattggctccagtggctcctccccaagccgcaccagccctgaatccctctatagtgacaactccaatggcagcttccagtccctgacccaaggctgtcccacctacttcccaccatcccccactggctccctcacccaagacccggctcgctcctttgggagcattccacccagcctgagtgatgacggctccccttcttcctcatcttcctcgtcgtcatcctcctcctccttctataatgggagcccccctgggagtctacaagtggccatggaggacagcagccgagtgtcccccagcaagagcaccagcaacatcaccaagctgaatggcatggtgttactgtgtaaagtgtgtggggacgttgcctcgggcttccactacggtgtgcacgcctgcgagggctgcaagggctttttccgtcggagcatccagcagaacatccagtacaaaaggtgtctgaagaatgagaattgctccatcgtccgcatcaatcgcaaccgctgccagcaatgtcgcttcaagaagtgtctctctgtgggcatgtctcgagacgctgtgcgttttgggcgcatccccaaacgagagaagcagcggatgcttgctgagatgcagagtgccatgaacctggccaacaaccagttgagcagccagtgcccgctggagacttcacccacccagcaccccaccccaggccccatgggcccctcgccaccccctgctccggtcccctcacccctggtgggcttctcccagtttccacaacagctgacgcctcccagatccccaagccctgagcccacagtggaggatgtgatatcccaggtggcccgggcccatcgagagatcttcacctacgcccatgacaagctgggcagctcacctggcaacttcaatgccaaccatgcatcaggtagccctccagccaccaccccacatcgctgggaaaatcagggctgcccacctgcccccaatgacaacaacaccttggctgcccagcgtcataacgaggccctaaatggtctgcgccaggctccctcctcctaccctcccacctggcctcctggccctgcacaccacagctgccaccagtccaacagcaacgggcaccgtctatgccccacccacgtgtatgcagccccagaaggcaaggcacctgccaacagtccccggcagggcaactcaaagaatgttctgctggcatgtcctatgaacatgtacccgcatggacgcagtgggcgaacggtgcaggagatctgggaggatttctccatgagcttcacgcccgctgtgcgggaggtggtagagtttgccaaacacatcccgggcttccgtgacctttctcagcatgaccaagtcaccctgcttaaggctggcacctttgaggtgctgatggtgcgctttgcttcgttgttcaacgtgaaggaccagacagtgatgttcctaagccgcaccacctacagcctgcaggagcttggtgccatgggcatgggagacctgctcagtgccatgttcgacttcagcgagaagctcaactccctggcgcttaccgaggaggagctgggcctcttcaccgcggtggtgcttgtctctgcagaccgctcgggcatggagaattccgcttcggtggagcagctccaggagacgctgctgcgggctcttcgggctctggtgctgaagaaccggcccttggagacttcccgcttcaccaagctgctgctcaagctgccggacctgcggaccctgaacaacatgcattccgagaagctgctgtccttccgggtggacgcccagtgacccgcccggccggccttctgccgctgcccccttgtacagaatcgaactctgcacttctctctcctttacgagacgaaaaggaaaagcaaaccagaatcttatttatattgttataaaatattccaagatgagcctctggccccctgagccttcttgtaaatacctgcctccctcccccatcaccgaacttcccctcctcccctatttaaaccactctgtctcccccacaaccctcccctggccctctgatttgttctgttcctgtctcaaatccaatagttcacagctg

SEQ ID NO: 28970 - DNA, 3578 bp, Homo sapiens
  Clone ID: LIB4803-019-E6_FLI
cccggaacgtctttttgcggacgccctcggagcagccgcgatggccagcaccaggagtatcgagctggagcactttgaggaacgggacaaaaggccgcggccggggtcgcggagaggggcccccagctcctccgggggcagcagcagctcgggccccaaggggaacgggctcatccccagtccggcgcacagtgcccactgcagcttctaccgcacgcggaccctgcaggccctcagctcggagaagaaggccaagaaggcgcgcttctaccggaacggggaccgctacttcaagggcctggtgtttgccatctccagcgaccgcttccggtccttcgatgcgctcctcatagagctcacccgctccctgtcggacaacgtgaacctgccccagggtgtccgcactatctacaccatcgacggcagccggaaggtcaccagcctggacgagctgctggaaggtgagagttacgtgtgtgcatccaatgaaccatttcgtaaagtcgattacaccaaaaatattaatccaaactggtctgtgaacatcaagggtgggacatcccgagcgctggctgctgcctcctctgtgaaaagtgaagtaaaagaaagtaaagatttcatcaaacccaagttagtgactgtgattcgaagtggagtgaagcctagaaaagccgtgcggatccttctgaataaaaagactgctcattcctttgaacaagtcttaacagatatcaccgaagccattaaactagactcaggagtcgtcaagaggctctgcaccctggatggaaagcaggttacttgtctgcaagacttttttggtgatgacgatgtttttattgcatgtggaccagaaaaatttcgttatgcccaagatgactttgtcctggatcatagtgaatgtcgtgtcctgaagtcatcttattctcgatcctcagctgttaagtattctggatccaaaagccctgggccctctcgacgcagcaaatcaccagcttcagtaaagcggggtggccactactccagtgcctattctacagccaaatccccagttaatggaactcccagcagccaactttctactcctaaatctacgaaatcctccagttcctctccaactagtccaggaagtttcagaggattaaagatttctgctcatggcagatcttcttccaatgtaaacggtggacctgagcttgaccgttgcataagtcctgaaggtgtgaatggaaacagatgctctgaatcatcaactcttcttgagaaatacaaaattggaaaggtcattggtgatggcaattttgcagtagtcaaagagtgtatagacaggtccactggaaaggagtttgccctaaagattatagacaaagccaaatgttgtggaaaggaacacctgattgagaatgaagtgtcaatactgcgccgagtgaaacatcccaatatcattatgctggtcgaggagatggaaacagcaactgagctctttctggtgatggaattggtcaaaggtggagatctctttgatgcaattacttcgtcgaccaagtacactgagagagatggcagtgccatggtgtacaacttagccaatgccctcaggtatctccatggcctcagcatcgtgcacagagacatcaaaccagagaatctcttggtgtgtgaatatcctgatggaaccaagtctttgaaactgggagactttgggcttgcgactgtggtagaaggccctttatacacagtctgtggcacacccacttatgtggctccagaaatcattgctgaaactggctatggcctgaaggtggacatttgggcagctggtgtgatcacatacatacttctctgtggattcccaccattccgaagtgagaacaatctccaggaagatctcttcgaccagatcttggctgggaagctggagtttccggccccctactgggataacatcacggactctgccaaggaattaatcagtcaaatgcttcaggtaaatgttgaagctcggtgtaccgcgggacaaatcctgagtcacccctgggtgtcagatgatgcctcccaggagaataacatgcaagctgaggtgacaggtaaactaaaacagcactttaataatgcgctccccaaacagaacagcactaccaccggggtctccgtcatcatgaacacggctctagataaggaggggcagattttctgcagcaagcactgtcaagacagcggcaggcctgggatggagcccatctctccagttcctccctcagtggaggagatccctgtgcctggggaagcagtcccggcccccacccctccggaatctcccaccccccactgtcctcccgctgccccgggtggtgagcgggcaggaacctggcgccgccaccgagactgagcctcctgcagacgggcgaagccgcctgctgccgcccaggaagccagccctctgctcggcctcgccggcctccctgctgcaggcctccctctcttcaccgcctgcgcctgagttcgcgggtcctccgcaggccgcctgggaaccggagcctggcgtgccggagcctggcctggtgctctgggctctgccttctggttcctggaggcatcaaaggctgcatccgttctgccaacagctgttcggagagactcgttccagatcatcccgtcattttcagtttgttggacattttacagcttcaccaggagaatgtgcaactttattccagcattcgatgcatttttatagaaacactttggaaacactttggatgaaccaaggccttttccttatttaagtagactcagaacactccctttcttttcttttctctctctctcttttttttttacgaaagacttagaattgcatttgtccttttgtgggtgtcctgtgagaggtgatatgggggctaagaggactggctttctaatagaagaagtgagcgcctgagaggacaatttggtcattggacacggattgcaggctttgagaagcgctcagaggcccagggcggcgggctcagccattcggcttggggcaccaggctccccagagacaatgctcagtattcattcatacacagacgatggaagaagccacttcttccctgggcggtgtgggtttcccccagctcttcccacacgtgtgttaggaaatgcccgtgaacttgccctctgggctttttaatgagaggcttggcgcatgcggcacccagcggctgcttccctgcaagccagcgacttgccgagcagaatgagctctgctcctgagccccggtagctgcttcctcatctgcatttcatctggagcagggcaggtaaccacaggaggaggcatgcccgaggcagccaggactgggcgggaaggtgctccctggatatactctgtgaaccttctggaaggctgctggcagtttttcctttttgtccaccaccctgctctttttaataattgtacataatccgtgtatttgttttacctgctcatcttctaaactggcgagccctatagttcgttctcattgttagattttgccttttacaagtgtccccaacctgcaataaacttttccctcttgaaaaaaagt

SEQ ID NO: 28971 - DNA, 3197 bp, Homo sapiens
  Clone ID: LIB4803-023-E11_FLI
ccctgagtggcgactccgtctccagccccgctgcggagcgcgggccggatctggggcggccagggcccggagccgcggagccctccccgccgcccggccgagcacgggaccccggcggggtgggcgcagggggcggccccgctctgggcgactgccgaggggcgggcggagggccgggctcggctggcggtggggcgggggccgccgggactgggcgcgcggcctgaagccagcccgggggcggcaggagagggacgcgcggcggcagcgagcgcaggtggacgtctgatttatgaagctccccatccacctatctgagtacctgacttctcaggactgacacctacagcatcaggtacacagcttctcctagcatgacttcgatctgatcagcaaacaagaaaatttgtctcccgtagttctggggcgtgttcaccacctacaaccacagagctgtcatggctgccatctctacttccatccctgtaatttcacagccccagttcacagccatgaatgaaccacagtgcttctacaacgagtccattgccttcttttataaccgaagtggaaagcatcttgccacagaatggaacacagtcagcaagctggtgatgggacttggaatcactgtttgtatcttcatcatgttggccaacctattggtcatggtggcaatctatgtcaaccgccgcttccattttcctatttattacctaatggctaatctggctgctgcagacttctttgctgggttggcctacttctatctcatgttcaacacaggacccaatactcggagactgactgttagcacatggctccttcgtcagggcctcattgacaccagcctgacggcatctgtggccaacttactggctattgcaatcgagaggcacattacggttttccgcatgcagctccacacacggatgagcaaccggcgggtagtggtggtcattgtggtcatctggactatggccatcgttatgggtgctatacccagtgtgggctggaactgtatctgtgatattgaaaattgttccaacatggcacccctctacagtgactcttacttagtcttctgggccattttcaacttggtgacctttgtggtaatggtggttctctatgctcacatctttggctatgttcgccagaggactatgagaatgtctcggcatagttctggaccccggcggaatcgggataccatgatgagtcttctgaagactgtggtcattgtgcttggggcctttatcatctgctggactcctggattggttttgttacttctagacgtgtgctgtccacagtgcgacgtgctggcctatgagaaattcttccttctccttgctgaattcaactctgccatgaaccccatcatttactcctaccgtgacaaagaaatgagcgccacctttaggcagatcctctgctgccagcgcagtgagaaccccaccggccccacagaaggctcagaccgctcggcttcctccctcaaccacaccatcttggctggagttcacagcaatgaccactctgtggtttagaacggaaactgagatgaggaaccagccgtcctctcttggaggataaacagcctccccctacccaattgccagggcaaggtggggtgtgagagaggagaaaagtcaactcatgtacttaaacactaaccaatgacagtatttgttcctggaccccacaagacttgatatatattgaaaattagcttatgtgacaaccctcatcttgatccccatcccttctgaaagtaggaagttggagctcttgcaatggaattcaagaacagactctggagtgtccatttagactacactaactagacttttaaaagattttgtgtggtttggtgcaagtcagaataaattctggctagttgaatccacaacttcatttatatacaggcttcccttttttatttttaaaggatacgtttcacttaataaacacgtttatgcctatcagcatgtttgtgatggatgagactatggactgcttttaaactaccataattccattttttcccttacataggaaaactgtaagttggaattatcttttgtttagaaagcatgcatgtaatgtatgtatgcagtatgccttacttaaaaagattaaaaggatactaatgttaaatcttctaggaaatagaacctagacttcaaagccagtatttgtttaggtcatgaagcaaacaatgctctaatcacaatattaactgtttaattaaaatgttgtaacaagtataaaacagggaatgtaagtttattaccaaagtgatatgtattccaaaaaagtcatagaagatgaagcactataatattgttcccatatatttaaaatacccaagtacattctaattaccagtatatcagaggaaaattttcgtagtctttgtaaaataatatactcatcatagaaaacttgaaaaatacagaaatgtataaaaaagcaaaaatgattactgataatatcacaacccagaagtaaccacctttaaaaagcaacccccatgtatgcctatatgtgtattgtatactttttttacataattggagtcatactgtaaacagttttataagtagatctttttcattgcaaaattgccacattttcttatggcattaaaaattttacaaaaacataattttaatggctatattatattccatttaatggatgcaactcagtttatttaaccattcccatgttgttaactatttaggttgtttctaattttgattattataaagttgcagaaatttggtgtacataaaactgtctccatataattgattattaggatatattcccatgaaggattctttttttaaaaaaatgtgaaatgtcatcttgtacttacacctttcatgcaaagggatttcctgcttttgtactgcatgggtggcagttgtgaggaaaagccagtcaaatgacctttttacaaaagaaatgcagtggtcacttcagttgagagtgactttttaatacaacaagatcaactagaagaattcaactgtctcaagaatcaaggtaccccaatatatctcgcaattccaaactttgtttgagggactcgttatccagctcttggtagccacacctgcaatgtaaaatggaagaaaatgcaaagaaaccaaatgtccgagtgaataaaggattgtcatatc

SEQ ID NO: 28972 - DNA, 2768 bp, Homo sapiens
  Clone ID: LIB4803-040-F6_FLI
acgtgggctggtattgagcgtgcagctaagctggtgactgcttcagagaatctcatggctggaaatccgggggctgcggtttccgaggccctttccagccaaggaaaagctacacaaaaagcctggatcactcatcgaaccacccctgaagccagtgaaggctctctcgcctcgccctctagcgttcgtctggagtagcgccaccccggcttcctggggacacagggttggcaccatggggcccaccagcgtcccgctggtcaaggcccaccgcagctcggtctctgactacgtcaactatgatatcatcgtccggcattacaactacacgggaaagctgaatatcagcgcggacaaggagaacagcattaaactgacctcggtggtgttcattctcatctgctgctttatcatcctggagaacatctttgtcttgctgaccatttggaaaaccaagaaattccaccgacccatgtactattttattggcaatctggccctctcagacctgttggcaggagtagcctacacagctaacctgctcttgtctggggccaccacctacaagctcactcccgcccagtggtttctgcgggaagggagtatgtttgtggccctgtcagcctccgtgttcagtctcctcgccatcgccattgagcgctatatcacaatgctgaaaatgaaactccacaacgggagcaataacttccgcctcttcctgctaatcagcgcctgctgggtcatctccctcatcctgggtggcctgcctatcatgggctggaactgcatcagtgcgctgtccagctgctccaccgtgctgccgctctaccacaagcactatatcctcttctgcaccacggtcttcactctgcttctgctctccatcgtcattctgtactgcagaatctactccttggtcaggactcggagccgccgcctgacgttccgcaagaacatttccaaggccagccgcagctctgagaagtcgctggcgctgctcaagaccgtaattatcgtcctgagcgtcttcatcgcctgctgggcaccgctcttcatcctgctcctgctggatgtgggctgcaaggtgaagacctgtgacatcctcttcagagcggagtacttcctggtgttagctgtgctcaactccggcaccaaccccatcatttacactctgaccaacaaggagatgcgtcgggccttcatccggatcatgtcctgctgcaagtgcccgagcggagactctgctggcaaattcaagcgacccatcatcgccggcatggaattcagccgcagcaaatcggacaattcctcccacccccagaaagacgaaggggacaacccagagaccattatgtcttctggaaacgtcaactcttcttcctagaactggaagctgtccacccaccggaagcgctctttacttggtcgctggccaccccagtgtttggaaaaaaatctctgggcttcgactgctgccagggaggagctgctgcaagccagagggaggaagggggagaatacgaacagcctggtggtgtcgggtgttggtgggtagagttagttcctgtgaacaatgcactgggaagggtggagatcaggtcccggcctggaatatattttctacccccctggagctttgattttgcactgagccaaaggtctagcattgtcaagctcctaaagggttcatttggcccctcctcaaagactaatgtccccatgtgaaagcgtctctttgtctggagctttgaggagatgttttccttcactttagtttcaaacccaagtgagtgtgtgcacttctgcttctttagggatgccctgtacatcccacaccccaccctcccttcccttcatacccctcctcaacgttcttttactttatactttaactacctgagagttatcagagctggggttgtggaatgatcgatcatctatagcaaataggctatgttgagtacgtaggctgtgggaagatgaagatggtttggaggtgtaaaacaatgtccttcgctgaggccaaagtttccatgtaagcgggatccgttttttggaatttggttgaagtcactttgatttctttaaaaaacatcttttcaatgaaatgtgttaccatttcatatccattgaagccgaaatctgcataaggaagcccactttatctaaatgatattagccaggatccttggtgtcctaggagaaacagacaagcaaaacaaagtgaaaaccgaatggattaacttttgcaaaccaagggagatttcttagcaaatgagtctaacaaatatgacatctgtctttggcacttttgttgatgtttatttcagaatgttgtgtgattcatttcaagcaacaacatggttgtattttgttgtgttaaaagtacttttcttgatttttgaatgtatttgtttcagcagaagtcattttattggatttttctaacccgtgttaacaccattgaatgtgtatttcttaagaaaataccaccctcttgtgcccttaaaagcattactttaactggtagggaacgccagaaacttttcagtccagctattcattagatagtaattgaagatatgtataaatattacaaagaataaaaatatattactgtctctttagtatggttttcagtgcaattaaaccgagagatgtcttgtttttttaaaaagaatagtatttaataggtttctgacttttgtggatcattttgcacatagctttatcaacttttaaacattaataaactgatttttttaaag

SEQ ID NO: 28973 - DNA, 1757 bp, Homo sapiens
  Clone ID: LIB4806-059-H10_FLI
cagaagcctgcatttctgcattctgcttaattccctttccttagatttgaaagaagccaacactaaaccacaaatatacaacaaggccattttctcaaacgagagtcagcctttaacgaaatgaccatggttgacacagagatgccattctggcccaccaactttgggatcagctccgtggatctctccgtaatggaagaccactcccactcctttgatatcaagcccttcactactgttgacttctccagcatttctactccacattacgaagacattccattcacaagaacagatccagtggttgcagattacaagtatgacctgaaacttcaagagtaccaaagtgcaatcaaagtggagcctgcatctccaccttattattctgagaagactcagctctacaataagcctcatgaagagccttccaactccctcatggcaattgaatgtcgtgtctgtggagataaagcttctggatttcactatggagttcatgcttgtgaaggatgcaagggtttcttccggagaacaatcagattgaagcttatctatgacagatgtgatcttaactgtcggatccacaaaaaaagtagaaataaatgtcagtactgtcggtttcagaaatgccttgcagtggggatgtctcataatgccatcaggtttgggcggatgccacaggccgagaaggagaagctgttggcggagatctccagtgatatcgaccagctgaatccagagtccgctgacctccgggccctggcaaaacatttgtatgactcatacataaagtccttcccgctgaccaaagcaaaggcgagggcgatcttgacaggaaagacaacagacaaatcaccattcgttatctatgacatgaattccttaatgatgggagaagataaaatcaagttcaaacacatcacccccctgcaggagcagagcaaagaggtggccatccgcatctttcagggctgccagtttcgctccgtggaggctgtgcaggagatcacagagtatgccaaaagcattcctggttttgtaaatcttgacttgaacgaccaagtaactctcctcaaatatggagtccacgagatcatttacacaatgctggcctccttgatgaataaagatggggttctcatatccgagggccaaggcttcatgacaagggagtttctaaagagcctgcgaaagccttttggtgactttatggagcccaagtttgagtttgctgtgaagttcaatgcactggaattagatgacagcgacttggcaatatttattgctgtcattattctcagtggagaccgcccaggtttgctgaatgtgaagcccattgaagacattcaagacaacctgctacaagccctggagctccagctgaagctgaaccaccctgagtcctcacagctgtttgccaagctgctccagaaaatgacagacctcagacagattgtcacggaacacgtgcagctactgcaggtgatcaagaagacggagacagacatgagtcttcacccgctcctgcaggagatctacaaggacttgtactagcagagagtcctgagccactgccaacatttcccttcttccagttgcactattctgagggaaaatctgacacctaagaaatttactgtgaaaaagcattttaaaaagaaaaggttttagaatatgatctattttatgcatattgtttataaagacacatttacaatttacttttaatattaaaaattaccatattatgaaattgc

SEQ ID NO: 28974 - DNA, 3128 bp, Homo sapiens
  Clone ID: LIB4809-016-A10_FLI
ggctctaggctgccgcggcggctctaggctgggctgctgggcgcgaggccagggcgggccgggagaggctgcgccggcggcggatcgcgcagagggcggtggcctgggctggccgaaccatggcggccccggagccggcgccgaggcgggcccgggaacgggagcgggagcgggaggacgagagcgaggacgagagcgacatcctggaggaaagcccgtgtggtcgctggcaaaagcgacgggagcaggtaaaccaagggaacatgccagggcttcagagcaccttcctagccatggacacggaggagggggtagaggtggtgtggaacgagctccacttcggagacaggaaggccttcgcggcgcacgaggagaagatccagaccgtgttcgagcagctggtgctggtggaccacccgaacatcgtgaagttgcacaagtactggctggatacctctgaggcctgcgcgagggtcatcttcatcacagagtacgtgtcatcaggcagcctcaagcaattcctcaaaaagaccaagaagaaccacaaggccatgaacgcccgggtatggggagcgggctggggcagccacggggacaggacggggttggggcagcctcggggactgggatggtgagggggtgcccggcggcctcggacaggggctgggcgaggatgcggggcgggctccgcaggcccagccgcctctcctgcgcccacccgaccgacggagtcgtgcgtccgccgccaggcctggaagcgctggtgcacgcagatcctgtctgcgctcagcttcctgcacgcctgcagccccccaatcatccacgggaacctgaccagcgacaccatcttcattcagcacaacggcctcatcaagatcggctccgtgtggcaccgaatcttctccaatgcacttccagatgatctccgaagccccatccgcgctgagcgagaggaacttcggaacctgcacttcttccccccagagtatggagaggtggccgatgggaccgctgtggacatcttctcctttgggatgtgtgcgctggagatggctgtactggaaatccagaccaatggggacacccgggtcacagaggaggccattgctcgcgccaggcactcgctgagtgaccccaacatgcgggagttcatcctttgctgcctggcccgggaccctgcccgccggccctctgcccacagcctcctcttccaccgcgtgctcttcgaggtgcactcgctgaagctcctggcagcccactgcttcatccagcaccagtacctcatgcctgagaatgtggtggaggagaagaccaaggccatggacctgcacgcggtcttggcggagcttccccggccccgcaggcccccgctgcagtggcggtactcgcaagtctccttcatggagctggacaaattcctggaggatgtcaggaatggaatctacccactgatgaactttgcagccactcgacccctggggctgccccgtgtgctggccccacccccggaggaggtccaaaaggccaagaccccgacgccagagccctttgactctgagaccagaaaggtcatccagatgcagtgcaacctggagagaagcgaggacaaggcgcgctggcatctcactctgcttctggtgctggaagaccggctgcaccggcagctgacctacgacctgctcccaacggacagcgcccaggacctcgcctcggagctcgtgcactatggcttcctccacgaggtgcgctgggcggtgcggcgcggcctggcggagggggcgcacggggcaggccgcgcccctccgtcccccatgcctccctccttccgcaggacgaccggatgaagctggccgccttcctggagagcaccttcctcaagtaccgtgggacccaggcctgacccggagccccagccccaggggaccatgccggggtgctgcccgggcaggccatgttggggagactccagcaccgtggggctgccctcctccatgcgcctgggagcacaaaggccccggtagtgaaggaaccccccgtctcctgagagtggggctgaccctgccttgggcgccgaggggttggggggtgggtgtgggggagccgttaggcctcccaggtccttaggatcagggttgcccccagaaccccttcccatatcctccattctccgccctgagttcctacccaggctgcctggctggggccactgcctcctcagcatgcaggaggctgccctgtagggaaccccagctctggggcttgggggtgagggtcagccctggacagacctctgcccagggaactgctccatggggtctgggagagcagccatcccctgctggcaccatagacccacacaaggagcctgcacagcaagccagcggtgacacacctgcaggtgtcaggcatggcactgggcacaacagggacctggcaggagaaacagaccacagagaggtctggagttgaggctgttgtcagcaaagcccctggtcccacacagctctgccctagagccacctcttgattcttggcttgcctctcctccaattccaaacttagtgaaatggccttaagcattttaaactgtatgtatacattagcgcattcatgcctttctaaacgcatttcaaatgtcaaccaggaaggcacaccactgtattagttttatactgccgctgtaaaatttaccacaaacttagtgacttaacacaaatttattgcaattctgtaggctggaagtctgactatgggtctcactggactagaatcaaggctggcaggctgccttccttcctggaggttctaggggagactctgtctcctgctccttcaggctgctggcagaatccacatcctttcggtggcagggccaaggtccccactttcttgctgactgtaaactaaggccacttccagcttgtagaggctgcctacattccttggctcttggccccctcctccatcttcagagctagcaggttcagtctgtgtcacgaaccatttctctggttccctgcagacaggaaaggttgtccctaaggactcatgagattaggttgggcccagccagataatacatgataatctccctcctcaaggtttttaatattaaacacatctgcagg

SEQ ID NO: 28975 - DNA, 935 bp, Zea mays
  Clone ID: LIB4826-001-B2_FLI
ctcgaggccggccgagagcactcaccaagatccagcatacacttatcccatccactagctaagcgcgccatggcaaagttcgctcttggtcaccaccgcgaggcctccgacgccggctgcgtccgtgccgtcctcgccgagttcatcctcaccttcctcttcgtcttcgccggcgttggctccgccatggcaacagggaagctggccggcggcggcggggacacggtggtgggcctgacggcggtggcgctggcgcacacgctggtggtggccgtcatggtgtcagcggggctgcacgtctccggcggccacatcaacccggccgtgacgctgggcctcgccgccacgggccgcatcacgctgttccgctccgcgctctacgtggccgcccagctgctcggctccacgctcgcctgcctcctcctcgctttcctcgcagttgccgacagcggcgtgcccgtgcacgcgctgggcaccggcgtcggcgcgctccggggcgtgctcatggaggccgtgctcaccttctcgctgctcttcgcggtctacgccaccgtcgtcgacccgcgccgcgccgtcggcggcatgggcccgctgctggtgggactggtcgtcggcgccaacgtgctcgccggcgggcccttctccggcgcgtccatgaaccccgcgcgctccttcggccccgcgctcgtggctggggtgtgggccgaccactgggtctactgggtcgggcctcttatcggtgggccgctcgctgggctggtctatgacggcctcttcatggcccagggcggacacgagcctcttcccagggatgacaccgacttctaggcagtaggtgtgtgttctcctgaataatttgaattgaaaacacatgtattgaaacctctaatgtttcggtttcgattcaaatggaatggaatagaagcagcagtact

SEQ ID NO: 28976 - DNA, 599 bp, Zea mays
  Clone ID: LIB4826-001-B6_FLI
taccctcgaggccggccgggaaccccaccgcagcacagcgccggcaaccgccgccatcgatcgatcgcccggaaactgacctctaccgatgtctggagccggcgaggaggataagaagcccgcggagggcggcgcccacatcaaccttaaggtcaagggacaggatggcaatgaggtgttctttcgcataaagaggtccacccagctgaagaagctgatgaacgcctattgcgaccgccagtctgtggacatgaatgccattgcattcctgtttgatggccgcaggcttcgcggcgagcagacccctgatgagctggagatggaggacggcgacgagatcgacgccatgcttcaccagaccggaggcagcgttcctagcaccacctaaaagcagcagctgcggagcctcgttttgctctccgccctgcgtagtactaaacaaaagggaaaaagtctttttaaggaacttgtgatgctctggctccttgtgccattgctgagggacatccttagcctttatttagtggtatggtttggtactttgttctgtcatcactcgtttatctatccctaatacatgccgccatgtttgtacttct

SEQ ID NO: 28977 - DNA, 1067 bp, Zea mays
  Clone ID: LIB4826-001-B8_FLI
ccgggacctttacacatatctccgtatttacaaattaggttgttgatgtaggctgtacgcacctgctggtttgctactcgatcctatatatcgtccaatcctatctgacctctcgacatctggtccttgattactcgtcctttttgcttggtgcctgtgtatatcgtcgccccggccgcttgagctagcttcctctagtgctcgctctcgtcgtcgatcggttgtttgcatagcccacggcgagccgaagcaatgtcgtcggcgcccctgcagatcgcgccggtgccggagcatgtgtgctacgtgcactgcaacttctgcaacacaattctcgcggtcagtgtcccgagtcacagcatgctgaacatcgtcacagtccgttgtgggcactgcactagcctgctgtcggtgaacttgagaggactcattcaatcacttcctgtccagaaccactactactcccagcagcaggagaatttcacggtccaaaatatgggttttactgaaaattaccctgagtacgcaccttcgtaccgcatgccaacgacgctgtcagcgaaaggtgatctggatcatatgctgcacgtgcgtgctccagagaagaggcaacgtgttccttcagcatataacagatttattaaggaggagatacgaaggattaaagcatgcaacccggacataagccatagggaagccttcagcactgcagcaaagaattgggcacattttccgaatattcattttggtctagggccctgtgaaagtagcaacaatcttgatgaggccaccggtgcgatgtgccatccccagaaagtccaagatctctactaagacctatatcagcactactctttgtttcctcttagttctggactagttcgtgagtggcatatatatatgcatgagtgtgatatgatcatgaggtaaggaattatgattaagatgatatatatgtacgagatgaacatgcccctagctagtttcatgaaagactaaataaggatcgtcatctcaccatgttatcataggtagtaactattgtttgaaataaattatcctttgtgtac

SEQ ID NO: 28978 - DNA, 1298 bp, Zea mays
  Clone ID: LIB4826-001-F4_FLI
cgatagctagacaatggccgtcgtggcacgatccgccagcggcgttgcttcgtcctggtgctcggaacggccattgtcgtcgccttctccgccttattcggcacgacgtccggcgccgcgctagtgggtgactcgtgcagagcgtcatcgtccacctcggacggaggcggctgcggcaaggggcttcgttgcaccacctgcgtgcctccaccggggacgggtccggccgcgtgcgcgcggaccacgcccgtggacccaaagacacacggcacgggtctccccttcaacaggtactcatggctgacgacgcacaactcgtttgcggtggtaggcaccaagtcgccgctggggtctgccatcatctctccgcccaaccaggaggactcggtgaccgaccagctgaagaacggcgtgcggggcctgatgctggatgcctacgacttcaacgacgctgtgtggttctgccactccttccatggtcgttgcctgaccttcacagcctacgtgccggcgctgagcgtgcttacggaggtccgggtgttcctggacgccaacccgtccgaggtggtcaccgtcttcctcgaggactacgcggcgccagggtcactcagcaacaccttcaatgccgccggactgtccaagtactggttccccgaggctcaaatgcctagccctagtaagggcggcggtgactggccgctgctcagggacatgatcgccgataaccaccggctcatcgtgctcacatccaagaaagggaagcaggggacggaggggctcgcgtaccagtgggactacgtcgtggaaacccaatacgggagcgagggcatggcggatggcagttgcccaaagcggaccgagtcgaagcccatggactctaaggcccagtcactagtgctgctgaacttcttcaccagcaacccgagccaaagctgggcctgcagcaacaactccgcgccgctcatcagcaggcttaacgcctgctaccacgcctccgccaaacgatggccaaactacatcgccgtcgatttctacatgaggagcaacggcggcggagctcccctggccaccgacatcgccaatggccgcctccagtgtggccacgacaacatcgcacactgcaagatttcttctgcatcggcaccggcacccgcttcggcttcttcaccggcacccgcttcagcctcttcaccgtctcctgccccggcaccggattttgccgccacttctcccgccatctcatcgtctcctgggccggcgcctgggcctcttaatagctactactagtagttaaaagg

SEQ ID NO: 28979 - DNA, 1242 bp, Zea mays
  Clone ID: LIB4826-002-C2_FLI
ccgggcaccggcggccacactccaactgctcgaagaaagcacttgcatctccgtaatagtcataccatatcgtcccttgatcggtcgaccatggcagcatcagtagcggcagccacgagactcagcggcggcggcggcggcgtcgccctattgctcctggtgctgctggccgccggcacctccagctcgtcggcgcagctctccaccggattctactcgcactcgtgccccggcgtgcacgacgccgtcaagtcggtgctgcaggccgccatagccagggagcagcgcatgggggcctccatcctccgcctcttcttccacgactgcttcgtccagggctgcgacgcgtcgttgctgctggacgacacgcccagcttccagggcgagaagatggccaagcctaacaacggctccgtcagaggcttcgaggtcatcgacgccatcaagtccgccgtcgacaaggcctgccccggggtcgtctcctgcgccgacatcctcgccatcgccgccagggacagcgttgtcaccctcggaggtccgaactgggacgtcaagcttggccggagggactccaggacggcgagcttcagcggcgccaacaacaacatcccgccgcccacgtctggcctcgccaacctcacctccctcttcgccgcgcagggtctctcccagaaagacatggttgcgctctccggagctcacaccaccggccaagcacgctgcaccaacttcagagcgcacgtgtacaacgacaccaacatcgacggcgccttcgcgagagcaaggcgatcggtgtgcccggcagcagcctcatcaggctcaggcggcgacaacaacctggcgcctctggacctccagaccccgaccgttttcgagaacgactactacaggaaccttgtctgcaggaaggggctcctgcactccgaccaggagctcttcaatggcgcggccaccgacgcgcaggtccaggcgtacgtcagcagccagagcgcgttcttcgcggacttcgtggctggcatggtcaagatgggcgacatctcgccgctcacgggctccagcggggagatcaggaagaactgcagaaggatcaattaagctagaggcagcgcgcttctaagcgtataccttgtatcgttgaagtttctaattcctccgattcaaattaagttgtcaaatcactgtgctatgctgtaccaatgcgttggcatgtctattcgtttgaataaattagtcctatcccct

SEQ ID NO: 28980 - DNA, 687 bp, Zea mays
  Clone ID: LIB4826-002-C8_FLI
ccggccgggagaaaggaatcacacggcacgccgtctcgtgtgcttcctcctaggtcattccacttccaccaatctgtctcccaatctttcttgctgctccaatccgctctctttactcggccagcggaaggggagaggagggcgagatgacggtggagaaggtggacgcggggctttccgacttcgaagcccacttcgatcgcctcttcgcttccccggacgccgcctccgacggcaaggtgaagctgctgctcttcctggccgaccgcaagcctgactcctccctctcctggtgccccgactgcaacgtggcggagccggtgatctacgagcggctggaggcactggagggcaaggacgcggtgctcctgcgcgcctacgtcggggacaagcccacttggcgcgacccggcgcacccgtggagggtggaccccaggttcgggctcaagggcgtgccaacgctgatccgctgggaggatggcgccgccgccgcccgcctcggggacgacgaggcgcacctcaaggacaaggttgacgccctcctctgcgctggcggcaactgagtactgactactgacagatccggtttcccgttcgggttccatctgcgtagagtggccataataaataacatgtactgtaattcagttcatctacatgccggaccagaagctggggaatcgtgag

SEQ ID NO: 28981 - DNA, 902 bp, Zea mays
  Clone ID: LIB4826-004-F11_FLI
ccggggaaaggaaagtgctactgggcattggctactgccaactacccgtggggtcccgtggaagggaagagagcatcgccggagttggggacggcgcgccgacgaggaacaaaagaagacggcggtggggcggagatggggagccctctgagcgggtggccgtcttacaacccgcacaacttcagccagctcgtcccggccgacccatccgcacagccctcgaatgtcacaccagccacttatgttgcaacccacaggactgatccgccacccaatcaagtgataacaacggagtcgaggaacatcctgctgaggcacttctaccagaaatccgagaagctgaggcccaagagacctgccccggacaacctcgatacggagaacaacagcagcagcaacaacaagcaggccaggggaccggtaggcgacgtcggtgggcagtcgtcgagcgcgagaagctgaagccacagctggtggccgtccactcctcccctgcctgcctgcttctttctcatctctgggtgtcgtcatgcagaggcagaggcagaggcagatgcagccctgtgttgtctgtcctcttcgctactaacctaatctgaagttagggttacatacatggatatcggatagatgggtgtacataagctcctgagagcagtcttgtgttatcctaaatgctaaacggtaaacagcgggcaacatcctctgtttagcgtataatcggactacacgtgcctgtaggcggaataaaaaaacggattatacggggggagtaaacggcataaatggccaacacggttagctactgagtagtgtttaaacggcgtgtaaatagtttaagggtttgttcggttagcattcaatccatatagattgagtgtgattggatgagtttgaatcct

SEQ ID NO: 28982 - DNA, 1229 bp, Zea mays
  Clone ID: LIB4826-005-F7_FLI
ccgggacttccatcccattcccttccagacatcgacatggagccgttttttctgttcgtagggctggcccttgttctctgcttcctcaccccgtactaccgccacttgcaatctaagaaaacgagccctttggagccgaccgaatggccaatagtcggccatctccccggcttggtcgccaacatccatcacttccacgactgggccaccggcgtcctcgccggcgtgggctacaacttcgaagcccgcgcaggtcgcaccggcgtgcggtacttcatcacctgcgacccctccaacgtgcgccacatcttcacgtccaacttcgccaactaccctaaaggcgaagagtacgccgccatcttcgacgtcctgggcggcggcatcttcaacgccgacggggagtcgtggcggcgccagcgagtgaaggcccagatgctcatgaccggccctcggtttcgagccttcacggcgcggtgcagccgcgacaaggtggagaggagcctcctgcctttcctcgcccaccacgccgccgacgacggacgaacgccgccgtgcgacctgcacgacgtgttcctgaggctgacgttcgacatgacatgcactctcgtcttcggcgtcgaccctgggtgcctggcgttcggcttgcccgtggtccccttcgcgcgcgccatggacgacgcgctggagacgcttttcctccggcacatcatccccatggcgtgctggaagctgatgcacgtactggaggtagggcaagagaggaagatggccgcggctcgaaggacgatcgacagcttcgtcgccgccaccgtcgcgaaacgcagggccgacaagctgaaaggatgtgaatgctgcgtcagtaactcgtatgacttgctgtcatccttcatctgccacgaggaggacggctcgagcgaaaacgacgacgacgtgttcttacgtgacacgacggtgaacctcctgctcgccggccgggacaccacaggcgcggctctgtcgtggttcttctacctcgtctccaagaaccctcgcgtcgagcagaaaatactggacgagctcacgcccatcgctgcttcacggcggacgaaaggtgcagaagatgctgcacacgccgccagcggcatggtgaccttcgacgcagacgagctcggcagcctggtttaccttcacgcggcgctgagcgagtgtctgaggttgtacccgtccgtcccgttcgagcacaaggtcgc

SEQ ID NO: 28983 - DNA, 808 bp, Zea mays
  Clone ID: LIB4826-006-H12_FLI
atccagatccggacccgaccgccgatccatccaaatcacccttccccttccccttctcttccaccaccaccaccaccaggccgccgcctcgtcgtcctcaattctcctttcgaatttagaatccccgtgctgagagttgagtgccgccttggttgctccgtactggactcgattcctcatcgcagcagaagcatcccgtcccctccgcttctccttgctctgctctggtaacacacagacaaaaaaaaaaatagcatcatgtcggaggtgaaggactccaatgtgcctgctgcacttgatggaaatcctcaacctacggaccaaactgaagacaattctatgccctcagcacagcaacaggaagaagcaatcaagaagaagtttggaggactaatgcccaaaaagcccccactcatctcaaaggatcatgagcgggcctactttgattctgctgactgggctctagggaagcaaggtgttgccaaacccaaaggaccgctggaggcacttaggcccaagcttcagccaacacgccaacaacagcaacaacgtgcaaggcgccctatttacacttcgtcagaaaacgaggacggagacggtgctggtgctgaggatatgaacatcaattgaagtggagtggaatgcctgcctgaattggttgatgagcaagtcgtcactatatgtcaagtgctgtagtttgctttgcaattattggaggaattaaatgatcgtctgctgggttcatgagtcgaacatttgatatatatggcctattatttactactatatatttttattatctgtggat

SEQ ID NO: 28984 - DNA, 1145 bp, Zea mays
  Clone ID: LIB4826-007-D6_FLI
ccggaagaccaaccaacccacttctgactgaccactgtgccgcgccgtggtcaccggacggacacacagaacgacgatggccgcgtcggcgctgcaccagaccaccagcttcctcgggcaggccctggtcgcccgcgccgccggcgtcgatgccgacggccgcatcaccatgcgccgcaccgtcaagagcgttccccagagcatatggtacggccctgatcgccccaagtaccttggcccgttctccgagcagacgccgtcgtacctgaccggcgagttccccggcgactatgggtgggacaccgcgggcctctcggctgacccggagacgttcgcgcgcaaccgggagctggaggtgatccactcccggtgggcgatgctgggcgcgctgggctgcgtgtttccggagatcctggctaagaacggcgtcaagttcggcgaggcggtgtggttcaaggccggcgcgcagatcttctcggagggcgggctggactacctggggaaccccaacctggtgcacgcacagagcatcctggccatctgggcgtgccaggtggtgctcatgggcttcgtcgagggctaccgcgtcggcggcggcccgctcggggaagggctcgacaaggtgtaccccggcggcgccttcgacccgctgggcctcgccgacgacccggacaccgccgccgagctcaaggtgaaggagctcaagaacggccgccttgccatgttctccatgttcggcttcttcgtgcaggccatcgtcaccggcaagggccccatcgagaacctcttcgaccacgtcgccgaccccgtcgccaacaacgcctgggcatacgccacgaacttcgtccccggcaactaactgactgagcaacgccgtacatgtgtactaccatcagatccatccattcgttcgtccgtccgtcgagtgaacagtgtggtcttctctgtactctacttgttcagatcgtaggcgtgtagtagttgcaccagccggcgtatgctcatgatcgatgtgtgctcatcaatcaatgtcaatggctgcctgctgtaagcggtcgatgtaaactaagcacagacgcatgtatcgtcatcagtggatgaatcaatctatcgatggcctgtgccattcatttttgaatcgatcg

SEQ ID NO: 28985 - DNA, 1333 bp, Zea mays
  Clone ID: LIB4826-007-F11_FLI
ctcgaggccggccgggattccccgtttgcctcgtttaccattcctccccaaaacacatcctgcgatcctcgaagcctccgccgagcatcgatcatgtcggcctactgcggcaagtacgcggatgagctcatcaagaatgctgcctacatcggcacccctggcaagggtatccttgctgctgatgagtcaactggcaccattggtaagcgcctttccagcatcaatgtcgagaacgtggaggagaaccggcgggctctccgtgagctcctgttctgctgccctggtgccctccagtacatcagcggtgtgatcctcttcgaggagaccctctaccagaagaccaaggatggcaagccttttgtcgatgtcctcaaggagggaggcgtcctccctggcatcaaggtcgacaagggcaccactgaggttgttggcaccgacaaggagaccaccacccagggccacgatgacctcggcaagcgctgcgctaagtactacgaggccggtgcccgctttgccaagtggcgtgctgttctcaagattggccccaacgagccgtcacagcttgccattgacctgaatgctcagggtctggctcgctacgccatcatctgccaggagaacggtctggtgccaattgttgagcctgagatccttgttgatggccctcatgacattgatcgctgcgcttacgtcactgagacagtccttgctgcctgctacaaggctctcaacgagcaccatgtcctcctggagggtaccctcctgaagcccaacatggtgactcctggctccgactctaagaaggtgacacctgaggtgatcgcccagtacaccgtccgtaccctccagaggaccgtccctgctgctgtgcctgctgttgtcttcctctccggtggacagagcgaggaggaggccaccctgaatctcaatgccatgaacaagctcggcaccaagaagccatgggccctgtccttctccttcggccgtgccctccaggcgagcaccctcaaggcctgggctggcaaggtggagaacgtggagaaggctagagcggccttcctcgccaggtgcaaggccaactccgaggctaccctcggcacctacaagggtgatgctgccgccgacaccgagagccttcacgtcaaggactacaagtactgagttgcttctctttgcgatcccgttgttttggaactcctgcctgcgagtaggttgctgagtgttgtttgcttgttagagcttttatattcggacatgaaaaaaacatgcttcctatgtggatgatggttatctttatattcgtatattaactactagtctctgttgttaaaat

SEQ ID NO: 28986 - DNA, 932 bp, Zea mays
  Clone ID: LIB4826-009-A5_FLI
ccgggttggctgtctctacctcctcctcctcctcctccagtcctccctcgctcttcctcctcgcgaaacgacgcggaggaggttgccggtcaggccaccgccgcgcccgcccgcccgccggagacccggtccgcagccaacgcgtgacgtataagggggacgcagccatggccacttcctcctcgtcgctcacaacgctccactcccgcttcttctctcccaccccttcctcgccctacatggcggcgctgccccgacggcgaagggccggagcgcggtaccctcgcatccgggccattgacctcgaccagaacacgattgtggccatttcggtgggcgtcgtcagcatcgccgtgggaataggtgtccctgtgttctacgagacccaaatcgacaatgccgccaagagggataatacacagccgtgcttcccctgcagtggttctggcgcgcaggtatgcaggttttgcagtggaaagggcattgttactgtagtacttggtgcaggcgagactgaagaatcgcagtgtgtcaactgcgagggcatcggctctttgacatgcactacatgccaaggcaccggaatccaaccacgctatcttgaccgcagggagttcaaggatgacgattgatgaaggccttattgccatcttcggtagtatgtcaaatatgtaacatcacgtctaatttgaggacaaagttgcggactcagaagagatgtacctatcagccatagcattcatctgattgttttgtgtttatatgttccagtttggtaaatatagatggcagtcgccctccagcagagaagataatgtctcaaatttaagtgttgaacgttttttgcgggagatgtagttcttctggttttgtcatgcataattgcaaataaacaacgcgagtaaacaaaaaattcatttgtctttgcaact

SEQ ID NO: 28987 - DNA, 1198 bp, Zea mays
  Clone ID: LIB4826-009-B6_FLI
ctcgaggccggccgggaccaacctcagcacaccaaggagagtacgtggaggagcagccatggcttcatcggtggccgccgcggcgagcacattcctgggcacccgcctggcggacccggcgccacagaacgggcgcatcgtggcccggttcgggttcgggttgggcggcaaggcgaagcctgctccgaagaaggtggcgaagacatcgacctcctctgaccggccgctgtggttccccggcgccgtggcgcccgactacctggacggctcgctggtcggcgactacgggttcgacccgttcggtctcgggaagcccgtggagtacctgcaattcgagttggactcgctggaccagaacctggccaagaatgaggccggcggcatcatcggcacccggttcgagtcctccgaagtcaagtccaccccgttgcagccctacagcgaggtgttcggcctccagcggttccgcgagtgcgagctcatccacggccgctgggccatgctcgccaccctcggcgccctctccgtcgagtggctcaccggcgtcacctggcaggacgccggcaaggtggagctggtggacgggtcctcctacctgggccagccgctgccgttctccatctcgacgctcatctggatcgaggtgctcgtgatcggctacatcgagttccagcgcaacgccgagctcgacccggagaagaggctgtaccccggcggctcctacttcgacccgctcggcctggcggccgaccctgagaagaaggagcggctgcagctggcggagatcaagcacgcgcggctcgccatggtcgccttcctcggcttcgccgtgcaggccgccgccaccggcaaggggccgctcaacaactgggccacccacctgagcgacccgctccacaccaccatcttcgacacgttcggagggtcctcttaagcccgccattgctccgccccgtccatcgaccggccggaacgtgttcttggattaattaactacgatctctatgagcctggggatggatcaacccgtcgtgcgtggtctcgttttgtgatgagtgggagagagaggatggcaagatcgatcctttgttaatggagatctcgttaattaggagagctaccgctgggacttggtggtttgtaatatatgatccaaccagtgatgaatcaatgcattcacttgtgtacacatataaag

SEQ ID NO: 28988 - DNA, 1380 bp, Zea mays
  Clone ID: LIB4826-009-D3_FLI
ctcgaggccggccgggctcgtccaaaaccctagccctcgcgccgccgcctccttcgccacccagcgctcgagctcctcgctccctgcgagcgcgcgccgcaacgtcaccatgaagttcaacatcgcgaacccttccaccgggtgccaaaagaagctggaaatcgatgacgaccagaagctgcgtgccttttatgaccgaaggatatcccaggaggtcagtggtgatgctctgggtgaggagttcaagggttatgtcttcaagatcatgggtggatgtgacaagcaagggttcccaatgaagcaaggagttttgacttctggtcgtgttcgccttctgctccatatgagcgagattggggctgttggatttaccgcatggcaagttggagaaagctgctacaacccaaaccgccttatcctttctgtgacttgtacaatgtaaattagactggcacttaattacttggaaggatagttctgacataattaccgtagtgctggtttactgcatggctaataacaacattattcgtttccatcccacaggaaggaatatcaatggtcttctacaaaggtctatcatcttctctagagggttcataaccactgcgcattagctgtctttgaggagtacaataggaatgaatgatgctcaagggtaccaagaaggagatgaccatgacttagtgctgctgaaacaagaatggatcaaaacacaagacaatgctcaagagtaaacttattcttgaagatgaatttgattggaatttacctttggtggtctcaggttcagattaacatgaaaggagcatgtggggagcgacaatcgtgcatgtggcacgcgttggacttcacgacagagagcgctaggaggaaatgtttgcaatctgttttggatttgtcaagagctatccgcccggtcaacaataagatggcttttgtcgtgctgcactagagcatgagcgtcgtgtagtgcatttgcgcttcgccactgccttcagcaaagagtccatcatcgacgtcgagggcgaaaatctttctccccatggagccccttaaggccaccacacaacaagttcatctgtcttgtctcctgatttgggattcgtctatggcttcaaagtatatccgttacatgttagtattatatttccttagatatctaggttgctgaatattttttctaggtagctaggacgatgaattaacatgagatgactatgttgtttatatatatagactgttgtcagtataaattaggtttgctggtgtagcctaattcacatgcttttgcaaacatggtgaatgatcatatttcaatgtatatggttatgacttacctcttttcgtcaaataatgtgagatattgaggtgaataat

SEQ ID NO: 28989 - DNA, 860 bp, Zea mays
  Clone ID: LIB4826-010-A5_FLI
gcccttcatcttctcaccagcctcctccgacacgtaaattgcaccgatcgagacacagggaacaaaggcaacagccatggcgggaacccgtgccctgtacctcctcgtcgcggctgtcgcggcgctcttagccacgcctgcggccgtggacgcggccacgctggcggagatctgcaggggaaccgcgttccccgacatctgcaccggcacggtggggagcgaggcgcagagcgccggggtgttggacgccatggcggtgttgcggatgcgggtggacgcgttcaacaagcgcaccgaggcggcgagggcgcacgtcaaggaggccgccgtgacggcgtcccccaaggcgcggacggtgctggacctgtgcaacaacctgtacctggacgtggaggacaacctgggagcctgccgccgcgccatcggcttcaaggacgccgtcaccatccgcgccaccatgggcatggcggcgcaggacatgcagaactgcgacgagcagttcaggcagatcggcgagaagaaccccatggagcagttcgacgcgtcgctcgtcgagatgtccgagaactgccgctcgctctccaacatgatctgatcgatctccttctcaggccacggacgacaacagagatcgagccgggcgttttgggccctcgcatcgtttgtcgccgctgctaacgttcgcatgcccatgcccgcgagcgcgctctcgcgcgacaataactgatgagttaagtttgttttgctttgaccatctcacatcgttatttcctgtagagatgcgttaatttggtctcggaaacggggaggcgaattgaggtggaatatttataattcaagaaacacagttttggttctac

SEQ ID NO: 28990 - DNA, 598 bp, Zea mays
  Clone ID: LIB4826-010-F5_FLI
taccctcgaggccggccgggaactcatcaaaaaactgaagcactagttcagtgcaccaaaagttcatatcatagaattacaccatgataaattcaaagatgctagttcagctagcaaagaagtggcaacatatggcagcccttgggaggaggaggctaacaatgaccacaacgatcaaagatggcaacctatactgcacatcagccatagcgaacaagggtcactgcatcgtatacacagctgacggtaagcgatttgaagtccctttggcgtatctcagtacaaacgtttttgtggagctcctgcggatgtccgaggacgagtttgggttcacaagtgaagacaggatcacagtgccttgtgatgccgaagtgatggagtatgtgatgtgcttgcttaggagaaagccctcagaagaagtggaaagggcggtccttaactctgttgtaatgccatgcaactgcatgagtaccatgaccatggtttccaagggtcttaaccagtcactatctatattttagctaatgagaagtgttgtatgcatgcatatgtagatatctgtacataccccagtaaacaaggatagaattagaatccg

SEQ ID NO: 28991 - DNA, 1454 bp, Zea mays
  Clone ID: LIB4826-011-G12_FLI
acgaataaagcatcgatcacgacaagatggcgtgcacaaacaatgcgatgagagccttgttcctcctggtcctcttctgcatcgtgcatggtgagaaggaagagtcaaagggcatcgatgcgaaagcgtccgggcctggtgggtccttcgacatcaccaagttgggcgcctccggcaatggcaagacagacagcacgaaggctgtgcaggaggcatgggcatcggcgtgcggcggcactgggaagcagacaatcctcatacccaagggtgacttccttgtcggacaactcaacttcacaggcccttgcaagggcgacgtgaccatccaggtggatggcaatctgctggcgaccacggacctaagccagtacaaggaccatggtaattggatcgagattctacgtgtggataacctggtcatcaccggcaagggaaaccttgacgggcagggcccagccgtgtggagcaagaactcctgcaccaagaagtacgactgcaagatccttcccaactcgctggtgatggacttcgtgaacaacggggaggtgtccggggtcacgctgctcaactccaagttcttccacatgaacatgtaccggtgcaaggacatgctgatcaaggacgtgaccgtgacggcgcccggggacagccccaacacggatggcatccacatgggcgactcatccgggatcacgatcaccaacaccgtcattggcgtcggtgacgactgcatctccatcggccccgggacctccaaggtgaacatcaccggcgtgacctgcggccctggccacggcatcagcatcggcagcctagggcggtacaaggacgagaaggacgtcacggacatcaacgtcaaggattgcactcttaagaagacgatgttcggcgtccgcatcaaggcgtacgaggacgccgcctccgtgctcaccgtctccaagatccactacgagaatatcaagatggaggactcagccaaccccatcttcatcgacatgaagtactgccccaacaagttgtgtactgccaacggcgcctccaaggtcaccgtcaaggatgtcaccttcaagaacatcaccggcacctcctccaccccggaggccgttagcctgctctgcactgccaaggtcccatgcaccggcgtcaccatggatgacgtcaacgtcgagtatagcggcaccaacaacaagaccatggctatatgcacgaacgccaagggcagcaccaagggttgcctcaaggagcttgcatgcttctagaccctccatcgactgacccatctctctagttataatttttctctcgtccttgcattgcccattagatgctatccattggtaacgcacaacagtaaaacgacagacatccgacagctatattatgttcgacggtgtaacaccctgaatttgagggtataaaatttcttctccaaataccaaccaaatttaggggtt

SEQ ID NO: 28992 - DNA, 884 bp, Zea mays
  Clone ID: LIB4827-004-B1_FLI
agccggcgtcgcgtttccaacaggccagtcccctcccactcccagtcccatctcgacgacatggccgcagccgcagggccatcaagctctgtgaaggagacgctcccgccggccctcggctccacctcccagccacctcccgtcttcgatgacaccaccaggctgtacatctgctacttctgcccgttcgctcagcgcgcctgggtcaccaggaacttgaagggtttgcaggacaagatggagctggtggccatcgatctgcaggacaaaccggcttggtacaaggacaaggtttacgcacagggcacggtgccttccctggagcacgacagcgaggtcaggggcgagagcttggacctgatcaggtacatcgacagcaactttgacggccccgcgctgctcccagaggatgctgcgaagaggcagtttgctgacgaactgttcgcgtctgccaacgcgttcaccaaagccctctactcgccgttgctgtcccacgcggccgtgtcagacgaagttgttgcggctctggataaactcgaagctgacctatccaagttcgacgacgggcccttcttcctaggccaattcagcttggcggatgtagcgtacgttacgattctggaaagggttcagatatactattcccatcttaggaactacgacatcgcccaaggcaggtccaacctacaggaattcatcgacgagatgaacaagatcgaagcgtatgcgcagaccaagaacgatcctctgttcttgcttgatcttgccaagaaccatcttaagattgcctgaagatgtgacaaagcagccttagtccgttgatcggtggaagaccactcgtcagtgttgagttgagtgtttgatcaataaaatacggcatgctg

SEQ ID NO: 28993 - DNA, 657 bp, Zea mays
  Clone ID: LIB4827-005-B3_FLI
ctcgaggccggccgggaacgacctgcagccaaccatctaccagcgactcagcgagcgagagcagcacacacgcagctagctaggagcagcagcagcggcggcggcgatggcggcctccatgatctcctcgtcagctctggcggtggcgcctcagggcctgccgcccctcggccgccgcgcctcctccttcgccgtcgtctgctccaagaagaagatcaagaccgacaagccctacgggattgggggtggcctgaccgtcgacgtcgacgccaacgggagaaagggcaagggcaagggcgtgtaccagttcgtcgacaagtacggcgcgaacgtcgacggatacagcccaatctacaacgaggatgactggtctcccaccggcgacgtctacgtcggtggaaccactgggcttctgatctgggccgtcaccctcgctgggatcctcggcggcggcgccctcctcgtctacaacaccagcgccctctccggctaaggatatccaatgcatgcgcttcttgcgattcgtcatgtaaaatcagggtgtctgtctataatctagcctccatgtggatgctcaaccttcgtcatgtaacaataatcagtgctactcttcattacataattttgatgctatatatatataccccatccctcccc

SEQ ID NO: 28994 - DNA, 1061 bp, Zea mays
  Clone ID: LIB4827-005-E8_FLI
agcaaatgaaccagccacaataatcctgatcctcgatcttgcgttgtcgtcgtcaaagagacgactcgatcatcatctcatctcagagcacgcaagcaacaatggttactagcatccgcgtcatagttggaatcataggatctgtagtctgtgtgctcctctacgcggttccagtgctgacgtttaagagagtggtgaaggaggccagcgttggggagttctcgtgcgtgccatacatcctcgcccttttcagcgccttcacctggggctggtacggcttccccatcgtcagtgacgggtgggagaacctgtcgctcttcggcacgtgcgccgtcggagtgctcttcgaagcttcgttcgtcgtcatatacgtatggtttgcgccgagagacaaaaagaaatctgtcgtcctaatggtgtctctggttgtggcaacgctctgcgtcatcgtatccttgtcaagcttcgtgttccacacgcaccatacgcgcaagctatttgttggtagcattggtatagtcacctccatatccatgtacagcgctccgcttgtagccgtgaagcaagtcatcctgaccaagagcgtggagttcatgcctttctacctgtcgttgttctccttgctgaccagttttacatggatgctgtacggcatcctaggaagggatccctatcttacggtaatctggatttactctctactcttctgcctttgctttaatttgctgatcaactttgcttcgttctgaacgaaggcaccaaacggcgccgggtgtttaactggacttcttcagatcgctgtgtactgcatttacagcagaagcaatcggccgccgaaagcagtcaatggtgcgacaacaactagccgtgaagatgcaaatgattgcaaggtttgacttcgagagccttaagaaactgcctctctccgacgctagtaggaggttgatactaaagtggcgctattcgcgtgtgcagttattattattatctaattgtaaactgctccagtgttctttctttttgttatctaatcaatgggcatagcacctgcaaccagtaag

SEQ ID NO: 28995 - DNA, 847 bp, Zea mays
  Clone ID: LIB4827-006-C10_FLI
gaaaaaaaacaaaaaaagtcctccctgcgctacggcgacagcctctcggtggtgggcatctccgccgcgacggccgtgctctgcgaggccatgtcctggctcctcatctaccgcaccgccacctacaactccctccgcgcctccatcgagcgccactcccgcaagctagacgccatgaagtccggctccacctccgcctcctccggcaccgccgcctcctccgcgcagcccgcatcgtcgcgggctaagaagatggaccgcgtcgagaccagcctcaaggacgctgcgcgggagctctcgctcgccaagctcaagtcgggcgccgtcgtcgctgtcatgctcttcgtcgtcttcggcctgctcaactccctcttcgagggccgcaccgtcgccaagctgcccttcgcgcccatcccgctcgtccagcggatgagccaccgcggactgcccgggaacgatcccaccgactgctccatggtcttcctctacttcctctgctccatgagcatccgaaccaacctgcagaaactgcttggcttcgcgccgccacgcgcggctgctgcagccggcggtggcctcttccccatgccggatccgaaagttaattgaggctgatttccaagacgagtgaatccgaaccaaagatagcaatagtcgctcgggaaagactctgtgcgactgcaccaatagccgtacccaattcattttccacagctcaccggtttgttgttgcgcaccggtgctggtgtttgcaaaccaggttggcttatttattgcatagactgaaacaatgaacatgaattacctgctgggaggcagagaaatgtgcagcctgattttcggcccc

SEQ ID NO: 28996 - DNA, 1010 bp, Zea mays
  Clone ID: LIB4827-006-E3_FLI
ctcgaggccggcccgggaaaaaaaggcctcataccttggagcaagcaaaggggtccggacccctatggcggcagtgctccactccatcaagcgatgcacaacgtcgtcaatggaagactccggtggcggtggccaggaggtctacgtcgttctcggcattggggacaacattagaagccacgctgtcgcgcatcgacgccatcatctcctacgatccgtcccctcgctcgatctgcatcctgtcatatataccctatcccatgctaagtccctgaaacgacggtggctgtggtagttggtgacgctgcacacgcacctaggcgacatcaaatgcgaggtgatctgcgatcaggtgccccgcacgacggataacttcttggccctctgcgctagctgctactacgacgtcactgtgttccaccgcgtcatccccgagttcatgtgccagggcggcgacttcacccgcggcaacggcaccggcggcgagtccatctacggcgagaagttccccgacgagaagttcgtgcgcaagcacaccgctcccggtgtgctctccatggccaacgccgggcccaacaccaacggctcccagttcttcatctgcaccgtcgcgaccccttggctcgacggcaagcacgtcgtcttcggccaggtcgtcgagggcatggacgtcgtcaaggccatcgagaaggtgggcacccgcaacggctccacctccaaggtggtcaaggtcgctgactgcggacagctctcctagatctctctgatctggtctgttcggccgccctccctccgtcatcgtcgactccccctgcgtccgttcctttggatctgaataagatggtggtgatctgagtggtggtcttagtttatcatgtatcgctcgcagtttaatttagcggtttaagtgtggatctgtgaaccccatggcgcctctgcttgattcgtgtttcacctgttatgttctgagattcatgataatgctatgagaactgaaattcccgtttaac

SEQ ID NO: 28997 - DNA, 1047 bp, Zea mays
  Clone ID: LIB4827-007-E3_FLI
acacacagagcggcatttcgaataacacaggtgagcgcgacgatgggatccctcgctaataacatcatggtcgtctggcgggtcgtgcgggcccccgaaggtgccacccggccccaacatcaccaccaactacaacggcaagtggctcaccgctagggccacctggtacggtcagcccaacggtgccggcgctcctgacaacggcggtgcgtgcgggatcaagaacgtgaacctgccaccctacagcggcatgacggcgtgcggcaacgtccccatcttcaaggacggcaagggctgcggctcatgctacgaggtgagatgcaaggaaaaacctgagtgctcgggcaatccagtcacggtgtacatcactgacatgaactacgagcctatcgctccctaccacttcgacttgagcggcaaggccttcggctccctggcaaagcccgggctcaacgacaagattcgccactgcggcatcatggacgtcgagttcagaagggtgcgatgcaagtaccccgccgggcagaagatcgtgttccacatcgagaagggctgcaaccccaactacctggccgtgctggtgaagtatgtggcggacgacggcgacatcgtgctgatggaaatccaggacaagttgtcggctgagtggaagcccatgaagctctcttggggcgccatctggaggatggacactgccaaggcgctcaagggccccttctccatccgcctcaccagcgagtccggcaagaaggtcatcgccaaagacgtcatcccggcgaactggagacccgatgccgtctacacttccaacgtccaattctactagactttgaattcccttcgattcatccggcacagcgggctatggaccttcagcagcaagctaattaagttggcagcatgcaccgctaaccttatatactactgagacttccaaattctagtatatgtaaaccttttgttcgggttcatgatcgaattccaaagagtggaaaacaagcaaaaggttaaatatacatgccatttttggaggcatttttttcaaac

SEQ ID NO: 28998 - DNA, 1204 bp, Zea mays
  Clone ID: LIB4827-007-G2_FLI
ggcctccggcctccggcgctcgctcccctgtcctgtcccctccggcctcctctgccctctctctctatatatgcgcgcgggccgcggcaatgtttgccccatccgaccagctactactagcgtttactactaactagtttgccggtcgagcccgggcgacgttagaatagatacgagcggcgtcgaccggcgccggcgagactccgcagccgcagccgccgcccgatctcggttttcgttcgtagcggtagcggaagatgagccaggaccaggagaacggaggcaccaacgggcagcacgccgccgacgtgatggaggtggagccgaagcgccgggcgccgcggctgaacgagcgcatcctgtcgtcgctgtcgcggaggtccgtcgccgcgcacccctggcacgacctcgagatcggtcctgaagctccggccgtcttcaacgtcgtcgtggagatcaccaaggggagcaaggtgaagtacgagctggacaagaagacggggctcatcaaggtggaccggatcctctactcgtccgtcgtctaccctcacaactacggcttcgtgccccggacgctctgcgaggacaacgaccccatggacgtcctcgtgctcatgcaggaacccgtccttcccggcgccttcctccgcgccagggccatcggcctcatgcctatgatagatcagggagagaaggacgacaagatcatcgccgtctgcgccgacgaccccgagtaccgccactataacgacatcagcgagctctcccctcaccgcctccaggagatccgccgcttctttgaagactacaagaagaacgagaacaaggaggtggccgtcaacgacttcctgcccgccgccgctgcccgcgaagccatccagtactccatggacctgtacggccagtacatcatgcagaccctgcggcggtagagcgttcctaccagatcccatgcgagctgagctgacgcaagagcacagatcgacagaatccttgtggtctcgtctcatgcatggatagccaggttacatggcttgtcgacgaccatgcatctcttcttcccagcgattttagcctgtatcttcccttatttatagtcttttgggtttggtggaatctgtccacagtgtggtttgatctatgtactcctcttctacatttctaccagaacgaatcgatgagattaataataatgttactactc

SEQ ID NO: 28999 - DNA, 1468 bp, Zea mays
  Clone ID: LIB4827-007-G3_FLI
ctcgaggccggccggggctcgtccggttcagttcagtggcgccgtcgtgcctcgacgacggcgggagacgccgcaagcaggtgagagtgagacgggcggtgactagcgggcgcttaggccgacatcggccccgcagcggcggggtagggtgcgtcgacacgcgggactgcgacttgggggggattgattcccttcgctgttctctcttctccggcgcgtgcgcgcgggatcgaaggtagggtttgggccccaaagttcgtgtctttggggacagcggcggcgatggactacaccaacgccatccacatcatcccggacgccgcgggccccgacgcctgggccaacgcggcgtcggccgcgggcgccgacgccagcatctgggccaccgaggacgactaccgccattggcaagatgttcttcaagaccaagctctgctgcaagttccgggccgggacctgtccctacgtcaccaactgcaacttcgcgcatggcatggaggagctccggaagccaccgcccaactggcaggagatcgtggccgcccacgaggaggccacggagcagcgggaggagcaccagatccccatcatgacatctggaagtgttgtagctggagacggcggcggtggcagtggtggcggctcgcaggggggcagggcattcaagggccgtcactgcaagaagttctacactgaagagggctgcccctatggtgacacatgcaccttcctgcatgatgagcagtctaaggcacgggagagcgtggccatcagtctctcgcccaccgttggtggtgggggatacaatgctgcctccgccaacggagtgatggtgcagaagccgtccaactggaagacaaggatctgtaacaagtgggagatgactggatactgcccatttgggagcaaatgccactttgctcatggttctaccgaacttcacaagtacggagggggcctcgtggacatcgacggcagggacatcttgtccactcctgattcgaagcaagccggtggctctgctaaagctcctctagagtctgctgctgcgtccactgcgttgccccctcatgcagacgtgtaccatctcggcatccagtcgcagcgctcggccatcgccagccagaggtctggacagctgcaaaggcccatccagaaatggaagggccctgacaagatcagcaggatctatggagactggatagatgagaacgaatagaagaaggatcttctacggtgggccgaagggaagctgttacttggtatccgtccgactccacatcagctggtggaagctttacctggcttagaagatctcgttagcgctgcaaaaccagagtcaagatcatctttgcaagacctgtattggggagataaactgctggaacatagtgccgctttcttccgttgaactcagtagcattgctatgcttgtgtaatttgtgtgttggatggaggagcataatag

SEQ ID NO: 29000 - DNA, 832 bp, Zea mays
  Clone ID: LIB4827-009-D8_FLI
gcacctgcgcattttgtaaaggtacgaggagctaggtgaggcaccaccaccaaccgggctccgactccgagttcatcacgcacgcatggaaggctcggcggcacaggcgccggggaagaccgtcctgagggtggtggcgatctccggctcgctgcgcagggcgtcggccaacaccggcctcatccgcgccgccgcggagatctgcagggagtcgatcccggggctggaggtggagcacgtggacatctcggagctgccgctgctgaacaccgacctggagggcccgggccccggcgcgttcccggcggccgtcgaggcgttccgcgccaaggtgcgcgccgccgactgcttcctgttcgcgtcgcccgagtacaactactccatctcgggcccgctcaagaacgcgctggactgggggtcgcgcccgcccaactgctggggcgacagggccgccgccatcctcagcgcgtcgggcgggtcggggggcagccgctcgcagtaccacgtccgccaggtcggcgtcttcctcgacctccacttcgtcaacaagcccgaggtgttcaccagggcgcaccagccgcccagaaagttcgaccacgacggcaacctcgtcgacccggacaccaaggaccaggtcaccaaggtgctcctggcgctgcaggctctcgcgctcaggctgcagctggggaagctcgctgttgctgcacactcttcttgaacgtcgtcgtcgtcgggggtgcactaaactacactacacatcgtcgccgagctccaaatgccgtgccgtgtccgtgtgtgcgcgcttcaataaattctcggcgtccaactttgc

SEQ ID NO: 29001 - DNA, 803 bp, Zea mays
  Clone ID: LIB4827-010-B11_FLI
gctcgaccggaccgacgagcaacgaagcgcgcagaaagagaagaacctcggagctgagatggcacaagccatggcgtcgatgaccggcctctcgcagggcgtcctgcccagcaggcgcgccgacagcagaaccaggacggccgtcgtcatcgtcagggcgtccgcggagggcgacgccgttgcgcaggcgggccgccgcgccgtgatcgggctggtggccactggcatcgtcggcggcgccttgtcgcaggcggcgcgcgccgagaccgtcaagaccatcaagattggagccccgccgccgccctccggtggactccccgggactctcaactctgaccaggcgagggacttcgacctccccttgaaggagcggttctacctgcagccgctgccgccggcggaggcggcggcgagggtgaagacgtcggcgcaggacatcatcaacctcaagccgctcatcgacaagaaggcgtggccgtacgtccagaacgacctccgcctccgggcctcctacctgcgctacgacctcaagaccgtcatcgcttccaagcccaaggaggagaagaagagcctcaaggagctcaccggcaagctcttcagcaccatcgacgatcttgaccatgccgcgaagatcaagagcaccccagaggccgagaaatacttcgcagcaaccaaagatgctcttggcgatgttctcgccaagctaggctagacgcaagggctaataatggccatgtaatttcggacttgtgtttgttcatatggacccggcaaggcaatgtaccattttctgttgatattag

SEQ ID NO: 29002 - DNA, 781 bp, Zea mays
  Clone ID: LIB4828-001-E12_FLI
ctcgaggccggccggacttttccggcctcccattcctcgcgcggcgaccacccgattcgaagcgtgcggagagaccgaagaagcgggagagatggctcgtaccaagcagactgctcgcaagtccacgggagggaaggctcccaggaagcagcttgccaccaaggctgcccgtaagtctgcccccaccactggtggagtgaagaagcctcaccgctaccgccctggaactgttgccctccgtgagatccgcaagtatcagaagagcactgagctgctgatcaggaagctgcccttccagaggctcgtcagggaaattgcacaggacttcaaaactgatttgcgtttccagagccatgcggtgcttgccctccaggaggctgctgaggcataccttgttggcctgtttgaggacaccaacctgtgcgccatccatgctaagcgtgtgaccatcatgccaaaggacattcagctggcaaggaggatccgcggcgagagggcctaatcgccacctcaaacatcgtgacaaaaacatgaagtcctggggttattgttaatctggtgccattgtaaggacatatgagtagggtttgttttgtggatcgcaagtttctcttctgctactgttgctgctacctttgctggtgttattgctagggtcgaatacttaagttaactatgcgctgacagtctggactagcagtgttatgtgcgctgctggaccttgcgcgcaatgctgtggccgatttgttcgttaatgtcaagaattgtgttacagtgcgcg

SEQ ID NO: 29003 - DNA, 1273 bp, Zea mays
  Clone ID: LIB4828-002-F2_FLI
ctcgaggccggccggagctgaaagctgaaggcagaagcagagataatggacgacgtacatgtctggttcgtctcgctggcctgccttggtggtttgtacatcgccgccatctgctggcggcccctcgcctatctcgcgttgtgcctgcgcgggccgaaggacctccaccgctacggctcatgggccatggtgactggcccgacctccgggctcggccggtccatggccatggagctcgcgcgacggggcctcaacctcgtcctcctcgacctcgacgccaacaacctccaggagacctccgaggccatcaagtccgtccaccccgtgaagataaggactgtggttctagacctctccctcgtcgccacaccagaaggcgataaggcgatccgccgtctgcgggaggcgatcgaggggctggacgtggggatactggtgaacaacgcggcggtgaacacgcctggcgcggtgtacctgcacgaggcggacatcgaacgctttgtgcggatgatacgggtgaacctgtgggggctcaccgaggtcacggccgcggtgctgcccagcatgctagcgcggcggaggggtgccatcgttaacgttggatcgggctccacggtggccgtcccgtccttccctctgtacaccgtctacagctccaccaaaaagtatgtggctcatctctccagaagcctttacgtcgaatacaagagcaaaggaatcgacgtccaataccaggtcccgttctatgtgcacacgcgcatgctgtcgagcgccgtgaaggccaagctccggccgtggttcgtggcgacggcggaggactacaccagcacggcggcgcggtggatcgggaacggcccggtgtgtgttcccggcgccgcccagaacctccagtggtgcctcaccggcttcgtgccggactgggtccacgactggtaccggatccgcctgcacctgcagcacagagccgtcctccgcggcggtcgagccgcgatcgccagcgcccattcacgcgccgagaaggccgtgacacctgacgatgacgacgccaattcagttgcgccaaagatcagtgcctagccatttggctagccagctgtgctgtgctagccctatctctctgcatgcagctgtcagtcaatacaacagtcatatagtactcatgcaagtgatcaatgatcgatgccatacatataatcattatattaaaagtacgcgtgcccttcgtgtgtataattgttttaccacgttggattgaagttgtcagatctgcacc

SEQ ID NO: 29004 - DNA, 1531 bp, Zea mays
  Clone ID: LIB4828-005-B9_FLI
gctttctgacctcttctggaatcctgcgacgaggggaccgaaatggcctcgtcctcctctgactccggccgcatcgccggaaccctagccttgcgtacgagctcggccttagcggcggcgtcgctaatcccggggctcccggacgacgttgcagctgtcattctctgcctgctcaccttccccgaccagtcccgcctccgcgccacctcgcgcgcttggtgcttgctcctctctgcggctacgctcctcccgctccgccgtagcctccgtctcccgcgccgccaccttctctgcctcttccccaccgacccatccctcgcctccccgatcctgctcgaccccgccgcacctaccacctggtggcccctcccgctgctcccctgttcgccgcagctttacggcctcgccaactttaccgccttcgccgttggccgccacctctacgtcctcggcgggtcttgcttcgacgcccgcagctaccctttggggcaaccctccgcctcggcggcggtctaccggcttgaccttgccaactctcgacattgctgggaacgccttcccgacatgcagctcccgcggggaagcttcgcgtgtgcccacgcgcccagtgctggcgggctcctcgtcgccggtggcgggtcccgacaccccatgttcccctccaacggcagccgcaccggcagcaccgagtggtatgatgccaccacgcactcgtggcaccttggtgcctcgatgcctcgtgatcgggctgggtgtgttgggttcctggcacgcggagcaggggatggtggtgaggatgagttctgggtgatgggcggctatgatggatacaccacgttgggaggagtggtgccaaatgacgtgtactgtcgggacgcggtggcgttgggactatggagtggtaagtggagggtgattggagacatgtgggaggaaggggagaggaggcgtcttggtcccattgcagctttatctgcagatgatggaagaattaccgaggtgttcatgctagacggcaatgatgtcttcaggtatgacttcgcttcaaataggtggctgaaagaggcaaccacgagaagaaagatcccaaacactgaatcttgcggcttcgtaccaatgaacggggaactgtacgtgctcagatctgcaaaagttcgtgttgaatcctctggtccgtggaggcagctgaagaagaagctggctatggagtttcaggtgtacaaccctggggcaaagaaatggagagtgctcaccacgtatccacctgttgatgcacccattgatttcaggactgcagctctgtgtacagttgagttgtagatccattagtagtcaccattaactgtacatattcaggtggcaagcgcaacaatcgattgcaaatatagacatgaaaatgcctaatgcttcaagtgctcccagcagatagtttgttctagcgtgtttatatacagtagagataacattctggagtatatcgcaagaattggtgttttttggtgctgaatgtggttgctgctaacaagatatg

SEQ ID NO: 29005 - DNA, 839 bp, Zea mays
  Clone ID: LIB4828-005-D8_FLI
aggtttatatgtgagtgttcctcgcaatagagagatctatcgatcgagctttcgttatcctcctcttacattacaggtcatagctaagcaggtctgacaggatgtcgtggcagacatacgtcgatgagcacctcatgtgcgagatcgagggccaccacctgacctccgctgccatagtcggccacgacggcgccgtttgggcccagagcaccgcattcccacagttcaagacagaggagatgaccaacatcatgaaggacttcgacgagcccgggttcctggccccgaccggcctcttcctcggccccaccaagtacatggtcatccaaggcgagcccggcgctgtcatccgcgggaagaagggatctggaggcataactgtgaagaagacagggcaagcgatggtggtcggcatctacgacgagcccatgacccccggccagtgcaacatggtggtcgagaggctcggcgactacctcgtagagcaaggctgtgaatggattcatttaacctcgctcgctcgcttgtccatggttcgagcatccagcagcaacgataccaacatcagcattatttaattggtagcctcctctagctacgcacgcattttagtcccctacacgcccttggattgtgcgtggctctgttaatcatctctcatccttcgtctgccatttctcccctgcccgtcgccgatcaccagagatttttgttccttgttggtaccatgcattttggcaaataattttgtaattccacccccaaattaaagtttggttgtcgtatggtttgtaaacccagaacaatatatatatgtgtgtgattgaactgttcctgcc

SEQ ID NO: 29006 - DNA, 1455 bp, Zea mays
  Clone ID: LIB4828-006-C6_FLI
ctcgaggccggccgacgaataaagcatcgatcacgacaagatggcgtgcacaaacaatgcgatgagagccttgttcctcctggtcctcttctgcatcgtgcatggtgagaaggaggagtcaaagggcatcgatgcgaaagcgtccgggcctggtgggtccttcgacatcaccaagttgggcgcctccggcaatggcaagacagacagcacgaaggctgtgcaggaggcatgggcatcggcgtgcggcggcactgggaagcagacaatcctcatacccaagggtgacttccttgtcggacaactcaacttcacaggcccttgcaagggcgacgtgaccatccaggtggatggcaatctgctggcgaccacggacctaagccagtacaaggaccatggtaattggatcgagattctacgtgtggataacctggtcatcaccggcaagggaaaccttgacgggcagggcccagccgtgtggagcaagaactcctgcaccaagaagtacgactgcaagatccttcccaactcgctggtgatggacttcgtgaacaacggggaggtgtccggggtcacgctgctcaactccaagttcttccacatgaacatgtaccggtgcaaggacatgctgatcaaggacgtgaccgtgacggcgcccggggacagccccaacacggatggcatccacatgggcgactcatccgggatcacgatcaccaacaccgtcattggcgtcggtgacgactgcatctccatcggccccgggacctccaaggtgaacatcaccggcgtgacctgcggccctggccacggcatcagcatcggcagcctagggcggtacaaggacgagaaggacgtcacggacatcaacgtcaaggattgcactcttaagaagacgatgttcggcgtccgcatcaaggcgtacgaggacgccgcctccgtgctcaccgtctccaagatccactacgagaatatcaagatggaggactcagccaaccccatcttcatcgacatgaagtactgccccaacaagttgtgtactgccaacggcgcctccaaggtcaccgtcagggatgtcaccttcaagaacatcaccggcacctcctccaccccggaggccgttagcctgctctgcactgccaaggtcccatgcaccggcgtcaccatggatgacgtcaacgtcgagtatagcggcaccaacaacaagaccatggctatatgcacgaacgccaagggcagcaccaagggttgcctcaaggagcttgcatgcttctagaccctccatcgactgacccatctctctagttacaatttttctctcgtccttgcattgcccattagatgctatccattggtaacgcacaacagtaaaacgacagacatccgacagctatattatgttcgacggtgtaacaccctgaatttgagggtataaaatttcttctccaaataccaagc

SEQ ID NO: 29007 - DNA, 1175 bp, Zea mays
  Clone ID: LIB4828-008-E4_FLI
ttcaactgaactcatcaattccttcatcatccatggaggccatgcccaggccaagtgtagctccctcgttgcagttgcaggcccgtccgtgcccgaggtggccgcgccggaagcactgcccaccgtcctccgtggcaagccggagggttgcttgctcggcctcggcggccgacgccgacgtggtcgacctcttcgacgccgctaagctaactgtggacaagttcgtgacgagcggcatggtggtggggctcggctccggccctgcgtccgccctggccatccagtacctcgccacgcgcctccggcggggctctctcgcgggcatcaccgcagtgacctcccaggtccgtgctcagtgcgagcgaggcagacaaggcagggatacgggctaacagctaccaggaaggcacccattgattttgctttcactgatgctgaagcgatcgaggagggcacgctggccgcagtcatcgggcggcggaagaccgagagcggagagccctctttcatggcggagaaggcgatggctaaatcagctcacaagcttgccttcatcactggaaacgacaagtacgtgacgacgggcgtcgagggttctattccggtcctgattaaaagtgccattttcaggggaactggatagacactgctgaagagatcgacgatttgtttctaggagacgcagaggtttggaggaggccgtcgtttggaactgctggtccacttgggggtgaccacccactggttaccaaggagggccatcacgtgctcgatgttatcttcacaacaccaatccaagatcttggtcaggttgcagagaagttggacaaagttgatggcgttgtggatcacgggattatttgcagcaaccaaccatacgctgtcattgcatccaagggggaagtgcaggtcctggacgagaaatcttcggtgatacagtagcggtgaaacctttttggctactctgcagattgttgcgcttttcggaacaggagtctactaccagctagctggaaaaaaaatgccatgagttaatcatgtacaaccagagctcttgttcaccactggacaattcagccggcatcagttgaagtctgtgtttcgcataaacttttttgaactggtactcagttaaccagattcgatgaatgtgaggcagagctacagcttcaact

SEQ ID NO: 29008 - DNA, 882 bp, Zea mays
  Clone ID: LIB4828-010-C6_FLI
ctcgaggccggccggggaaacccgtctcgcaccacaagcgagcgagggacccggggcggaagaagagagagaagacgtctctctcctctcggcgtccccgttccccaacctctcgtctgctgcctgcctgcctgcctgcctgcaaaaaggagtttgtcatggcgtctaagcgcatcctcaaggagctgaaggacctgcagaaggacccccccacatcatgcagtgcaggtcctgctggtgaggacatgtttcattggcaagcaacaattatgggaccacctgacagtccctatgctggtggtgtttttttagtgaacattcatttcccgccagattaccccttcaaacctccaaaggtttctttcaagacaaaggtcttccatcctaatatcaacagcaatggaagtatatgccttgacattctcaaagagcagtggagccctgctttgacaatttctaaggtcctgctctccatctgctccctgctgaccgaccccaacccggacgaccctcttgtcccggagattgcccacatgtacaagacggaccggccgaagtacgagtcgacggcccgcagctggacgcagaagtacgcgatgggctgacgaacgctttcctgctcgtccacccgactggcgtctcaagaaagtcgttcctgggcgccattgttcccttggatttgttgttggtcgtcgtgtgtatccctgatccatctaggatcatcgtattgtattgtagtgtatgtatatcgtcggcctaccatcgttgccattcaccatagtgaggtggttggacatgcttcgcctatatgcacctgtgcttgccgtccttcgggtcggtgctctttggttaatgttcatcgaagacgttgatttcgttgcc

SEQ ID NO: 29009 - DNA, 1207 bp, Zea mays
  Clone ID: LIB4828-010-E1_FLI
tcgaggccggccggggtacacccgctcttccaagttaggaggggagcacccatcagccaagagctatccatacgcacagcgatgcaccagcacgagatactagccatcatgcgcctgtcgtccctcctcctcgtcgtggccgccctctcggcgcgcgccgcggcgcagcaggtgccgccggtgggcggcagcgctctgaagccggactactacagccagtcgtgcccgcgcgcggagcggatcatcgcggaggtgatgcagacgaagcagatggcgaacccgacgacggccgcgggcatgctgcgcgtcttcttccacgactgcttcgtcaccgggtgcgacgcgtcggtgctgatcgcgtccacccagttccagaagtcggagcacgacgcggagatcaaccactcgctccccggggacgccttcgacgccgtggtgcgcgccaagctggccctggagctggagtgccccggggtggtgtcctgcgccgacatcctcgcgctggcgtcgggggtgctggtcaccatgaccggcgggccccggtacccgatcccgctggggcgcaaggactcgctgtcgtcgtcgcccacggcgcccgacgtcgagttgccacacgccaacttcaccgtggaccgcctcatccagatgttcggcggcaaggggttcacggtgcaggagctggtggcgctgtccggcgcccacacgctgggcttctcccactgcaaggagttcgccgaccgcctctacaacttccgcagccagggcgggaagccggagccgttcgaccccagcatgaacccgtcctacgccagggggctgcaggacgtgtgcaaggactacctcaaggacccccccatcgccgcgttcaacgacatcatgactcccggcaagttcgacaacatgtacttcgtcaacctggagcgcggcctcggactgctcagcaccgacgaggagctgtggacggacccccgcaccaagcccctggtgcagctctacgcgtccaaccccactgccttcttcaccgacttcggccgcgccatggagaagctcagcttgttcggcgtcaagaccggcgccgacggcgaggtcaggcggcgctgcgacgcgtacaacagcggccccgacgttggcggcgccatgcctatggctatgcccatgcccaagatgtgacgctgcgcgcgctacaagtacaacgacggcggccctc

SEQ ID NO: 29010 - DNA, 861 bp, Zea mays
  Clone ID: LIB4828-011-F10_FLI
ctcgaggccggccggggccccccacatcatcgcctttcctcttctcaccagcctcctccgacacgcagctagcccacgtaaattgcaccgagacacagacacaggtaacaaaggcaacagccatggcgggaacccgtgccctgtacctcctcgtcgcggctgtcgcggcgctcttagccacgcctgcggccgtggacgcggccacgctggcggagatctgcaggggaaccgcgttccccgacatctgcaccagcacggtggggagcgaggcgcagagcgccggggtgttggacgccatggcggtgttgcggatgcaggtggacgcgttcaacaagcgcaccgaggcggcgagggcgcacgtcaaggaggccgccgtgacggcgtcccccaaggcgcggacggtgctggacctgtgcaacaacctgtacctggacgtggaggacaacctgggagcctgccgccgcgccatcggcttcaaggacgccgtcaccatccgcgccaccatgggcatggcggcgcaggacatgcagaactgcgacgagcagttcaggcagatcggcgagaagaaccccatggagcagttcgacgcgtcgctcgtcgagatgtccgagaactgccgctcgctctccaacatgatctgatcgatctccttctccacggacgacaacagagagccgggcgttttgggccctcgcatcgtttgtcgccgctgctaacgttcgcatgcccatgcccgcgagcgcgctctcgcgcgacaataactgatgagttaagtttgttttgctttgaccatctcacatcgttatttcctgtagagatgcgttaatttggtctcggaaacggggaggcgaattgaggtgg

SEQ ID NO: 29011 - DNA, 1598 bp, Zea mays
  Clone ID: LIB4828-011-H12_FLI
aaaataaagcatcgatcacgacaagatggcatgcacaaacaatgcgatgagagccttgttcctcctggtcctcttctgcatcgtgcatggtgagaaggaagagtcaaagggcatcgatgcgaaagcgtccgggcctggtgggtccttcgacatcaccaagttgggcgcctccggcaatggcaagacagacagcacgaaggctgtgcaggaggcatgggcatcggcgtgcggcggcactgggaagcagacaatcctcatacccaagggcgacttccttgtcggacaactcaacttcacaggcccttgcaagggcgacgtgaccatccaggtggatggcaatctgctggcgaccacggacctaagccagtacaaggaccatggtaattggatcgagattctacgcgtggataacctggtcatcaccggcaagggaaaccttgacgggcagggcccagctgtgtggagcaagaactcctgcaccaagaagtacgactgcaagatccttcccaactcgctggtgatggacttcgtgaacaacggggaggtgtccggggtcacgctgctcaactccaagttcttccacatgaacatgtaccggtgcaaggacatgctgatcaaggacgtgaccgtgacggcgcccggggacagccccaacacggatggcatccacatgggcgactcatccgggatcaccatcaccaacaccgtcattggcgtcggcgacgactgcatctccatcggccccgggacctccaaggtgaacatcaccggcgtgacctgcggccctggccacggcatcagcatcggaagcctagggcggtacaaggacgagaaggacgtcacggacatcaacgtcaaggattgcactcttaagaagacgatgttcggcgtccgcatcaaggcgtacgaggacgccgcctccgtgctcaccgtctccaagatccactacgagaatatcaagatggaggactcagccaaccccatcttcatcgacatgaagtactgccccaacaagttgtgtactgccaacggcgcctccaaggtcaccgtcaaggacgtcaccttcaagaacatcaccggcacctcctccaccccggaggccgttagcctgctctgcactgccaaggtcccatgcaccggcgtcaccatggatgacgtcaacgtcgagtatagcggcaccaacaacaagaccatggctatatgcacgaacgccaagggcagcaccaaaggttgcctcaaggagcttgcatgcttctagaccctccgtcgactgacccatctctctagttataatttttctctcgtccttgcattgcccattacatgctatccattggtaacgcacaacagtaaaacgacagacatccgacagctatattatgttcgacggtgtaacaccctgaatttgagggtataaaatttcttctctaaataccaaccaaattcaggtgttacctcttgtctctctctctctctcttttccttttgattaaaagtaagtgaattaggcgagggtttaattatttattttgtcaaaacttatgtgagtcatgaaatgttgcatcatgctgagcctaaattattcttttgtttgatgc

SEQ ID NO: 29012 - DNA, 1394 bp, Zea mays
  Clone ID: LIB4828-012-C2_FLI
acaaacaatgcgatgagagccttgttcctcctggtcctcttctgcatcgtgcatggtgagaaggaagagtcaaagggcatcgatgcgaaagcgtccgggcctggtgggtccttcgacatcaccaagttgggcgcctccggcaatggcaagacagacagcacgaaggctgtgcaggaggcatgggcatcggcgtgcggcggcactgggaagcagacaatcctcatacccaagggcgacttccttgtcggacaactcaacttcacaggcccttgcaagggcgacgtgaccatccaggtggatggcaatctgctggcgaccacggacctaagccagtacaaggaccatggtaattggatcgagattctacgcgtggataacctggtcatcaccggcaagggaaaccttgacgggcagggcccagctgtgtggagcaagaactcctgcaccaagaagtacgactgcaagatccttcccaactcgctggtgatggacttcgtgaacaacggggaggtgtccggggtcacgctgctcaactccaagttcttccacatgaacatgtaccggtgcaaggacatgctgatcaaggacgtgaccgtgacggcgcccggggacagccccaacacggatggcatccacatgggcgactcatccgggatcaccatcaccaacaccgtcattggcgtcggcgacgactgcatctccatcggccccgggacctccaaggtgaacatcaccggcgtgacctgcggccctggccacggcatcagcatcggaagcctagggcggtacaaggacgagaaggacgtcacggacatcaacgtcaaggattgcactcttaagaagacgatgttcggcgtccgcatcaaggcgtacgaggacgccgcctccgtgctcaccgtctccaagatccactacgagaatatcaagatggaggactcagccaaccccatcttcatcgacatgaagtactgccccaacaagttgtgtactgccaacggcgcctccaaggtcaccgtcaaggacgtcaccttcaagaacatcaccggcacctcctccacccccgaggccgttagcctgctctgcactgccaaggtcccatgcaccggcgtcaccatggatgacgtcaacgtcgagtatagcggcaccaacaacaagaccatggctatatgcacgaacgccaagggcagcaccaaaggttgcctcaaggagcttgcatgcttctagaccctccgtcgactgacccatctctctagttataatttttctctcgtccttgcattgcccattacatgctatccattggtaacgcacaacagtaaaacgacagacatccgacagctatattatgttcgacggtgtaacaccctgaatttgagggtataaaatttcttctc

SEQ ID NO: 29013 - DNA, 1580 bp, Zea mays
  Clone ID: LIB4828-012-E2_FLI
aactcgcaaacatttttataacccgagcacgcgtcagacatgggaaacggcggtgggactggcgataagacgaagacgaaggcgacaggagggctcaccggtcgcgaatcctcctcctccagccacgcctcgaaacggcgtcggggcctgcgcggcgagtccatggctgatcgcttcattcccaatgactttcctgacttcgtcgccgaggctgaggcctccgacggcgaggggcaccgccccgcagggcatcggggcctgctctcgcttccgtacaccaggctctccgaccacttcgtccgcgccgcgcgccgcctcaaggacaaggtggttgaggagacgtgggtgaaagccggacggaaggtgacggactacacgctctacacgggctctctcgggacagcgctgctgctgttcaagtccttccaggtcactggagaccgcggggacctcgccctcgccgctgatatcgtccgcgcgtgcgatgatgcatcgcggggcctgccgttcttgacattcatatgcgggagggcgggtgtctgcgctcttggggcggtgattgccaagcattgcgatgatcagctgagggtcactcagtatctgagctcctttgatgagataacaatcaccgagaaagttccaaatgagttgctgtatggaagggcaggctatctgtgggcttgtttgttcttgaataagcatctcagcgagaagacgatccctctcgatcacattaattctgtggcgaaggacattattaatgagggaagaggttttgcaagcaaggggagtagccctctgatgtacgaatggcatgggaagaaatactggggggctgcgcatggtcttgctggaatcatgcacgtgctaatgcacaccgaactgaaaccagatgagcaggatgatgtaaagaacaccctgcggtatatgatcaagaacaagtttcctagtggcgattatccctcaagtgaaggcaatgaatcagatcacttggtgcactggtgtcatggtgccccaggtgttgctcttacccttgctaaagcatatgaggtcttccatgatgattatttcgagcaatcagctgcagaggctgctgaggttgtctggaaccgagggcttctgaagagagtcggaatatgccacggtgtaagcgggaatgcctatgcgtttctctcactctacaggctaaccggtaatgttgagtacctctaccgggcaaaggcttttgcctgctttcttctggagaaagctgatcagttgatagccgagggggccatgcatggtggtgatcgcccgttttcactgtttgaagggaaagctgggatgtcatacctcctcttggacatggttgatccatctgaatcaaggttccctgcgtatgaactttgagatatactattaccctgcgacttgtgaggctgttcgatgatccatcagtcacgaaaactctgtttgtattttctcgtctagtatgtgatgtgtgcttagacctcggtggtctgttgtgtttgtagatttggcgttcgtgatgttgcaaacttgaatcttctgtgaagtatgtgtgaccatcacattctgct

SEQ ID NO: 29014 - DNA, 992 bp, Zea mays
  Clone ID: LIB4829-001-A2_FLI
ctcgaggccggccggaagtcattgaactcttctaaagaacaagaccttggttcagtactacacttgaacaattttcttttgcagcaaaatccaacaaactagtacgccatgactgccgatagcacaattccatcgcaggctgccgttgcctcgcaaaacaacacatcaaacggccaacctagaaccaagatttgcgtctactgcggttctgccccaggcgcgagtcctgctcatattgaagctgctcgcgcacttggaaaggccatggccgagaacaacattgacttagtttacggaggtggaaccgtcggactcatgggcgaggtggcgaagagcctttgcgccatcaatggccctgactctgttcatggcatcatccctgaggctctggtcaagtatgagcgagacggcacttatggaactgtcaacgagcacaaccacattgtgcctgaggagtctgtctacggccacacaacggtcgtcaaggacatgcacactcgaaagaagctcatggccgaggaggttttcgctggtggtcccggcagcggcttcatcggattgagcggtgggtttggtaccatggaggagattttcgagacaaccacttggaaccagctcggaatccacaaccgtggcattgttctactcaacattgaaggttattgggacggcatcgttcagtggatggatcgtgctgctgagcagggctttgttaagcctgccaacaaggacattctggtgaatgccgatacccctgaaggtgcaatccaggctcttcgtgactacaaggtttcggatgccatctaccaactccaatggggtagtcagtgagcgactcgaggcgctggatccggtccctgtttagaattgcattggagatggtttgatgtttttacggtgctatatggatgataattcaacctgcatttcaggataggatagactggtgctctcatgaatagacgacctgatgacccaggcagacgggctac

SEQ ID NO: 29015 - DNA, 604 bp, Zea mays
  Clone ID: LIB4829-001-E8_FLI
ctcgaggccggccgggatctcttcttccactgtctccccaccacttcgtcctcgccggctcgcaactccttgatggcggccacggcgagtctcactaccactgctccctcccctccagctctcctcaaagcatcagctcctttgcttatctcctttcgccccgtctcccgccactgcaagaacctgtgcatcaagaccaaggccacagaaaatgatcagtctgctaaaaagcatcagaaggtgaagagcattctttgccaggactgcgaaggagatggggcaatcgtatgcaccaaatgtgaaggaaatggggtaaattctgttgactattttgaaggccgatttaaagctggatctttatgctggttgtgcagaggcaagcgtgaaatcctatgtgggaactgtaatggtgctggcttcttgggtggatttctaagcactttcgatgaaactgcgcaatagtcatcggtttagcactttcgatgaaactgcgcaatagtcatcggtttaatttatgtttaagttacattgagggacccataatatatgtatcgtgttccatggacacataatcatattatataaaataatatttttaacgaac

SEQ ID NO: 29016 - DNA, 620 bp, Zea mays
  Clone ID: LIB4829-002-C5_FLI
ctcgaggccggccgggaaaaaaatatgccaagtgtagtaacagaagatcatgttagattttgctttgaagtattagtcaatcatttgaagaagaagcattatccacaaccacactttcctaatgatacctatcctctgtttgtcacttggcatattgaatcttatggccattcaaaattaagaggttgtattggcaacttctctccactcaaattacatgaaggacttttaaaatatgcattgataagtgctttaaaggacactcgattcaaacctattacattagaagaattacctagactgtcctgcgcagtatcattattgactgattttgaacaagcagatgattatttagactgggaaatcggtgttcacggcatttggattgaatttattcagcaagatggagaaaaggaaactgctacctatttgcccgaagttataaaggaacaaggctggactaaagaagaggctattcgatctttgctaagaaaaggaggctactatgggaacattaccaaagagtattgtgaatcatctattatcttgacaagatatcagtctcaaaagaaagagttttcctataaatctttatttcattaaaactcctccatcctcac

SEQ ID NO: 29017 - DNA, 794 bp, Zea mays
  Clone ID: LIB4829-002-D12_FLI
ctcgaggccggccgggactgttattcgttgtctcactaaacatcttcaacatgatcagtcttaccattggtgtcttggcccttcaaggcggcttctcagaacatattgatcttgttcgcaaagccgcagagtcaatttcttgtacagaaaacatctccaagaacaagatccaatgcattgaagtccgcacaaaagagcaactcgaccaatgtagcgctctcattatcccaggtggtgagagcactacgatctctttcgtcgctgctcaatctggtctactagagccacttagagatttcgtcaaggttcaaaagagacctgtttggggaacgtgtgctggtctgattctactatcagatgaagcaaacgctaccaagaaaggcggccaggaactcatcggtggtctcgccgtccgcgttcaccgcaatcactttggtcgtcaaacagaaagctttgaagctggcatgaatctaccctttttgaacgacgagaagccttaccctggtgtctttatccgtgcgcctgtcgtggaacaagtcattggagcatccgatggccgacaaccagtcgaggttctcgcaaaattgccaggccgtgttgacaagatgaagtctggagtctcgcaggccaacacaaaagacgactctggtgatatcgtcgctgtcagacagggaaatgtgctgggaactagtttccatccagagttgacaaaggatgagcggatacacgtctggtggctaaaggagattcttaaccagcaatagacttagatacaaatagacggcgtttttcac

SEQ ID NO: 29018 - DNA, 737 bp, Zea mays
  Clone ID: LIB4829-002-H8_FLI
ctcgaggccggccgggaaaatatccgcgtgagcgtgacacccgacctccccctcccgctccgggcagcagcagcagcagtcatgcggatagccgtggtggctcccgtcgcggcggcctacccatgttcctcctccctcgctgcgccggcgagtgcgacgagccgcgcgcacgttgcggcggccgggatgtcctacagggcgtcctctttcgtcggaggcgggctcgcggcggtggttgcgtcggtagccgcgcggccgaggagggcgggctctgggagaggcgacgctctcgggtgcaagtgcctcttcgggctcggggtgccggagctcgccgtcatcgccggcgtcgccgcgctcgtgttcgggcccaagcagctccccgagatcggccgcagcctcggcaagaccgtcaagagcttccaggaggcggctaaggagttcgaaagtgaactgaagaaagagcctggggaaggtggcgatcagcccccacctgcaacccccacggcaacgggggtaggtggcgcggagaaggggcttgaggcatcaagtagcaaggagagcacgtcgcggagaagggggttgttggtgtaaaattgtattctggtcttctggagttagcatcaagttcatgtcctttttaaccacgtcgcggtttcaggccattgtagcgatatgtttgtagtctgtaccgggaataacaaccttccgtgattgattatgaatcggttgtcttggac

SEQ ID NO: 29019 - DNA, 792 bp, Zea mays
  Clone ID: LIB4829-003-A6_FLI
ctcgaggccggccggccgggatcttgactgttacgttactgtacctcaattcttgagcctcattcaacagaccacaccactcctccaccccaataccgcagccatggatattcgactcctcacaaacgcagacttgcccctcattcagcatgcaaacctcgagaaccttcccgagaactacttcctcaagtactacctctaccatgccctctcgtggccccagctgagctacgtcgccgtcgatgtctcaaggcccaagaaggacccatacgagtaccccaagattgtcggatatgtccttgctaagatggaggaggagccgtcagacggcattccccacggccacatcaccagtctgagcgtcatgcgcacacaccgaagactcggtattgctgagaagctgatgcgccagagtcaactcgccatggtcgagacattccaggccaaatacgtctccctgcacgtccgtgtctccaacgcagcagcccgccatctttacgagaacacactgggtttcactaacgagaagaccgagtccaaatactacgccgacggcgaagatgccttttgcatgcgtctagacctcggtgacatcaagaagcaagtcgacgaaaccctcgccgcagaggaagcggacgccgcggatgagggtgacgccgtgggcgaggttggccgtgatcccgaagctggcaaggacaaggaggacggcgaaggacgaaagatgaaggtcgccgtggggagaggattgggagtcggatcattggtagaaaaggatgagtcaaagaactaaac

SEQ ID NO: 29020 - DNA, 747 bp, Zea mays
  Clone ID: LIB4829-003-C10_FLI
ctcgaggccggccgggctctgctcaaaatttcccccaaaacttctcctcttgaggaaggcagcccaagcgagcgcgctgcaatggcggactcgtcggcgccgacgagagtgatgatggcggtgaacgagtcgtcgctcaaggggtacccgcacccctccatcagctgtcgcaccgccttcgactggacgctctccaagctcgtccgctccaaccctgggggcttccacttcctcttcgtccacgttcaggtccccgacgaggacggatttgatgacatggatagcatctatgcttcgccggaggactttcaccaaatgaagcagagagacaagataagagggcttcatttgctcgagtactttgtaaaccaatgccatcagttagggataaaatgcgaggcatggatcagacatggagatccaaaggaggttatctgcagcgaagtgaagagagtccagcctgaccttctagttgtgggaagtaggggtcttgggccatttcagaggtaatatatgccagcatgactcagtgtttcaggttcagccatatcgcacagcattttattcagaatggcatagacagaaaagtgcatgttgcggtaattcaacctctcacattatcttgctccctgctcattgtgctccatatcttacatttcctttgcgctttgattatccaaggataatgtgtttgttgttgtgtggtcactcgatttaattgtacttgaggcccagcatgcttttacc

SEQ ID NO: 29021 - DNA, 1091 bp, Zea mays
  Clone ID: LIB4829-004-C3_FLI
aagccgcaaccgcaaccaccttcccaaatctcagtagtcgcctctcgtcgtcttcgtctagcccggcccgttccaaaacctccgtagccgccgccgccaccccggcgaccgaagatgatctccccggacgcagcccgcaacgtagtcggcatcatcggcaatgtcatctccttcggcctcttcctgtccccagtgctgacgttctggcggatctacaaggccaaggacgtggaggagttcaagccggacccttacctggcgacgctgctcaactgcatgctctgggtgtcctatggcatccccgtcgtccaccccaacagcattctcgtcgtcaccatcaacggcatcggcctcgtcatcgaggccgtctacctcactatcttcttcctctattccgacagccagaagcgcaagaaggcgttcgcgatcctggccgtggagattctgttcatggtcgccgtggtgctcggtgtgatcctcggcgcgcacactcacgagaaacgttccatgatcgtcggcatcctctgcgtcatcttcggctcgatgatgtacgcctcaccactcactatcatgagtcgagtgatcaagaccaagagcgttgagtacatgcccttcctcctgtcgctggtgagcttcctcaacggctgctgcaggaggccatcgccgcgtacccggacgccttccaccgcgtcatcggcttcgacaacgtcaggcagacgcagtgcgtcagcttcatcgcctacaagccccccggcagcgagtagagaccgtggctagatcgacccatggccatgcctctgcctgttgatcggatcaccttcttgcattggttcctctctctctctccctccttttttttccctttatctcatcatttcttttctcctgcatgcaatggttccttttgcttccaacaattctcctgctgatgtatccagcatggcatcatccatctacaattacgtacgtagtgcaacgactgtcgattcgttgggtgaggaacatatatgtgaatgcaagctccggctaccatacatgtgtaatgtgtaatagatatatatacaaaactgccgaggcgccgacaatacttg

SEQ ID NO: 29022 - DNA, 817 bp, Zea mays
  Clone ID: LIB4829-004-D12_FLI
ctctcggcggggcccggcaacagaccgggcagcagcacggcagccatggcgtcgagttcgaccctggatttggcgatgggccccggcgccctcctcccccgcagcgcggtcccgtacgcctccttcgctccaggaaggggaaggagcgcgagcggaacgaggagcaggaatctggcgctctccgcttcctcctccaacggtgcagcagtgccatccctgacaacagattcggagaagaagggcccagtgataatggaaattccactggaccaaatccggaggcctctgatgcgaacgcgggccaatgatccagtcaaggtgcaagaactcatggacagtatccgtgtcatcggcctccaagtacctattgatgtgttggaggtcgatggggtctattatggcttctctggatgccaccgctacgaggctcaccagcgccttggtctcccaaccatccgctgcaaagttcgccgtgggacaaaggaaacactgaggcaccatatgcgatgagttatattttattcagttacaaagtgatctgtgtatctagagctaaaacagaagcttccatggtcttttcgtcgtctcgtctgcaattctccatacctgtaaatgttgtccaaacagagtggtgaatagtacttctgtacccagcagcatcagaaaatgttaattttgcctacaacacacttttcgatcagtggatggatgagtaccacccgctcagtagatcattccatttctacgagatttttgtaaaaaaagaaaaatgccgcagcagtcggcacgctgtgtcatttagatcatctagaaaaac

SEQ ID NO: 29023 - DNA, 788 bp, Zea mays
  Clone ID: LIB4829-004-D3_FLI
ctcgaggccggccgggaaatataaatatacgcatcgaacctcatatccaatgcgcttctctccattcttatcaaacatcatcttcactttctcaaacattacccgtgtgagacctccactgacttcacacttggcctatcgacctaatcttcctcttcgatctatgtctggaattcccatcctaggcgctttgttcggcacttcatctagcaacaactccaaaatgtcttatcctgaccagcgttcaaacgacgagtggcgagctgtcctcaacaaggagcaattccgtattctccgtgagaagggtaccgaggctcccggttcaggaacgttcgacaagcactacccagacgaaggtgtctacacttgcgcaggttgtgaggcgcctctctacaaggctacccacaagttcaagtctggctgcggctggccggcttactttgacagcatccccggcgcggttgttcgtcatgaggatcgcacctttggtatggcccgaacagaaattgtgtgctccaactgcggcggtcatctaggacatgtgttcaagggtgagggctatgacacgcctaccgacgaacgtcattgtgtgaacagcgtcagtcttaacttctcccccaatgacaagattgtcaaggataagcctgaaagcaaggcttgatattgagatttgggaccttggaaaggctgttgatgagatcatgaggatatgagtggatgagaagtacttggcgtcgaggatgcggttgtgttgtactcagagagttgaatagccaatgggatttatg

SEQ ID NO: 29024 - DNA, 1291 bp, Zea mays
  Clone ID: LIB4829-004-F10_FLI
ctcgaggccggccgggaacgttggaaccttaccaggctattcttacaccttcatactctcaatcgaatttaagcgatagtagagagctcctcctattgcaaataccatcatcatgggcgcccccgaagttcaccacctcttccacaaccccatcgccgaccactccttttcggccgatcagtctaccctggctgtcgctcgggatacttctgtcgagctctatggcaaggttggcagcgcttttaagctgaaggactcgctcaagggccacgacaagacagtcactggtgttgatattgcccctaacagtgggcgcattgtcacatgctctcaggaccgtaacgctatcgtttgggaaccttcccctgaaggctataaaccaactctcgtccttcttcgaatcagccgagccgccactttcgtgcgctggtctccctccgagaacaagtttgccgtcggatccggtgacagggtcattgctgtctgctacttcgaggaggagaacgactggtgggtgtccaagcacctgaagaagcctatccgcagcaccatcaccagtgttgcctggcaccccaactcagtccttctggctgctggatccaccgatgctcatgcgcgagtcttctccgccttcatcaagggtatggacgctcgtcctccccctggagtttggggcgagcgtctcccattcaacaccgtttgcggagagtatctgaacaactcggctggatgggtgcactccgtttctttctcccccagcggagacagtcttgcctttgcagctcatgacagcagcatcactgtcgtttacccctctggccccgaccaagcccctcgtgctgttgttactgtctctactcagcagcttcctttcaagagtctgatctggaccagtgaagatgagattatcgctgctggttacgactgcgaggctttccgcttccagggcggcgagggtggctggcagttggctggtcccattgagcaaaagggcggccctggtctgggcgagcaccgtgaggagtctgctctgaacatgttcaggcagatggatctcaagggcaaggctaaggatgacactcagcttcaaaccacccaccaaaacaccatcagcaccgttcggccctttgagagttctggtgaccgcgttaccaagttcagcacaagcggtgtcgatggcaggatcgttctgtggagcgcttaaatagactttgggatccaacatagtcgtagaatagatttggactatttatcatgagactactagtagatataatcgaactcatgaaag

SEQ ID NO: 29025 - DNA, 1007 bp, Zea mays
  Clone ID: LIB4829-005-C7_FLI
tcgaggccggccgggagcacccaacttcttcctcccaccccccagctcaatcaacacaatcagacacaatggctgaccgaggaacttctcgcggtggaggctttgcttcccgaggtggtgaccgtggcagaggtcgcggacgaggccgtggccgcggtcgcggtaagaacgaggagaaggagtggcagcccgtcaccaagctcggtcgtctcgtaaaggccggcaagatcaacagcatggaggagatctacctgcactctctgcccatcaaggagtaccagatcgtcgacaacttcctgcccaagctcaaggatgaggtcatgaagatcaagcccgtccagaagcagacccgtgccggtcagcgaacccgattcaaggccattgtcatcattggtgactccgagggccacgtcggtctcggtatcaagacctccaaggaggttgccaccgctatccgtgccgccatcatcatcgctaagctcagcgtcatccccgtccgtcgtggttactggggtaccaaccttggtgccgtccactctctgcccaccaaggagagcggaaagtgtggttccgtcaccgtccgtctcatccccgccccccgtggtactggcctcgttgcctcccccgctgtcaagcgattcctccagctcgccggtgtcgaggacgcctacacatcctctgccggttccaccaagaccctcgagaacaccctcaaggctactttcgttgccgtctccaacacctacggtttcctcacccccaacctctggaaggagaccaagctcatccgaagtcccctggacgagttcgccgatactctgcgcgagggcaagcgatactagagcgggaatgttttatgaactgatgggagctggaaactggtgccgcggagtcacgaatcaattgtgtttcattgcataggttggccggttaggacacttcagatcgtataggctatggtgactgatggcttaacggtctgaaatgaaaaagaaatttcatccttc

SEQ ID NO: 29026 - DNA, 1177 bp, Zea mays
  Clone ID: LIB4829-005-F5_FLI
accgtacgtgccttgcgcccttgcccatccaagtccaacctccctaaactactcctgcgtgctgcctgagcgagtgagcggcgatggaatccttgggtgtgctgctcctgcacccgctcgacacatacctggagcaagaactggatcgccgctgccgcctcctgcgcctctgggaggtgccgcatgaccgccgtggagaattcctccgtgcccacgcatcatcgatccgcgccgtggtcattggcggcggctcgggcttcggcggcaacccggctctcatcgacgacctcccgcggctcgagatcatcgcgtgctacgccgtcggctacgactgcgtggaccttaccagatgccgcgagcgcggggtccgggtcaccaacacccccgacgtgctcaccgacgacgtcgcggaccttgccgtgggactcgccatcgccgctctccgcaggatcccgcacgccgacagctacgtccgcgccgggctgtggaaggccaatgatggccactacggtctcaccactcggttcagtggcaaaagggtcggcatcattgggctgggcaggatagggctttccattgccaagcgagtggaaggcttcggttgcccggtctgctactaccagagaacaaggcaggatgcgtaccccaactacatctatctcccgacggtgctccagctcgcagcaaacagcgatgtcctcgtggtggcctgctcgctgaacgagcagagccgcggcatcgtgagccgcgaggtgatcgaggcgctcggccccacgggcgtgctcgtcaacgttgggcgcggcgcgcacgtcgacgagcccgagctcgtcgcggcgctcgccgatggccgcctcggcggcgcggggctggacgtgttccaggccgagccggacgtgccgcaggcgctcatggcgctcgacaacgtcgtcctggcaccgcacatgggcagcgggacgcatgagacccgcaaggccatggcggacctggtgctcgccaatctggaggcgcacgctctcaacatgccgctgctcactccggttgtctgacactgacaataattacttttaagccgagcttccgcggcatgtatggaatttggtcacttgttttcaaatgctgtgaattaataacaaagcaacacaattgttaagtatcaagaaactttgccttccaaagc

SEQ ID NO: 29027 - DNA, 1051 bp, Zea mays
  Clone ID: LIB4829-006-A6_FLI
agtcgtgtgcccgagccgaggttccccaaacacgcacagcacacgaacacacaccgcgcccagctccgaggtgatcttccggcggccggcgagatgagccgtggcacaggcgcgggctatgaccgccacatcaccatcttctccccggagggacgcctgtaccaagtcgagtacgcgttcaaggcggtgaagtcggcgggtgtcacgtcgatcggcgtccgcggcgcggactccgtctgcgttgttacgcagaagaaagtcccggataagttgctggatcagacgagcgtgacacacctgttcccgatcaccaagtacgtcggattgcttgccactggccttacagctgatgctaggtcattggtttcccaagcaaggaacgaagcagctgagtttcgtttcaaatggggctacgagatgccagttgatgtgttagcaaaatggattgctgacaaagctcaagtttacacgcagcatgcatacatgagaccccttggagtagagaaaaatgcccaactattcaagtgcgaccctgctggtcacttctttggacataaggcaactagtgccgggctcaaggagcaggaagcaataaattttctggagaagaaaatgaaggatgacccgaaattcacctatgacgaaactgtgcagattgcaatatctgcgttgcaatcagttctccaggaagatttcaaggccactgagatcgaagttggtgttgtgagaaaagatgaccgcgttttcagagctctcacgacagaggagatcgatcagcacctgacggcaattagtgaacgtgactgagatgtcatatgctgcacatttcagcgctgcacacactgcgccgtgccattgtgcttcggcagtcattaagtttcatagtcatcaaaggaactgagtgtaccatttcacgtttaagaccgaaaacaagccccctctcgatgtactcgtttcatatcgttctgtggttgattgaaattggcacggtttggttttgggttgctaaaatgctaactatatttgcatgtggccaatattttaaccgttc

SEQ ID NO: 29028 - DNA, 916 bp, Zea mays
  Clone ID: LIB4829-006-F10_FLI
acctcacctcaccaaacgacgcgcacccacggaacggtctttttgttaagacaattcctcagctcttactactaactcgcaggttgtttgagaggacggaagtcataccacagtcaagatgccttcagaagccggtcaccgactatacgtcaagggacgtcacctgagctaccagcgctctcgtcacaccacccgccctgctaccagcctgatcaagatcgagggtgttgacgacaccaacgccgccaacttctacctcggcaagaaggtcgctttcgtctaccgtgcccagaaggagatccgtggcaccaagatccgcgtcatctggggcaaggtcacccgtcctcacggaaactctggcgtcgtccgcgccaagttcacctctcctctccccaccaagtctttcggtgcttccgttcgcgtcatgttgtacccttcgtcgatataaaaaaagggcttcgggctggagttggtagtgaggggcggttctcatttggctgcattggtcgaggcaaggataaaacaaactgccttgctttgaggcattcaattcaaaaagacgtcaaatcccaaccccgaaaagggctcttcgcacctgagctactcgtttttgatgatataacttgatctccctttcatgcaacggttatcggaaatcgatcctgtccactgggaggggagcttcagcgatgaaacactttctggtggttgggattcgggaccggtgtttggaactacggtcgtgaatagggtacaagcgaatcatcgatgaaatgccaggtccagggcctctattacggcagtacacaacgtccctgaaagctggattgtgatttgactcgtatggagaaattttgagccatggttggcgtctaatgatgaatcagaaatgtctattgaaaccacacaacacagc

SEQ ID NO: 29029 - DNA, 1030 bp, Zea mays
  Clone ID: LIB4829-007-A12_FLI
ctcgaggccggccaggaaaaaaaaaaaaaaaaaaggagaaggaaaagacaattttctcgtaaccttccgggctcctcttcctctcctcgcgttcccccaccaaaccctaatccgagcacccagcccctacccgcttccgctcgcgccggcctttggggctctcaccctgagcggtaggaatccgcagggctccggttgggtgccagaagcatccaagtcgttggcgggagaccgggaaatggcggaaaaagagggggcgaaggttggggcggaagagatggaagagcgggagcaggaaggggaggcggaggaggtggaggtgaagtttcgtctcttcgacggctccgacatcggccccgtgcgctgcaacgccgccaccaccaccgtcgccgctctcaaggatcgcgtcgtcgccgactggcccaaagataaacaaattatcccaaagactgctagtgatgtaaaactaataagtggcggcaaaattctagaaaatgacaagaatgttgcacagtgcagagctccttttggcgatcttcccagtagtgctatcacgatgcacgttgttgttcaaccatcatcagccaaatcaaaaccagataagaaggcgaacaagttgcccaaaaccactcgttgctcatgtaccatactgtgaactatatgaaggtcaagtccctacgagaccaacaataatttgtacgtccacaaaaatattctgcagagaatttgagaacaaagattcaagatgtccatgccattctctgccaacgggtggcaatggcgaaagacaacgtccacatgttgtaagctatatgtaattgtaacttaggtacaaagagtcgtccctgtgctgtgcggtcagggaaaatagtctggtggttgcgctgttttactctacaagatgtcttatatgatgtacaagatacagacacttctgggtgtagtgaccttgttcccacctcaccttttaaagtttgtggcgctgagtcaatatggatctaagtcaattgattgaagaaacattttcgac

SEQ ID NO: 29030 - DNA, 635 bp, Zea mays
  Clone ID: LIB4829-007-C6_FLI
ctcgaggccggccggggacctgcagccaaccatctaccagcgacccagcgagcgagagcagcacacactgcacgcagctagctaggagcagcagcagcggcggcgatggcggcctccatgatctcctcgtcagctctggcggtggcgcctcagggcctgccgcccctcggccgccgcgcctcctccttcgccgtcgtctgctccaagaagaagatcaagaccgacaagccctacgggattgggggtggcctgaccgtcgacgtcgacgccaacgggagaaagggcaagggcaagggcgtgtaccagttcgtcgacaagtacggcgcgaacgtcgacggatacagcccaatatacaacgaggatgactggtctcccaccggcgacgtctacgtcggtggaaccactgggcttctgatctgggccgtcaccctcgctgggatcctcggcggcggcgccctcctcgtctacaacaccagcgccctctccggctaaggatatccaatgcatgcgcttcttgcgattcgtcatgtaaaatcagggtgtctgtctataatctagcctccatggatgctcaaccttcgtcatgtaacaataatcagtgctactcttcattacataattttgatgctatatac

SEQ ID NO: 29031 - DNA, 725 bp, Zea mays
  Clone ID: LIB4829-007-E3_FLI
gaagtccattctgttggcatcgtcccatctcccttgaaccctttcgcccacaccacagcaccgctgccgaaggtgggaaagaaggcggcggcggaggcaccggcaccggcaccgcctaggaaaggaaaccgaggaaactacagccatggtggtacggatccgtctggcgcggttcgggtgccggaatcggcccttctaccgggtgatggccgccgatagccgctcccctcgagacggcaagcacctcgaggtcctcggctactataacccgctcccagggaaggatggaggcaagaggatgggcctgaaattcgaccgggtgaagtattggctgtcagttggggcacagccatcagatcctgtgcagagtattctctttcgtgccggacttctgccaccacctccattgctagctatggcacggaagggtgggccacgtgataggcgccccattcatccaatgactgggcgccctctggatctcgagggtgtcgcaattattgataattccaatgctcctgaaggcgatactgaagtgcctacagatgaggtggctcaataagccttttgtattagcatagcatatgtagcggtgctgcaaaagaaaacttgtttgatgtgcttgtggcaagactttgggtactcgtacaatgtggcaaacttttaaacaggtaactttcatccatttctcttcttaaaaatatgtcagttcccgctgtttgttc

SEQ ID NO: 29032 - DNA, 758 bp, Zea mays
  Clone ID: LIB4829-007-F3_FLI
acgaaaaaaaaaatcgtcaaatcttcatactaacccgacgaaccgcagcccaccgtcaagatggtttccgccaagaagcacgtccctatcgtcaagaagcgcacgaagcgtttcgaaaggcatcagcatgatcgcttcatgagggtatccccaagctggcgtaagccaaagggtatcgacagtcgtgtccgccgtcgattccgtggtaccattgccatgccctctatcggctacggatctaacaagaagacccgttacatggctccctccggcttcaaggctttcattgtctcaaacaaatccgacttggagctccttttgatgcacaacaagacccatgctgctgagatcgcccacaacgtttcttcccgaaagcgagttgacatcatcgctcgtgctaagcaacttggagtcaaggtcaccaaccccaaggccaaggttaccaccgaggtttaaaaggaaatggatcggtttttgggctgctttacggttatgcatcggaaaggggattgcgttgcttgcggttctggcacataaattatgcatgctagagaataaaaaaacgcgccgttgaacgacaaggatactggcatcaaccgcttaaacagcaaatctctcggagtcagaggggcatgagaaacatccatggtctctactccaaaccgatgagggcgctaaggaggggttaagtaaaaagccttgtgcattacaggcgaggctatgaaataaaaacaaaacccctttgagggccccatcgg

SEQ ID NO: 29033 - DNA, 742 bp, Zea mays
  Clone ID: LIB4829-007-H10_FLI
cgctcccgtcgcgactccaatcgcaattcgcaattcccagccccattccccgtcggccgactccagcgagcgacttcgccccggtcggaagcaccaccagccaccagcgatgtctggcgaggaggaggagaacgccgcggagctcaagatcggcgaagagttcctcaaggccaagtgcctgatgaactgcgaggtggcgatcatcctggagcacaagtacgagcagatccagcagcacgcgtcgtcggagtcggacccgtcgtcgcaggtgtcgcaggtgttcgagaagtcgctgcagtacgtgaagcgcttcagccgctacaagaaccccgacgccgtgcgccaggtccgcgagacgctgagccgctacggcctcgccgagttcgagctctgcacgctcggcaacctctgccccgacaccagcggcgaggccaccgcgctcgtcccctccctcaagtccggcggcaggttcgtcggcgaccccggggacgagaagatcgagaagatgctcaacgacctctccctcatcaagaagttcgagtagagcgggagccctctcttctcttatcttcttttctcttggagtagcgagcatccagagaggaggggaattcaacatcaagacgatgtactgataaaattttacttgccttacactactatcgttgaggttcacgtctgcgtattgattagaaccttgtttgatcgataatccaatatactagtagtatgtgtgtggttc

SEQ ID NO: 29034 - DNA, 930 bp, Zea mays
  Clone ID: LIB4829-008-C12_FLI
cctcgaggccggccgggctcgaagagcaagcaagagaggcagacacagatagctgccagtagagcttcttcttcttcttcttcttccgcttcctcttgccgagcgcagtgctacgtaggaaggagttcacgccctcgcgcacgcgtcgtagctcgtcggtcgatcgccggaaatgtcgaccaactcgagggccaactccagggccaacttcaacaacgagatccacgacatcggcacggcggtgcacaactccagcagcctgccccccgcgtactacgaccggtcgctagcggacatgttccctccccacctcctcaagaaggtggtctcggaggtggtgtccacgttcctgctggtgttcgtgacgtgcggggcggcggggatctacggcagcgacaaggaccgcatctcgcagctggggcagtcggtcgccggcggcctcatcgtcaccgtgatgatctacgccgtcggccacatctccggcgcgcacatgaaccccgccgtcacgctcgccttcgccgtgttccgccatttcccctggatccaggtcccgttctactgggcggcgcagttcaccggcgccatctgcgcgtcgttcgtgctcaaggccgtgctgcaccccatcgccgtgctgggcaccaccacgccggcggggccgcactggcactcgctcatcatcgaggtcatcgtcaccttcaacatgatgttcgtcaccctcgccgtcgccacggacacgagagcggtgggtgagttggccgggttggcggttggttctgcggtttgcatcacgtccatcttcgcagggtaaatacataaacgcacacgcacgcctgcacgcacacgcttagaactacttgattcaagtttaaaatagttgagggggctacgtcaattcgaatactaataagttgtttggtttgaggaatgacc

SEQ ID NO: 29035 - DNA, 1541 bp, Zea mays
  Clone ID: LIB4829-008-D6_FLI
ctcgaggccggccgggaaaatgtctcgaaaaattagaaccgcacagtccgtctccttcgacatccccgccgctgagcaaccatatctacacaacagatggcacccagaggttccaagcattgcaaccgttgaaccaggagagacagtcaagattgaatgtctcgattggacaggcggccaaatcggaaacaacgacagtgccgatgatgtccgcgatgtcgatctcacaaagatccactatctcactggaccctttgaaataaaaggcagtgaacctggcgatttgctcgtcgtcaacatcactgatattcagccctttgaccattcaccctggggtttcacaggagtcttttcaaaggacaacggcggcggtttcctctccgagcattaccccgatgcagctaaagcaatctgggattttgacggtgtttattgttccagccgtcatatccccggtgtccgattcccgggattgatccaccccggtattcttggctgtgcgccatctgctgaaatcctggccgagtggaaccgtcgtgagggagagctagctacttcgatggccgggcctcatcccgataaagtgtttgcgcaacctccctgcgagattaatgctcatggtggactagccaaaggtgatgttatggctaggatcgcaaaggagggagcgagaactattcccggcagacctgagcatggaggaaactgtgacattaacaatatttcccggggatcaaagacgtatctccccgttcatgttcctggagccaagttttctgttggagaccttcattttagccagggtgatggtgagattagtttctgcggtgctatcgaaatggctggtatcatcactatcaaattcgacctcatcaagggtggagtcaagtcgagaggtctcaagagtccagtttatcgaccaggtgatatgggtcctacctttagtccgtcgcgatatctcacatttgagggattctctgtcgacgagcaaggaaagcaacattttatggatgccacaattgcttaccgacaatcttgtctccgtgcgatagaatatctcaaacaatttggctactccggcgaacaaatctatctcctcctgtcctgtgcaccaatcagaggagctattgctggcatagtcgacattcccaacgcttgtaccacgctgggcatacccatggatatctttgactttgacatttccatcgaaagtgagcctgttgttaggaatctgggagcttgtccaatttctcgctaagtttggaggccgacatctcgcttgaactcttgcagccattctgcattgtcgactggtgtttggttccatggatcatcactgggctgttagcggtgaaattgtaaggagcacggaacttactcgtcgtacaagatccatcttgcttggtatttgagttcatcgtcggatggaacatgacgatttggattattaggcgacattgtagtcatgacgaatcttgacaattctctctttaaccttcggtagctgttgttgtcgtttataaagaatggggttgctgttc

SEQ ID NO: 29036 - DNA, 869 bp, Zea mays
  Clone ID: LIB4829-008-F6_FLI
atatatcctggtgctcttgccatggctggtgcatcgctcctctccccatcctgcacgctcctccgcctgattcccagcgcgtcgcacttcaagagattcgatcgggttcgccggttcgcgcccgccgccatggcgacttcctcaggaccaaaggaggcgccagcgaataaccctgggctccagaccgaggtcgaccccgccaccaaaggctacttcttgcaacaaacgatgttacgtgtgaaggacccaaaagtgagccttgacttctactcacgtgtgatgggcatgtcgttgctgaaaaggttggattttgaagagatgaaattcagtttgtattttctaggttacgaggatgtgaccttagcccctgatgatcatatcaagcggactgaatggacttttaggcaaaaagctactcttgagctcacccacaactggggcacggaaaatgaccctgaattcaaaggttaccataatgggaactcagaccctcgtggttttggtcatataggagtaactgtggatgatgtccacaaggcatgtgaacgctttgaacgtcttggggttgagtttgtgaagaaacctgatgatggaaaaatcaaaggcatcgctttcatcaaagatcctgatggttactggatcgaaatatttgaccagacgattgggacggtaacttcttcagcatcatgatgaacagtagtggttccttatatggtgcgcaagatcatacaactctggcataagagcttttcatatgtgtgtctggggtctggactcggattaagggctggaatctgtttacttctagcatcttcttgctttaataatatgcgaactatgttgaggaatgaaataaaataagttcgggc

SEQ ID NO: 29037 - DNA, 736 bp, Zea mays
  Clone ID: LIB4829-010-F2_FLI
ctcgaggccggccgggaccttccaacatcgacccttccgacgagcagcaaataccgccacgatgttgattcccaaggccgaccgcaagaagatccacgagtacctcttccgtgagggtgtcctcgtcgcccagaaggacttcaaccttcccaagcaccccgatatcgacaccaagaacctgttcgttatcaaggctatgcagtcgctcaactctcgcggctatgtcaagactcagttctcttggcaatactactactacaccctgacccccgagggtctcgactacctccgcgagtggcttcacctccccgctgagatcgttcccgctacccacatcaagcaacaacgatcgcacgctcctccccgtggcatgctcggtgagggcgagcgcgagcgacgacctttcggccgtggccgcggtggtgaccgaggtgaccgtgagggtggataccgacgaagggatgctggcgagggcaaggagggtggtgctcccggcgagttcgctcctcagttccgtggtggatttggccgtggccgtggcgctgcccccccttcttaaacgaacccattttatcatctaggtggtcataaatgagaagcatggcgaagggtatcggcatgtactcataaaaaatggagggcaatttctaccatgggtttcgctcgtgtgacaggggttgcgtgggggatccgtgggagtttgagggttttagaacctcggaatcatttgcatcgc

SEQ ID NO: 29038 - DNA, 888 bp, Zea mays
  Clone ID: LIB4829-011-B3_FLI
agataccctcaacccccgacatcaacacctcacagccggcaggatgaagtacattcactcccaggagctccttgagatccccgagggggtcaaggttgccattaagtcgcgaattgtcaccgtcgagggtccccgcggcaagctggtcaaggatctcagccacttggccgtcaacttcaccagcaccaagaagaaccagatctccatcgagatccaccacggtgtccgcaagaacgtcgctaccctccgaactgtccgaaccctcatcaacaacctgatcattggtgtcaccaagggcttcaagtacaagatgcgatacgtctacgcccatttccccatcaacgtcaacgtctcccagaactccgagaccgacttgtacgaggttgagatccgaaacttcatcggtgagaagctcgtccgccgaatcgtcatgcaccccggtgtcgatgttgaggcttccaccacccagaaggatgagctcgtcctctctggtaactctctcgagaacgtttcgcaaagtgctgccgatatccagcagatctgccgggtgcgaaacaaggatatccgaaagttcttggacggtctgtacgtctccgagaagggcaacgttgtccaggacgaataaacgcgaacacggacacggatcttgtttcttttgcgtttctgggtctcaggagtggcgaaggttcatcttgcatgtcatgtagcaaaaagaaagggctactaaacaaatttcaaaaagcaaagagatgatgactctggtgccgaccaaacacttgaatctcgtcagcgaatcgtgtatgtgaccatttaaggagcgaaaagggccggctttagacgagggttcggggggtttttgcgataagacaaaaaatggcgttttcacgc

SEQ ID NO: 29039 - DNA, 828 bp, Zea mays
  Clone ID: LIB4829-011-G5_FLI
ctcgaggccggccgggacgattgtagttggattaattcccaccccacaaccccccaccacaagaacttgttcgatcgaattcttcttcaactacccgccgcgggaacccaaggaaggaggcaaagcaaaggcttctcgcaggttcgcatcctccggaaccatccactcctctcatcccgctcggagtttgacctctcccgacctgagatccgattgaatcgggtttcccgtcagcggcttctgcggcgggcgccatgaacagcagcaagcaggcgctgatttacagcttcgtggccaagggctccgtcgtgctggcggagcacacggccttctccggcaacttcagcaccgttgccgtccagtgcctccagaagcttccccccaacagcaccagatccacctactcctgtgacggccacaccttcaacttcctcgtcaaccgcggcttcgtgttcctagtggtcgccgatgaggcggccgggaggagcgtccccttcgtcttcctagagagggttagggaagacttcatgcagcggtatgggtccagtatcgatgaggaggggcagcacccgctcgctgatgatgctgataaggatgactttctgttcgaagaccggttcagcattgcctacaaccttgaccgtgaattcggcccgaggttgaaggaccatatgcagtattgtgttaatcatccagaggaaattaacaagctctccaaggtgaaagcccacctatcggatgtcaaagggatcatgatggacaacattgagaagatattggatcgcggggagaagattgagcttttggtgggtaagacagagaccctac

SEQ ID NO: 29040 - DNA, 647 bp, Zea mays
  Clone ID: LIB4829-012-E3_FLI
ctcgaggccggccgggcgtcttacaacttaatcacaatggccacctccatcaagtctatccgagctcttgctcccctccttgaccgtgtcctcgtccagcgcatcaaggctgagactaagaccgccagcggcatcttcctgcccgagtccagcgtcgagaagctcaacgaggccaaggtccttgcagttggccccggtgccctcgacaagaagggcaaccgtctacccatgggcgtcaccgtcggtgaccgtgtcctgatcccccaattcggtggctctcccgtcaaggccggcgaggaggagttccagctcttccgcgacagcgagatcctggccaagatcaacgaataagatacccatatatcaaatcaaatcaaacaataaccagcctgtatcatactgtaccatatcgcaagcggcgaacgtgagagatgagactctactgaagttgcttgagaaggggaagagagcggagttgattgtaatgtaggcgcaaaaagacgacagaccaattatgcaagaagatgtgcatgcgatttgtatgagtgtgcgtaggaaaaagaaaaatggtgctgatgtgttgggttggtcgcgcaagacagaatcaaatctccactccttaccctttcaatatcatgatttacatc

SEQ ID NO: 29041 - DNA, 916 bp, Zea mays
  Clone ID: LIB4829-012-G4_FLI
ctcgaggccggccgggatatagacttctactcggctgcatctttgctccggtcgatgcacgacaagaggagaatggggacggaggccgacgccgcagccgtggacctactccggtcgcagatcccgttccagaccgacggggagttcgttctcccgccgcgcggcgtcgggctcgtcctcgtcgacctctgcaacggcttctgcaccgtcggcgccgggaacctcgctcctgttgcaccaaacaagcagatcagtaagatggtggaagaggccgcgaggctctctaagctgttctgtgatagaaacctaccaatatttgcattcctggatacccattatccagataagccggaaccaccatatccccctcattgtattattggtactggggaggaggactttgttccagatctggagtggttggaaaaggagccaaatgtgactataaagaggaaaagttgtattgatgggtatatcagctgcatagagaaggacgggtctagtgtttttgctgattggattggaaaatatcagataaaaactgtcttggtgctcgggatatgcacggacatctgtgttttggattttgcaagctcaactctggctgctcgaaatattgaccgagtgcctccattacaggatgtcgtgatttattcaggggggtgtgctacatatgaccttcctgttgagattgctactaatatcaaaggagctcttgcccatccacaggatctgatgcatcatattggactctatatggccaaaggaaggggtgcaaagatagttgacagggtggttattgaaccttgaataaaaaaactttccctcgtcacagtgatgttgctagggtttccttccattgtaacaaccagatatatatatgcatcttggcagaaagttgttgagattttttatg

SEQ ID NO: 29042 - DNA, 621 bp, Zea mays
  Clone ID: LIB4835-002-E8_FLI
ctcgaggccggccgggaatcacaatcacaatgtctggtctctttgctcgtcaagcttgggctactgcctccaaggtccgatctactgctctgcgagcaccaaaggttgcgtttacctgcagagtcaacaacattgctccccgacgatcattttcagtttccatgaaccttctggctagaaaatacactgagagccacgaatggattgacgtagccgccgatggcaagacctgcacaattggcatttcaaactacgccgctgaagctctcggcgacgtagtctacgtggaactccccgcagtaggcgaagagacagcccagggcgagtcctttggcagcgtcgagtccgtcaagtcagcctctgacatcaactcgcccgtttctggttccgtcgtcgaggtcaacgaccccatcgtcgagacacctgctgatctcggcaaggaccctgagaagagtggctggttgatcaaggttgaggctgaggatgtttctgctttggatgcactgatggatgaggctgcttatgccgagcacatcaagggggagcactaagcgaagaggcagtggtttaattaatgtttgtgatttaaaaagcaagatatcaagacactttccaacaagc

SEQ ID NO: 29043 - DNA, 691 bp, Zea mays
  Clone ID: LIB4835-003-G4_FLI
ctcgaggccggccgggacaattctatctatgccaagagcagacatgggctttcctctcccacggccacgggagaatgccgtgacgcgaacccaacttatttcgtgacaaccaatgcagctcgatagattcatggccgcctccgtagtggtcctcgccgtcgttgtttccctcgccgccgtccttccgatcgctcgcgctgagatcaagacgacacccattgtctccgactcgcgctccgtcatcctatttgaggagttcggcttcaggcgcggcggccacgccactgtctcggccaccggcatcacatggagggtccccgaggattcccagctgcaggccgtggacacgacactgatgggcttcttcctcatctccaattccctcttctacaagatcaacaacgagtccgactacgccgaggccaccggcggcgccttctgcccgctgacaagcaagtacgtgcagcggctcttcctgttcaaggaggtcgcgcccgacggcacggggaggggctccctgaccatcgactccgacgaccagtacacggtgctgttcagcagctgccaggagggcgtggaggtcaccatggaggtgcgcaccgagatgtacaacctgcggcggtccggcgccagggagtacctccccgtcggactgctgccgctgccgtggatcttcgcggcggcggccctc

SEQ ID NO: 29044 - DNA, 625 bp, Zea mays
  Clone ID: LIB4835-005-G5_FLI
ctcgaggccggccgggagcgctgactagcaaggagccaagcaggacataatactgaagcaggctgcggctgcggctgcagcaacaagtcaaggaggttgaaggcgaattagagagaagaggaagatgttggcggcgacggatccgatgctgtggcacaaggtggccgccgtctccggggttgccgctttggggctcggcacctacggcgcgcacatgttccgccccaagaaccccgcgtacaaagaggtttggcacacggcgtccctgtaccatctcgtccacaccgcggcgctgctcggggcgcccatcaccaagcgccccaacgttttcggagggctcctcactgctggaattgtgctcttctctggaacgtgctacaccgtggcttatcttgaagacaggaagttttcttcaccggcaccattggggggctttgcgtttattgctgcttgggccagcctcctcttctgattaaattgtgcttttccaagaaaacaaaaaaagtcataaacctctctatatggtgttttatcaggttgtgaaaaatatacttgtaaagtgtatacagtggacagtatgcgcctctgtttaataattcaatctgtgattcctatgtttctattc

SEQ ID NO: 29045 - DNA, 765 bp, Zea mays
  Clone ID: LIB4862-001-B11_FLI
gagaaccctagcgccccgcccgtcctgccgccgccgcagccgccatcgcacggccatgggtatcgatctcgtagccggcggccgcaacaagaagaccaagcgcacggcgcccaagtccgacgatgtctacctcaagctcctcgtcaagctctaccgcttccttgtgcgcaggacaaagagcaacttcaacgccgtgatcctcaagcgcctcttcatgagcaagaccaaccgcccgccgctctcgatgcgccgcctcgtcaggttcatggaggggaagggtgatcagatcgccgtgattgtgggcaccgtgaccgacgacaagaggatcagcgaggtgccggcgatgaaggtctgcgcgctcaggttcactgagacagcgagggccaggatcatcaatgctggcggagagtgcctcaccttcgaccagctcgcgctccgtgccccacttgggcaaaacacggttctgctgaggggtcctaagaacgctagggaagctgtcaggcacttcgggcctgcaccaggagtgcctcacagccacaccaagccttatgttcgctcgaagggtaggaagtttgagaaggcgagaggaaggaggaacagcaggggcttcaaggtctaagtggccactgccttgccaatctagtgccgttttgctcgtgtcagctcaatattaccgttttggtgtcatagttgtaatgttttagttgtcggaatctcgtgtcattatcggatatcgaaccaatcaaatttcgctccttttttgtt

SEQ ID NO: 29046 - DNA, 829 bp, Zea mays
  Clone ID: LIB4862-001-C12_FLI
cctcgaggccggcctggccgggaccaccactggacgtcagcctagcaattagctcatcgactccagattggagaactcgacaccatgaaggtgctgatcgttgcccttgctctcctggcgctcgctgcgagcgccgcctccagtacaagcggcggctgtggctgccagacaccaccgtttcatctaccgcctccgttctatatgccgcctccgttctatctgccgccgcagcagcagccgcagccatggcaataccccactcaaccaccgcagctaagcccgtgccagcagttcggatcctgcggcgtcggcagcgtcggcagcccgttcctgggccagtgcgtcgagttcctgaggcaccagtgcagcccggcggcgacgccctacggctcgccacagtgccaggcgctgcagcagcagtgctgccaccagatcaggcaggtggagccgctgcaccggtaccaggcgacatacggtgtggtcctgcagtccttcctgcagcagcagccgcagggcgagctcgcggcgctgatggcggcccaggtagcgcagcagctgacggcgatgtgcggcctgcagctgcagcagccaggtccctgcccttgcaacgcagctgccggcggtgtctactactgaggaaactatgtactgtagtaataatgtaatggagccgctggctagctacctagctcgctagtttactcatttagcggcgatgagtaacgtagtgtcacccatcaccatgggtggcagtgtgagcaatgacctgaatgaaccattgaaatggaaaggaataatatataaggaaaaaagatgattggaaactgac

SEQ ID NO: 29047 - DNA, 870 bp, Zea mays
  Clone ID: LIB4862-001-D7_FLI
tcgaggccggccgggccgggaacgaacaaagagaaagttagaggcggtttgtcattagactcacttcccccaaacccaaggtgcgagagctgcgaccgccgcagccgccatgtcgggaggaatcgcgcgcggccgcctcgccgaggagcgcaaggcctggcgcaagaaccacccccacggtttcgtggcgaggccggaaacgctggccgacgggtcggcgaacctcatggtctggagctgtaccatccccggcaagcaggggactgattgggaaagtgggtactacccacttacccttcatttcagtgaagattacccaagcaagcctcccaaatgcaagttcccacagggttttttccacccaaatgtttatccttcaggaacagtctgcctctcaattctcaatgaggatagtggttggagacctgctatcactgttaagcagattctagttggaatacaagacttgcttgatcagcccaatccagctgatcctgccccaactgatggttatcacctattcatccaggatccaacagaatataagcgacgtgttcgtctgcaggccaagcaatatcctgctctggtctgaggatgttggcataccagagatccatgatccatcctgcacatccgcatagtagttgcaaatgttaaaattatggtctcaaattggatttgacaagacataagttgtctggaggattgtccagtgtaaacctgaaccttctatgatgtgtatgagtccagtattgatagcaagaacagattcgtttactgctgggagtgctgcagccactgatattttgtctatttaacttaaactatttgttgtaaaaaaaaaaaaaaaaaagcccctagggccctcga

SEQ ID NO: 29048 - DNA, 965 bp, Zea mays
  Clone ID: LIB4862-003-F3_FLI
ctcgaggccggccgggccggggttaatatctcccctcccttccctcttctggtctccgccccgctccttgcctccgatccccaattcctccttcggatctcgcattcagcgcagcgcaggtgtgaaggaagggggacgcggaggaagatggggctcgcgttcgggaagctcttcagccggctcttcgccaagaaggagatgcggatcctcatggtcggcctcgacgccgccggtaaaaccaccatcctctacaagctcaagctcggcgagatcgtcaccaccatccccaccatcggtttcaatgttgaaactgttgagtacaagaacattagcttcactgtctgggatgtcgggggtcaggacaagatcagacctcttttgaggcattacttccagaacacccagggtcttatctttgttgtggacagcaatgaccgtgaccgtgttgttgaagccagagatgagctccacaggatgctgaacgaggatgagctacgtgatgctgtgctgcttgtttttgccaacaagcaagatcttcccaatgccatgaatgctgctgagattactgacaagcttggattacactccctgcgccagcgacactggtacatccagagcacttgtgccacaactggcgagggtctgtatgaaggcctggactggctgtccagcaacattgcgagcaaggcttgaggcctaccttgaatgtcaaccgcgaactgactaggagctccggatgtatcatggaaactcaggacagaatcgcagttgcaacctgttagatgtcttctaccggcactatatatattttttgtttgatgtgtaatgatgttactgttcaacgtttattaccctactatactgttggatgttctttggacctgtttcatttcgcacaaggattggacttccaatatcatgctacattttacaaaaaataaaaaaaaaaagcccctagggccctc

SEQ ID NO: 29049 - DNA, 1423 bp, Zea mays
  Clone ID: LIB4862-003-F4_FLI
ctcgaggccggccgggccgggattccccgtttgccttgtttaccattcctccccaaaacacatcctgcgatcctcgaagcctccgccgagcatcgatcatgtaggcctactgcggcaagtacgcggatgagctcatcaagaatgctgcctacatcggcacccctggcaagggtatccttgctgctgatgagtcaactggcaccattggcaagcgcctttccagcatcaatgtcgagaacgtggaggagaaccggcgggctctccgtgagctcctgttctgctgccctggtgccctccagtacatcagcggtgtgatcctcttcgaggagaccctctaccagaagaccaaggatggcaagccttttgtcgatgtcctcaaggagggaggcgtcctccctggcatcaaggtcgacaagggcaccattgaggttgttggcaccgacaaggagaccaccacccagggccacgatgacctcggcaagcgctgcgctaagtactacgaggccggtgcccgctttgccaagtggcgtgctgttctcaagattggccccaacgagccgtcacagcttgccattgacctgaatgctcagggtctggctcgctacgccatcatctgccaggagaacggtctggtgccaattgttgagcctgagatccttgttgatggccctcatgacattgatcgctgcgcttacgtcactgagacagtccttgctgcctgctacaaggctctcaacgagcaccatgtcctcctggagggtaccctcctgaagcccaacatggtgactcctggctccgactctaagaaggtgacacctgaggtgatcgcccagtacaccgtccgtaccctccagaggaccgtccctgctgctgtgcctgctgttgtcttcctctccggtggacagagcgaggaggaggccaccctgaatctcaatgccatgaacaagctcagcaccaagaagccatgggccctgtccttctccttcggccgtgccctccaggcgagcaccctcaaggcctgggctggcaaggtggagaacgtggagaaggctagagcggccttcctcgccaggtgcaaggccaactccgaggctaccctcggcacctacaagggtgatgctgccgccgacaccgagagccttcacgtcaaggactacaagtactgagttgcttctctttgcgatcccgttgttttggaactcctgcctgcgagtaggttgctgagtgttgtttgcttgttagagcttttatattcggacatgaaaaaaacatgcttcctatgtggatgatggttatctttatattcgtatattaactactagtctctgttgttaatttccgtgtaatttgctcctcccagatgggagaatcgaacgccgcttttttgtgaaaaaaaaaaaaaaaaaaggcccctagggccctc

SEQ ID NO: 29050 - DNA, 1528 bp, Zea mays
  Clone ID: LIB4862-004-D2_FLI
gagtcgtctcgtcactgccgtttgatccctccacccgtttccagaagcttcgcggctccgtcatgcgtcccgccgtcgtcacggtgctcctcctagtagcagcggccgcctcgccggccgccgcactctactccgccggttcccccgtcctccagctcaatcccaacaacttcaaatcgaaggtgctgaactcgaacggcgtggtgctggttgaattcttcgcgccgtggtgtgggcactgcaagcagctggcgccggcttgggagaaggctgccggcgtgctcaagggcgttgccacggtcgcagcgcttgatgccgatgcgcaccaggcgctcgcgcaggaatatggaatcaagggatttcccactattaaggtgttttcccctggtaaacctccagttgattatcaaggagcaagagatgtaaagccgattgtagagttgctctgtcacaggtcaagtcccttcttagagataggttgagtggtaaggcatcagcagggtcaaatggcaagacatctggaggctcaagtgagaaaagtgaaccaagtgcatcagtagaattaaattcacgcaactttgacgagcttgttgtcaaaagcaaggacctttggattgtggaattctttgcgccatggtgtgggcactgcaagaaattggcacctgaatggaaaaaggctgcaaagaacttgaagggccaagtgaagctagggcatgttgattgcgatgctgaaaagtccttgatgagcaagtacaaggtggaaggttttccaactattttggtatttggtgctgataaggagagcccattcccctaccagggggctagagttgcatctgccattgaatcctttgcattggagcagttggaagccaattctggcccggctgaagtttctgagttgactggcccggatgtcatggaagagaagtgcgcttctgctgccatttgttttgtatcattccttccagacatccttgattcaaaggcagaaggaagaaacaagtaccttgagctcctgctctctgtagctgagaagtttaaaaagagtccatacagttttgtctggacagctgctggcaagcaagctaatctcgagaaccaggttggtgtgggcggctacggctatcccgccatggtagctctcaacgtgaagaaaggtgcatacgctccactccgtagtgccttccagcgcgacgaaatcatcgagttcgtgaaggaggcagggcgtggtggaaagggaaaccttcctctgaacgatgcacctacagtagtcgcgtccgagccgtgggacggcaaagatggagaggtcattgaggaggatgaattctccctcgacgagctcatgggcgacagctcctcagcaaacgatgagttgtgattctgatggttcttggactgatctgcgtgtcggttagccagactgtaaatctgaggaactctgttttgaaaaatcattccttgagtggcataattttccaggttatggatgctagaatggattaagattaaggagaactgatgtgac

SEQ ID NO: 29051 - DNA, 1147 bp, Zea mays
  Clone ID: LIB4862-005-E12_FLI
gaggccggccgggccggaattctccgatccgcccaggccaccatggcggaggatgctacgagcagccacccgtcacgctacgtcaagctcaccaaggaccaggacgcccccgccgaggacatccgccccggcgagctcaaccagccagttcacgtcccgcagctcgaaggccggaggtgtagcgagtgcggtcaggtcctgcccgagagctacgagccgcccgccgacgagccctggaccaccgggatcttcggatgcaccgatgacccagagacctgtatgtaatctagtctctcttttggattggaacttgggcatggtggtctgctgattctgttagcgacaacacatgctgattcaaaatattcattcagtccaaaatgcctgatcaaatgtttgctttgcttagcacttgtatgatctccctgtcaatatctgtatggaatcactaggccgaactggattgttttgcccctgcgtgctgtttgggcgcaacgttgaggctgttagggaggacatcccttggacaactccttgcgtgtgccatgctgtattcgttgaaggagggatcacgctggcgattctgacggcgatatttcacggtgttgatccgaggacgtcattcctgattggagaaggtctggtgttcagctggtggttatgtgctacctacactggcatcttccgccaggggcttcagaggaaatatcatctcaagaactctccgtgtgacccatgcatggtccactgctgcttgcactggtgtgccaactgccaggagcatcgcgagaggacgggacggcttgcagagaacaacgcagtgcccatgacggttgtgaacccgcctccggtgcaagagatgagcatgctggaggaggtggaggagaagggagcagagaagagtgaacacgatgatgtggaggtcattcctctatagataatagggtcggagtccgagtgaggatagcactagcagcatcagatgacgatcacaacttctggtcattcctctatagttagttagttattgatctttcaacaacaaaatgtggtggtgtggcaactgtccatttttattatcccaaataataatactgtactacgttacggcacaaaaaaaaaaaaaaaaaaggcccctagggccctc

SEQ ID NO: 29052 - DNA, 806 bp, Zea mays
  Clone ID: LIB4862-006-C3_FLI
gaccaccactggacgtcggcctagcaattagctcatcgactccagattggagaactcgacaccatgaaggtgctgatcgttgcccttgctctcctggcgctcgctgcgagcgccgcctccagtacaagcggcggctgtggctgccagacaccaccgtttcatctaccgcctccgttctatatgccgcctccgttctatctgccgccgcagcagcagccgcagccatggcaataccccactcaaccaccgcagctaagcccgtgccagcagttcggatcctgcggcgtcggcagcgtcggcagcccgttcctgggccagtgcgtcgagttcctgaggcaccagtgcagcccggcggcgacgccctacggctcgccacagtgccaggcgctgcagcagcagtgctgccaccagatcaggcaggtggagccgctgcaccggtaccaggcgacatacggtgtggtcctgcagtccttcctgcagcagcagccgcagggcgagctcgcggcgctgatggcggcccaggtagcgcagcagctgacggcgatgtgcggcctgcagctgcagcagccaggtccctgcccttgcaacgcagctgccggcggtgtctactactgaggaaactatgtactgtagtaataatgtaatggagccgctggctagctacctagctcgctagtttactcatttagcggcgatgagtaacgtagtgtcacccatcaccatgggtggcagtgtgagcaatgacctgaatgaaccattgaaatggaaaggaataatatataaggaaaaaagatgattggaaactg

SEQ ID NO: 29053 - DNA, 1796 bp, Zea mays
  Clone ID: LIB4862-007-E1_FLI
gaagctatatgggttcgaggcatctctatcgctgaacactgggaccaacgacctctgaaaccctaaccaaataaacccaccgttcgaaatcccgaaaggccaaaaccctcctccgacccttcccgccgccgccacccccaccccgaccggcaccaccacctcctcgctccacctccgtccgccgtcgccgcgatggaagacgacccgtcgcgccaggtgcgcgtgcgcttcgtcacgaagctgccacctccgctgcgggcgccgcccgctgccatcgccgtccccgcggacctcactcgcatgggcctctccgagatcgtcaacagcctcctcgcagccgccgagccggaccaccagtcgcagcccttcgacttcatcgtgcagggcgagctcgtgcggctgccactccaagagtttctcctcgccaagggcatctccgcggagagggtgcttgagctcgagtatgtgagagcagtggcgccaaggaagcaggaggaaccttgcccccatgaagactgggttagtgctgtggatggatcaaacccaggttttatattatctggatgctatgatggtcttgcaagattatggaaagatgcagcagtatgcacacaaattttggagggacacaatgatgcaattacttctaccagattcatcaataagggatctgaaaccgagggcagtctgcatgtagtgactggctcaaaggataggtcactgcggctatacaagtgtgatacatcagtcattatggactacccaaagcgggttggggcttacaaaattctccgtggccacacggcatcggttaaaagtatctccgcagacccttctggcgatatgctatgttctggatcctgggatggtaccatcaagttgtgggcagttgaaggatctgatgacgatgatgctgtttcattgaagaagagaaggatgaattctgactcatctggacctgaagagtctcagttagagggttcagccacttcaacacttctgggacatacacaaggtgtaactgctgttacctggcctgaacggaaaacgatatattcagcatcttgggatcattctgtgaggcagtgggatgttcaaacagtgaaagaaacatggaatatgttttgtgggaaggccttgaattgcttggactgtggaggtgagggttcttcattgattgctgctggtggctctgatcccgtgttgagggtatgggaccctcgcaaaccgggaacattagcgcctgtttttcaattctcctctcattcaagctggatcactgcttgtaaatggcatccgagttcttgtttccatttggtgtcttcttcttttgacgggaaagtgatgttgtgggatctaaggacagcatggccgctggcgtctgtggactcgcatgaagataaggttttatgtgcggactggtggaaaggggacagtgtgataagtggcggagctgattccaagctatgcatctcatctggcattcaaattgtgtgatgaagttcttccttgtgcttctcgagtccatgctatcgagattatatgggttgacaaaccatttccagaagccaaataatgtcagatatgtctgtgggaagatatgcaacccttcagtcaagatcaagatacggcacatggttttgccagatatgtatgcagaagtgcatttcttgcataagtaagatccaaagcaattgataactatatcttgctcatcaactttttgtgtgtgttcaggtgcgtttggcaccaatattactctattattccaagaccatgaattaatagttgtagtc

SEQ ID NO: 29054 - DNA, 930 bp, Zea mays
  Clone ID: LIB4862-007-H12_FLI
atcgaggccggccgggccgggacccatattattgataccaactagcaacatacatagtgaagtacactagcaacatcttagcaccaatgggagccaagatttttgccctccttgccctccttgctctttcagcaagcgctgctacctcgacttttattccacaatgctcacaacaatacctctctccggcgacagccgtgggatttcaatacccaactatacaatcctacatggtacaagaggccatccaagcaagcatcttacggtcattagcattaaccctccaacaaccatatgctctattgcaacagccatccttagtgcatctgtatctccaaagaatcgcggcacaacaactacaacaacagttgctaccaacaatcaatcaagtagttgcagcgaaccttgctgcttacctccagcaacaacagtttcttccattcaatcaactagatggggtgaaccctgctatctacttgcaggcacaacagctactaccatttaaccaacttgtcgggagcccttatgccttcttactgcaacaacagcttctaccattccatctgcaagctgtggcaaacattgctgctttcttgagacaacaacatttgttgccattttacccacaggttgtgggaaacattaatgccttcttgcaacagcaacaattgctaccattctacccacagaatgtggcaaacattgttgccttcttacaacaacaacaattgttgccatttagccaacatgctttgacgaatcctaccaccttattgcaaccgcccaccattggtggtgccatcttctagattttttatgatttatactgtaataataaagttctcatgctgatatgtgcgacctctcagtaataaagtattagagatctatatttcaaaaaaaaaaaaaaaaaaggcccctagggccctc

SEQ ID NO: 29055 - DNA, 921 bp, Zea mays
  Clone ID: LIB4862-009-C11_FLI
ctcgaggccggccgggccgggggcgaccacatcaaaacacgagggcgtctcccgcaggactggtcactcggcacgcaggcagaggcagcatagcagcagccagctccatccatcctctttcccctcctcgcttcgcttcctcggcggattcctcctccctcgaccgtccccgtccccgtccccttccggcgcgcaagctcgcccgagatggcaaacgctagatcgggtgtcgctgtgaatgacgagtgcatgctcaagttcggcgagctgcagtcgaagaggctgcaccgcttcctaactttcaagatggacgacaagttcaaggagatcgttgtggaccaggtcggggatcgcgctaccagctacgaggacttcacaaacagcctccccgagaatgactgccgatacgcgatctatgatttcgactttgtcactgcagaagatgtccagaagagcaggatcttctatatcctatggtccccatcctccgccaaggtgaagagcaagatgctttatgcaagctcaaaccaaaaattcaagagtgggctcaatggcattcaggtggaactgcaggctactgatgcaagtgaaatcagccttgatgagatcaaggatcgggctcgctaggcatcatgatcatgcatcatggactcggcctactactgtggatttgtatgccattatagacttggtgctgtgaaagactgcttgatgatttgcgggtttgttgctgtgtaaaaaaaggtcccatggctcccagaagaccatgaaggttcggatctatcatgtaattccttgttatctgccaattatgtatggactatggacatgtgttgcgctgttcaacttactactacaaataagtaatcgataatgttcccttcacaaaaaaaaaaaaaaaaaagcccctagggccctcga

SEQ ID NO: 29056 - DNA, 844 bp, Zea mays
  Clone ID: LIB4862-009-H12_FLI
ctcgaggccggccgggccgggaactactgcggcttcaggactcgacctcttgcgccgccgccatgaccttcaagcgccgcaacggcggccgcaacaagcatggccgcggtcacgtcaagtacatccggtgctcaaactgcgccaagtgctgccccaaggacaaggcgatcaagaggtttcaggtgaggaacatcgtggaacaggcggccatcagggacgtccaggaagcatgcgtctatgatggctacgtcctcccgaagctgtacgccaaggtgcaccactgcgtctcgtgcgcgatccacgctcacatcgtccgcgtccgatcccgtgagaagcgcagggaccgcaagccgccggagcgcttcaggcgcagggaggataggcctgctggtggacaaggaggcccccgccctggtcctggtgctgctgctacagctccagctccagcaccggttgctgctcgcccataggctttagcttttcgaccgtgttaagtcttctgcccactcagtttcggagttgtcccccgtgcgtgtgtgaagctgctatattagagttactttttgtctaaagtctgaacattttcgaagaatttgaatatctgaacatttgaatgtttgtgctgagtttttcaaagaatttgaatatctgaacaattgaatatctcacttgaacgttatatggcttattttaggcattttttctttttgtatggatttggtttcaaatcataaatacttgttgtaatcttattagcctctgagggcacaccttgcttcaacatatttgtctacggaattgatgacaagtaaaaaaaaaaaaaaaaaatgcccctagggccctc

SEQ ID NO: 29057 - DNA, 839 bp, Zea mays
  Clone ID: LIB4862-011-F8_FLI
taagggccgggttattatttaaatgtaggggtacccgcccaagctgctggattaaaccccccttgtcgtcgcttcggttcaagcgaggaagagagagagagcgagagttgtacaaggggcgccggcggccgcattgtagagtacgtcgagcttgttcactgccgtcgcggcctcaaagcaagccacatcatcgatggcggacgcagctcacgtcttcctgctggtagcggtggccgccgcgctcgccggccgctcagacggcgcgtggtgcgtgtgccgcccggagctggcggacagcgcgctgcagaaggcgctggactacgcgtgcggcgccggcgccgactgcaagcccatcctgcagagcggcgcctgcttcgccccggacaccgtcaaggcccactgctcctacgccgtcaacagcttctaccagcgcaacagccagaacccgcaggcctgcgtcttctccggcaccgccacgctcagcaacagcgacccgagcggcaatggctgcacgtaccctgcgaccccaaggtcgggaggtctggcgccttgttaatgggaaatgggtcgcgtgctcatgttcttggtgttggtacggtcattctgaagtttacttcgggaaagacggtgccattgaagagcgtgcagcatgtgccctctatcaagaagaatctcgttagcgcgtctatgctatgtcgagatggatacaaagttgttcttgagtctaataaatgtgttgtgtctaaacatggtatttttgttggtaaaggatatgactgcggaggcttgttccgcttatcactgcatgatgtgtgtaataaactcgtgaattctgttcc

SEQ ID NO: 29058 - DNA, 1554 bp, Zea mays
  Clone ID: LIB4862-012-E9_FLI
gaaaaaaaaaaaaagctaatggttcggttcggtcttaggcggcggcatcgtcacggaagcggcgttgaaggcgcacgcggcggcggtgcgggtggtgtcccgcaggggcgccgtgcggctggtgctcgtgtcggccatcgcctgggccatgctcgggctcgtcgcactcgccttccacctccggccctgcagctcccccgtcgcgttcctctcagccctttgtgaaaaggacagtaaagttttctcggtgttggactcgatggggctctcatcgaaaccactccaccgctgcccgatacctgttgcgaatgatccaaatgctattgccatcccaaagaggactcccaacacaatcgtgaagaagttgtcatatataacggttgacaagcaggacaaagatccttcaccgctgtttggagggcaccaaaactggaaacagagggaggagagctttaaactgaactctaccatgaaggttcactgtggatttatgaaaaatagtggtgcagatatggataccattgatctcaagtacatacagaaatgcagatttgtggttgcctctggtatttttgatggctacgacattccccatcagccatccaatattagtcatcggtctcagaagttgttctgcttcctgatggtggtagatgaagtatctcttgattttgttcaaaagaacgcaagtgtcaagattgacagtgctggggggaaatgggttggtatatggcgacttataagggtacatcgcctcccatttgacgaacctagaaggaatggaaagataccaaagattttaacacataggctgtttcctgaagcttggtatagcatttggattgatgggaaaatggagctcatagttgacccacttcttattctcgagagatatctctggcgtggaaaaaacacatttgcagtagctgcccataagcatcataggagcatctatgaagagggtgatgcaatcaaacggcggaagcgatatgctcgtcctttggttgatcttcagatgaaattatactattatgaggggatggagccttggagcccaaagaaaaagatgcctagtgatgtgccggagggagcagtgctgatccgggaacatacgacgatgaccgatctcttcagctgcctctggttcaacgaggtcaatcttttcacgccgcgtgatcagatcagctttggctacgtggtgcataggctcggaggcgctctcaagttcttcatgttccccaactgcgaatacaattcgctgttcatcctgcacggacacacgagagaacactcctctaaagtcgagtgggccaaaacaaccgatgagattgtgaagaagggactgaaggagagtagaggaggattagggctatggactccgtatcctgcagatctcagctccgtggaagtccctgctgtaaaaaggacttcaccggcaggctaggctgggattttttggtcttctattcgttcatggttgtaaaaagtagaacactactgatttcccccccttttcttttctcgcttaatcagacgagatcatgtaattcctgt

SEQ ID NO: 29059 - DNA, 1381 bp, Zea mays
  Clone ID: LIB4863-001-G11_FLI
ccggccgggccgggcaggagcaagaaacactcagaagctgcccagagctaccacccttcttatccccacccctcctcctcctaccttttctccttcagacctcaaaatctgtgtgtctcctgccgcggctagctgataggaacaagagcatgcacatccgagaagaggaggctacaccatccacagtaacaggcatcatgtcgaccctgacttcggcggggcagcagaagctgaaggagcccatatcccctggtggcggctccgcgtcggtcgctgggtccgctgcggagaggaacaacggcggcaggggcaagggcaagactgagatcaagcgcatcgagaacacgaccaacaggcaggtcaccttctgcaagcgccgcaacggcctcctcaagaaggcgtacgagctctccgtgctctgcgacgccgaggtcgcgctcatcgtcttctccagccgcggccgcctctacgagtacgccaacaacagcgtgaagggcaccattgagaggtacaagaaggcaaccagtgacaactccagcgcagctggtacgattgcagaggtcaccattcagcattacaagcaggaatctgctaggctgaggcagcagatcgttaacttgcagaactccaacagggccctgataggtgattctatcacaaccatgagccacaaggaacttaagcacttggagactaggttagacaaagctctcggaaagattagagcaaaaaagaacgatgtgctgtgttctgaagtcgagtacatgcagagaagggaaatggagttgcagaatgacaacttgtacttaaggagccgggttgatgagaatgaaagggcacaacagacagcgaacatgatgggggcaccatcgacaagtgagtatcagcagcacggttttactccttatgatccaataaggagcttcctgcagtccaacatcgtgcagcagcctcagttctattctcagcaggaggaccggaaagacttcaacgaccaaggtggaagataaatattggacctctcaagcttcagtacttatccgtgatgatgcatgactgccagtgagaaactgagctacattactgtggaattatatgtaaagactagtactactgcttcatatatgtgcatgtgcgcacacgcgcacgtagtatgcacaatttcatcccactattatggcttggcaccaactatgtctccttaattatcataggagaaaaataagtcacgcacaaaaaaattctaaagatgaggcgcagtgttggatgactgaaactgaaagataggattctcgtggatggcggtggtcatatatatgtcatgcacatctgatctctgttcagaaaaaaaaaaaaaaaaggcccctagggccctcgagct

SEQ ID NO: 29060 - DNA, 1182 bp, Zea mays
  Clone ID: LIB4863-002-A11_FLI
gatcccaacccactcacagtctcacgctactatcgctatctagagctccggccgtcacagacacgagctagagctagagctgcagggaagaagaagaaggaggaggaggagaagatgagggcgtccgcgctggtctgcttcgtggcggtgtcggcgtgcatagcgtgcatcgcgcatggcggcaacttctaccaggacacggagatgacctgggggcaggggcgcggcaaggtggtggacggcgggcgcgggctggacctgagcctggacagggcctccgggtccgggttccagtccaaggacgagtacctgttcggcaagatcgagatgcagatgaagctggtgcctggcaactcggcgggcaccgtgacgaccttgtacctgtcgtcgcagggcgacgcgcacgacgagatcgacctggagttcctgggcaacgtgtcgggcgagccctacacgctgcacacgaacgtgttcacgcgcgggcgggggcagcgggagcagcagttccgcctctggttcgaccccaccgccgacttccacacctactccgtggtgtggaacccgcggcacgtcatcttcgcggtggacggcacgccggtgagggacttcgccaaccgcgaggcccgcggggtggcgttcccgcggacgcagcccatgcgggtgtacgccagcctctggaacgccgacgactgggccacgcagggcggccgcgtcaaggcggactgggcgcgggcgccgttcgtcgcctcgttccgcgggttcagcgccgacgcctgcgtctggtccggcggcaggtcgcagtgccccgttggcaccatggaggaggcgggaggaggcggcggctggtggaaccagcagctcagcgacgccagctaccgccgcatgcgctgggtgcagaggaagttcatgatctacaactactgcaccgacgccaagcggttcccgcagggccggggcgtgcccgctgaatgcaggctccggcgataaaggtggctggatgagcgaacgcgaagccacctgcgtgcgtgcacgacgatcgatcccctcgtcgtcgttcacttcagaccagagatcggtggtctggcgaataatgtttgggtctttttttttgccatgggcgatggcaatgtaaatgtagcacgtgacgcacgtcgcagtgatattctttcatctgttttctgc

SEQ ID NO: 29061 - DNA, 801 bp, Zea mays
  Clone ID: LIB4863-002-E8_FLI
gcaaaaaaaaaaaaagcgaatcattccttctcgccgataagcagcagctcatcacctgaaggagagcagcccggaggagggggagcaagcagcagccgtcggtggaagatgtcgtacctgctgccgcatctgcactcggggtgggcggtggaccaggccatcctcgccgaggaggagcgcctcgtcatcatccgcttcggccatgactgggacgagacctgcatgcagatggatgaagtgctagcagcagtagctgagaccataaagaactttgcggtcatctaccttgttgacatcacagaggtccctgatttcaacaccatgtatgagctgtacgacccttcgacagtgatgttcttcttccggaacaagcacatcatgattgatctcgggactggaaacaacaacaagatcaactgggccctgaaggacaagcaagagttcatcgacattgtggagaccgtatacaggggcgcccggaaaggccgtggtctggtgattgctccaaaggactactccaccaagtaccgttactaagaaggcaggcattccccttatgcaatctattggggatgtttacacggacagttagtccgacaggtgatccctaactgtatcttggcataccctagtaattcaagttgctggctggagtgatgcttatccatgtcttggcatgccatagtgaacatgtaaacctgtgatttgaggtgattattcgagtgtaaagaaaccaggattgcgttcgcctatgactatgtgtctagttgtctacttaataagaaacagttattggtttgc

SEQ ID NO: 29062 - DNA, 852 bp, Zea mays
  Clone ID: LIB4863-003-B8_FLI
atcgaggccggccgggccgggacccatattattgataccaactagcaacatacatagtgaagtacactagcaacatcttagcaccaatgggagccaagatttttgccctccttgccctccttgctctttcagcaagcgctgctacctcgacttttattccacaatgctcacaacaatacctctctccggcgacagccgtgggatttcaatacccaactatacaatcctacatggtacaagaggccatccaagcaagcatcttacggtcattagcattaaccctccaacaaccatatgctctattgcaacagccatccttagtgcatctgtatctccaaagaatcgcggcacaacaactacaacaacagttgctaccaacaatcaatcaagtagttgcagcgaaccttgctgcttacctccagcaacaacagtttcttccattcaatcaactagatggggtgaaccctgctatctacttgcaggcacaacagctactaccatttaaccaacttgtcgggagcccttatgccttcttactgcaacaacagcttctaccattccatctgcaagctgtggcaaacattgctgctttcttgagacaacaacatttgttgccattttacccacaggttgtgggaaacattaatgccttcttgccatttagccaacatgctttgacgaatcctaccaccttattgcaaccgcccaccattggtggtgccatcttctagattttttatgatttatactgtaataataaagttctcatgctgatatgtgcgacctctcagtaataaagtattagagatctatatttcaaaaaaaaaaaaaaaaaagcccctaggccctcga

SEQ ID NO: 29063 - DNA, 704 bp, Zea mays
  Clone ID: LIB4863-003-C12_FLI
tgggtaccctcgaggccggccgggccggggaaagaccggccgccgccgcccaccgggtcatcgccattcgccacaaagccatttgaaccccccacgtctcctcgcctcgttccccatttgctgcgtctccttgcccgcgccgccgctcgccgtttgcccctcgtctccgcaccgcgcgctgttgcaaaaatgacggctggctacattgttggctcactggtcggatcctttgccattgcatacctgtgtgacacatttatctctgacaagaaggcatttggaggtagcacccccaagactgtttctgagaaggagtggtggcaagccacagacaccaagttccaggcctggcctcgcactgctgggccaccggttgtcatgaaccccatcagccgccagaacttcatcgtcaagtccactgagtaggtttgggctggagaagctggttctgcgacttggtgccgccatgaagccagagttccttttctaaggtcttaatcaattgtaataaaacgaaatacagtcaggatttttttgtgatttttacttgatctgtgagcgaacactgggtctttcaccttgtcatccaatgggttctgctccttggtgaaatctcccaccagccagtaaagaactgggttgttttcataatatatgcttttgctacgctaaaaaaaaaaaaaaaaaaggcccctagggccctc

SEQ ID NO: 29064 - DNA, 993 bp, Zea mays
  Clone ID: LIB4863-003-D11_FLI
tcgaggccggccgggccggggacgcacacttcactcacccatccaccgcaaacgccaaacggccggcacacaactacacaagccgctggcaaagatggcctcctccttggtcctcatcgcagcggccctgcttgcgctggcctcgtcgtggcagcaggccatcgcctacgatcctagccccctccaggacttctgtgtcgcagacaagaactcgcctgttcgcgtcaacgggttcccttgcaaggacccgatggcggtcaccccggacgacttcttcaacgcggcgatgatcatcgacaagcggagggacacgaacaacaaggtggggtccaacgtcaccaacgtgaacgtggagagcttcccggggctgaacacgctgggcatctcgctggcgcgcatcgactacgcgccgctcggggtgaacccgccgcacatccacccacgcgctaccgagctgctcaccgtgctcgagggcaccctctacctcggcttcgtcacgtccaaccccaaccgcctcttctccaaggtggtcaagaagggcgacgtcttcgtcttccccaaggccatgatccacttccagatgaacctggaccacgacaagcccgccgcggcgctctcgtcgctcagcagccagaaccctggcgtcatcaccatcgccagcgccgtcttcggctccaagccgcccatctcggacgacgtcttggccaaggcgttccaggtggagaagaaactcatcgactggctccagtctcagttctgggataccaactactagctgcctagctagctagtaatatacttgcttgcttatttgttgcatatacatgcaccaccaacacaagccttatattaattacgtacgtacatctatgtataatatcgaataaatggccggtatgcatttggaggagtgaaacttattactgtgcgtgattaataatatttaatgtaaacttttcattattatctaatataaaaaaagaatacgagttc

SEQ ID NO: 29065 - DNA, 1382 bp, Zea mays
  Clone ID: LIB4863-003-E5_FLI
gaccagctcgatcgcacgggagaagaggataagaggaagcgagtgggactgtgagtgagttggaaggagggggtggcaatggcgttgcggaatggtgttggcggtggtggagcctgtcccgcggcggttgtgctggtggctgcggccgtcgcggcgctgctgggcgccggggtggctgcggcggcgaccaagttcgacgacgtggtgcagcccagctgggccaacgaccacgtggtgtacgacggcgacctcctcaagctccgcctcgactccaactccggcggagggttcgtgtcaaggaccaagttcctgtacggcaaggccagcgccgacctgaagctcgtgccgggggactccgccggcgtcgtcacggctttctatctgtcgtcggccggggacaagcacaacgagttcgacttcgagttcctgggcaacgtgaccggcgagccgtacctggtgcagaccaacctgtacatcgacggcgtgggcaaccgggagcagcgcatcgacctgtggttcgaccccacggccgacttccacacgtacgccgtgctgtggaaccccagccaggtggtgttcatggtggacgacacgcccatccgggtgtacgagaacgccacgctgcaccaaggccacggccacggccaccaccggcacggcggcgcggcggcggaggccaacggcaccaacaccaccaccaccacgctggctgctgccccggcgccgttccccgggccgcagccgatggccgtgtacagctccatctggaacgcggacgactgggcgacgcagggcgggcgcgtgaagacggactggtcgcacgcgccgttcgaggccacgttccgggaggtgcgcgtggacgggtgcgcctgggcgggcaacgccacggacggcgacgccgcggaggcgcgccggtgcagcgagtcctcgtggggcaaggagggccgctactggtggaaggagaaggagatgtcggagctgagcgtgcaccagagccaccagctcgtgtgggcgcgcgcgcaccacctcgtctacgactactgcgtcgacaccgaccgcttccccgtgcagccgcccgagtgcgccggccgctgagctcctgaccgacctacgtcgatccgtgcatggcatggcaatggatctcgtcgggcggggtggaaatggaactgcttgtttctctcgctggaccgtgggggtttgtgttcgtgcgtctgcagcaatggtgtctgtctgtctgtagctctgtttccgcttattgaaggtcgcattgttggcgacccatgcgtgggtgaaccggcggtggtgtctcttgtagaaacaagtgaatgggagggattatgggaacgaagaacgatgctgcgctccgtttcagagatttgctg

SEQ ID NO: 29066 - DNA, 926 bp, Zea mays
  Clone ID: LIB4863-003-F2_FLI
ctcgaggccggccgggccgggaaaacgctcgagagagagagagacgaaaccctccctcgaaaccctagcatagccactgccttcccgcacgctaggaaggggaagatatgggcgccgaggaggacgccgctgcacgccgcgagcgtctccgcgccctccgtgccgccaaggacctcctctccacccccgacggcgccccaaccccttccaccgacggagaacaccaaaatggcaaccatgagatggcagaagagccagaattaccaggtcctcaggatgcacctggtgaggctgctaaagaggatggtagccccactgaggaggccgaagaggttgaagatgatggtgagcttccagccatgaagttcagaaactaccttccccatgatgaacaacttcgaggaggcaagctggctccagtgtctcttcccaagtttgaagacccaattagtgccgaaactgcagagccaaaggaagtggagaacctttttggaaacatagcaccaaagaatccaaattgggatctgaaacgtgatgtgcagaagagaattgataaactggaaaggcgcacgcagaaagcgttggctgagattgcattggaacagcagagggagaaggaagccttggaggaatctcaagattgaccgacctgtataagtgaccagtgactcatgctggttggtccctcgagcagacgtcattatcttatttagataatgtaatgtactttgggatgctttgtgtatctaccatcttgggatgtactgaattgagtttgggacgtgtattgtcagctcaaggatgtagcaaaccagtagtaacttcaaaaaaaaagagatgtagcaatcctgttctgttagacggacctggtcaaactaccgtactgaatacaaacaaagcacaccttcatgctgtgttggactcgg

SEQ ID NO: 29067 - DNA, 1370 bp, Zea mays
  Clone ID: LIB4863-004-H8_FLI
gaaacccgtctggccgtctcgccacgctcgtccggcagtctcctaccgggctccgtcccgtcccgccgcctgcatcacccaagggaagtacagccgagcccccactcgcgttccctgctgcgcgacctgatcgtacggccggggaggctgccgcgcctcctgacctcgcttccgcctcgcctccccgaccggaccagcggcctccgtctgaagatgcagggcggcgtctccggattccagaacgcgccggtgacgcgggcggtcgtcgtcgcgagcggcctcctgtccgtcgtcttcagcgcgcagcggcgcgcccgcgccctcggcatctcataccaggacactataacgaattttcgtttatggaagatattcccatctgtatttgcttttcagtcaacaccagagttaatgtttggactgtaccttctgtattacttccgtgtgtttgagaggcagataggctctaacaaatactcggtttttttgtctcttcactatcacagcatcatcgctcctcgagatcctgtcattggttatcttgaaagatacaaattacatcagcacgcttgcatcagggccttatggtctcatatttgcctcttttgttcccttctttcttgacattccaatcacatcacggttccgtatttttggtctgaatttcagtgacaaatcattcatttacttagctggttttcagcttcttttatcttcttggaagcgctcccttattcctggtatatttggtctggttgctggttctctctatcgtctaaatgtgctcggcatccgcaagatgaagcttccacaggttatttcatcattttttgcaagatatttcgccccttccccaggaagcacatctcgcccctccaggagtcttgttggaaacacaccgtcccatagaggccgtgctgttcagaatcagccatcaactggatttgcacctatcgtggagcctccagagtcctccgttgctatgctggtctcaatgggctttgatggcaataacgcaaggcaggcactcgtgagggctagaaatgacatcaacgtggcaacgaacatcctactggaagcacagtctcattgaactaacgcactgcaactttctggtggtaaattagagggaagaactggttatattccaagatgaacaaacaatatgagcacattggactacagatcggtagattagtgcctcatttcatctaccttgaactgcaggccgacagtttagtaaatcagcgtatacatttgcggcagttagttttatcgtgtcaatacttagatgccttacacacagagaatgtaatattccaatttcagcttgtaggatagatgatataagcattcatagtgtacaatac

SEQ ID NO: 29068 - DNA, 591 bp, Zea mays
  Clone ID: LIB4863-006-H10_FLI
cgaggggaggccggccgggcgggcctctagctggctgaacgggtctacaaatatacactactactccactaatgtcacatatccacaaccaggtgatctcaagtaattaacagaaaatatattccatcattgaaaatgagttccgttgttttgggtgctactggtagggagaataagacatcatggcctgaggtggtgggcatgtccatcaaggaggcaagagagatcattcttaaagacatgcccaacgctaacattcaagttctaccggttggctcgcttgtgacccaagactttcgccctgatcgtgttcgcatcttcgttgatattgttgcccagactccaacagttggctgacaaggatatgccttatctataggccaaataaacaaagcctacttttatgtatcatggctaataaatcctacatttcttggttatccttgattggtttagcttattagctatatcgccatcaaaaggggccccaagaaattacatgtatgtctatcataaaaatctcatcccgatggaatatataataaataaataatgataaaaaaaaaaaaaaaaaaggcccctaggggcctc

SEQ ID NO: 29069 - DNA, 1122 bp, Zea mays
  Clone ID: LIB4863-007-C11_FLI
ctcgaggccggccgggccgggactgttcgtttgcttttcagtcttcgtcctctcttttgcggcccagggccagttgtcgcccgcccgcgtcgtcgtctccgccggccggtcggcctcccaaaccctagcgagccgagcgagagagaaactagacgccatgttcgggtacaggaaggcggacccggacctcgaggccggcgggtcctcgctgctgtacccggggatgacggagagtcccgaactgcggtgggcgttcgtccgcaagatctacgtcatcctcacggtccagctcgccatgacggcagccgtctcggccttcgtcgtcaaggtgcccgccgtctccaattttttcgtctcctccaacgccgggatcgcgctctacatcttcctcatcgtcctgcccttcatcgtgctgtgccctctgcactactaccaccagaagcatccgatcaatctgctgctgctcggcctcttcaccgtcgccatcagcttcgccgtcggcatgacatgcgctttcactagcggaaaaatcattttggaggctgccattcttacagcggtggtggtgaacagcttaactgcttacactttctgggctgcgaagaggggccatgacttcaactttctcggccccttcctaattgctgctatcatggtgctcatggtgttttcactaatccagatctttttcccactgggcaagatctctgtgatgatatatggtggattggcatctcttatcttctgtggctatatcatctatgacacagacaatatcatcaagcgccacacatatgatcaatacacatgggcagctgtttcactctacctcgacgtcatcaacttgttcctgtctctgctgcagctgctgagggcagccgatagctgagctcattaatggagtgtttggtttgaggaatgatatagtccatcatcttctcactcacttttttgtttggtttgtggaatgaagtgagttaatccatcaccacctcattctcatagttagttgtttagtattaatatgtggaatagagtcatcccactaaatttgatgaatggacccatgatgcaccccttcatttagaaaaaaaaaaaaaaaaaaaggcccctagggccctc

SEQ ID NO: 29070 - DNA, 1054 bp, Zea mays
  Clone ID: LIB4863-008-H4_FLI
gtccccactgcctccagcaagtgttctaaaatctgaatggcatcttgctcctctgtccgcgccgcaccatcgctcctcgtctcggcgccgcctagccggcggcgcgcgagtacggccgtatgtcttcagggtgttcgccgcggcagggtcgcgtcctcccgcgtgcggtgtagcgccggggccgggcagggcggggtcaaggtccctgcgaagctggcggagctgtggtcggcggcgaagggcgcgcctcctctggccgtgctcgcgggtgtggcggcggcggtggcgatatacaaggtcgggtccagtctccttgcgccgcgccatcccccgccccgtcggctggaggcccagacagccccgccgcctccagtcccggagccggtgcaggtgggcgagataacggaggaggaactacggcagtacgacgggtccgaccccgagaaaccgctgctgatggccatcaaggggcagatctatgacgtctcagagagcaggatgttctatggacctggcgcagcttatgctctgtttgctggtaaagatgccagtagggcattggctaagatgtcctttgaatcacaggatctgaatggtgatatatctggtctaacgccaatggagctcggcgccttgaatgactgggagtacaagttcgccaccaagtatgcgaaggtaggaaccataagaagagcagcgcccgtcgaagtggtttatggcaacatttcgcctgaaatgagggaagaagttagtgaacctgtggttgaacctgagcttgagcctgagcccgagcctgagccgcatgacgacgatgcaccatgaataggaaaaacacaaagacatcagttcaggtaggaagatgaaatggagggcggcgcactgcttataatgttccagaggtagtcagaatttcgaaataatgaaaagcctcgtaggctcgtacttgttgcgcggatattcagaaagaatagtgtctaaatttaaaccaatagtagatgtgtactctgtagtaggattgaattgttggatatgtacatgtcattcttctattttg

SEQ ID NO: 29071 - DNA, 1595 bp, Zea mays
  Clone ID: LIB4863-009-F11_FLI
taatctcactggccagtggccactgcttaaatccctctcagtctctccttcctctcccattccactagattaccaccacctccacctcgtcgtctcccaccaccgccgagcgcgagccctagcccgatctagccggcggcaggcaccagatcccgccgcccgcggcgtcccgggacgcgccccgccgaatccgccgctcctcgcactgcaacacgcccggaccacggtgcatttgatccgtcccggccgcctacacgatgtccaagtcgggagcgctggatcttgcttctggcctcggagggaagatcaacaaggtggaagtcaagtcggccgtcgatgagtatgagaaatatcatggatactatggagggaaggaggaagcaaggaagtccaactatactgatatggttaataaatactatgatcttgccactagcttctatgagtatggttggggtgaatccttccactttgctcacagatggaatggagaatccttacgtgaaagcatcaagcgacatgagcattttcttgccctgcaacttggtttgaaaccaggaatgaaggttttagatgtgggctgtggaataggtggaccactgagagaaattgcaagatttagctcaacttcagttaccggattgaataacaacgaataccagataaccaggggaaaggagctcaaccgtttagcaggaattagtggaacatgtgattttgtcaaggcggacttcatgaagatgccgttcgatgacaacacttttgatgctgtttacgccattgaggcaacatgtcatgcacctgatccagttggttgctacaaggagatatatcgtgtgttgaagcctggccagtgctttgccgtgtacgagtggtgcattacggatcactatgatcctaacaatgcaacccacaaaaggatcaaggatgaaattgagcttggcaatggcctgccagatatcagaagcactcggcaatgtctccaggcagtaaaagacgccgggtttgaggttgtttgggataaggatcttgctgaagattctcccttgccttggtacttgcccttggatccaagccgattctccctgagtggcttccgtttgacctctgtgggacgcatgattacccgcacaatggtcaaggccctggagtacgttggtcttgctccgcagggcagtgagagggtctctaatttcctggagaaggctgcagaagggctggtagagggcggaaagaaggagatcttcacgccaatgtacttctttcttgttcggaagcctcttctggaatgagctcttggatcaccttttcagagagagaaggcaagtggtcatttcgaagaagccgaggagagggaacctggaatcaagaaaaccttcagctctcctgtgtaggaggaaagttaacgaacagtgtagtaactgttcagctttgtgtttattcagttgttttgctgcttgaggttattcgtttctaggtgggggttggaatccttttcgccataaacctctcagtggcataaataagatggtttgcataagagtacttcatggataccgtaagggctactactgaaagagaaatgtttaagcaat

SEQ ID NO: 29072 - DNA, 528 bp, Zea mays
  Clone ID: LIB4863-010-D4_FLI
gattcatccagatagagttccacgtacgtagcagtgatccattcccacgtacgttccagaagaatctgcagcagggacgagcagctagccatccatccatccacatgggccgttggttgaagccagatgtgtacccgctgatcgcggccatgtcgttcgtgacggggatgtgcgtgttccagctggcccggaacgtgctgatgaacccggacgtgcgggtgagcaagagcagccgccagagcgccgtgctggacaacgccgtcgagggccagcgctacagccagcacgccttccgccgcttcctcgccacgcagcgcccggaggtcttccccgccctcaacagcttcttctccgactccaataataataacacccccgccgacaagtgataaattcatctcatcgacggtatggtcttaattactcttacgccgccggccggcgacgacggcgcgcgcgtgtctgtaatcatgccacatatatatagtgtacatgtgccggtcgaataaaagttagtctcttaagtcc

SEQ ID NO: 29073 - DNA, 850 bp, Zea mays
  Clone ID: LIB4863-011-E8_FLI
ccctcgaggccggccgggccgggtcacacaacacagtttcgtcgcaaaaacaccatggagaccagctggctcctcctctccggcgccctcctgctttcactcctcgttctgcgcctccacgccaagaaccgccgcctgccgccaggtcctccggccgtcccgctcttcggcaacctgctgtggctgaggaactctgcagtgcaagtggagcccctcctgctgaagctcttcaagcggtacggccccgtcgtcacgctccggatgggctcccaactgaccatcttcgtggccgatcgccgcctcgcgcacgccgcgctcgtgggcgccggcgccgtcacgatggcgaacaggccgcaggccgccacgagctcgctcctgggcgtcagcgacaacatcatcacccgcaccgactacgggcccgtgtggcgcctcctgcgccgcaacctcgtcgccgagacgctgcacccgtcgcgcgtcaggctgttcgcccgcgcgcgcctgggtgcgcggcgtcctcatggacaagctgcgggcgagtggtgccgccggggacgacgagccgcgcgacgtcatggaggcgttccggtacaccatgttctgcctcctcgtgctcatgtgcttcggcgagcggctcgacgagcccgcggtgcgcgccatccaggacgccgagcgcaagtggctgctctacatctcccagcagatgagcgtcttcttcttctttccgtccgtcaccaggcacgtcttccgcggccgcctgcagaccgcgcgcgccctgcaccggggcagacggagctcttcgtgcgctgatcacgctcggcgcgagtacaagcggctcgccaagacggccagt

SEQ ID NO: 29074 - DNA, 982 bp, Zea mays
  Clone ID: LIB4863-011-F12_FLI
gaaaaaaaaggccgtgcagagtgcaggtgaagatgatgaagaactaccctggtcctgctagcagcagtagtgttgctgtagaggtgaagaaggggtcatggagccccgaggaggacgccctgctgaccaggctggtggagcagcacgggccccaccgctggagcctcatcagcgccccaatccctggccgctccggcaagtcctgccgactccgctggtgcaaccagctcagccccgacgtgcaccaccgccctttcacgccgcacgaggacgcgctcatcctcgccgctcacgcccgctacggcaacaagtgggccaccatcgcgcgcctccttcccggccgcaccgacaactccatcaagaaccactggaactccaacctccggaggtgcaggcgccgagcggcggcggcggcggtggcctcccgaccgcaggtgcaggacagcgacgacgctcctgctgctgctgctgctcatgatgatcagccggcggctgtggttgctgctggtggtttaggtggtggcaacagcagcagcggtctgccgcctgcagcagcaggggccgcaactgccgaggccgagccgtctctgtccctcagccttggcctcccgctgccagcagcagaaccagctgaagccgcggctgacgacgagagccgcaacagccagggccaggcatcgccgttactggaggaaggagaaggaaacgcgcagctgttggcagtggtgcgccggatggtcagggaggaggtgcaacgccagacgggacagctcgcctactcgctcatggccgcagcagcagccagagccaagggacaccaccgttaatctgtgtgtgatccattgtgcatgctgctgctgctgctgcttcttggatttcccctcctttctccgatatgatcctctctgccaagtgtattttgttttccttcgtttcttgtactaccttcccttgtgttcgtttatgcgattgcgattggact

SEQ ID NO: 29075 - DNA, 1061 bp, Zea mays
  Clone ID: LIB4865-002-C3_FLI
ctcgaggccggccgggccgggctcccaccgaattcattccacccccgtctcctccgatcggacggaccaccgggccagcagcggggcggatcgcgtcagcagccatggtgaaggcctaccccacggtgaacgaggactacctcaaggcggtcgacaaggccaagcgtaagctccgcggcctcatcgccgagaagaattgcgccccgctcatgctccgcctcgcatggcactccgcgggcaccttcgatgtggccaccaaaaccgggggccccttcggcaccatgaagaaccccgccgagcaggcgcacggagccaacgccggactggaaattgccatcaggctgctagagcccatcaaggagcagttccccatcctatcctacgctgacttctaccagcttgctggagtcgtggcagtcgaggtaaccggcggacctgatgtccccttccaccctgggaggcaggacaagcctgagcctccaccggaaggccgccttcctgatgccacccaaggttctgatcacctcaggcaggttttctccacacagatgggtttgagcgaccaggacattgttgcgctttctggtggtcacaccctgggaagatgccacaaggacaggtctggatttgagggagcctggacgtccaaccctttgatctttgacaactcttacttcaaggagcttctgagcggagagaaggaaggccttctgcagctaccaagtgacaaagccctcctctctgatccatccttccgcccacttgttgacaaatacgcggacgaggatgctttctttgctgactacgccgaggcccacctgaagctttcagaattgggatttgctgaggcgtaaagtgagagagaacgaaccagaagagtgtggtggttgtcgtcggccggcaggccttgtgtttttgttgtctgcttttctcttgaatgaagatgtgatgaactctgctgaagatgtagtgtgtatgttgtcatggttcatttttctattttatttatctataatatctgtcggagaagctttgatatgaagcgggatctggttcggaac

SEQ ID NO: 29076 - DNA, 888 bp, Zea mays
  Clone ID: LIB4865-003-D6_FLI
ctcgaggccggccgggccggggttccacttgtagccacccgtcgctacgtgcgtggctgccgcggcgcggctctagtcgccagtccccaccacgctccaaaccctcgcctccgattcgcgtctgcggcagaggggatggctgcggaagcgagcacggcgggtgcagcgtcggcagccgaggcgaagcccttcgccgtcctcttcgtgtgcctcgggaatatttgccggagtcctgcggctgaagctgtgtttcggaccctcgtaagcaagcgtgggcttgactccaagtttctcatagactctgctggtaccatcgggtatcatgagggtaataaggcagactcaaggatgagagcagcttcaaagaagcgggggattgaggtcacatcaatatccaggcctatcaaaccctcggattttcgtgattttgatcttatccttgcaatggacaggcagaactatgaagatatattgaactcgtttgagagatggagacgcaaagagcccctccctgatagtgcacccaataaggttaagctgatgtgctcctactgcaaacaacatactgagtctgaagttccagatccttattatggaggtcctcagggatttgaaaaggtgttggacttattggaagatgcttgcgagtcgctgcttgatagtatcgtcgcaaacaatgcaagcatttctgggtgacatcgatgtaaatctccacatagacatctattttcagacgcaccggctgtagcatccatgcacaaccggagtaatttggttgctaatgcaacattgatcatgtcgttattacccaggtcttggtctggtttgtatataccaccatccttatacctggttatgtgataagtgacaaaaaaactgctcatcacc

SEQ ID NO: 29077 - DNA, 679 bp, Zea mays
  Clone ID: LIB4865-003-E2_FLI
gaggccggccgggccgggatcgcacatattattgagaccaactagcaacatagaaagcacaatattgtaccaataatggcagccaaaatattttgcctcattatgctccttggtctttctgcaagtgctgctacggcgagcattttcccgcaatgctcacaagctcctatagcttcccttcttcccccatacctctcaccagcgatgtcttcagtatgtgaaaatccaattcttctaccctacaggatccaacaggcaatcgcagcaggcatcttacctttatcacccttgttcctccaacaatcatcagccctattacagcagttacctttggtgcatttattggcacaaaacatcagggcacaacaactacaacaactcgtgctagcaaaccttgctgcctactctcagcaacagcagttacctttggtgcatttgttggcacaaaacatcagggcacaacaacaacaacaactactaccattcagccaacatttgttgccgttctacctgcacactgcgcctaacgttggcaccctcttacaactgcaacaattgctgccattcgaccaacttgctttgacaaacccagcagtgttctaccaacaacccatcattggtggtgccctcttttagattgcttatgagttatagttcaataataaagttttttttgctg

SEQ ID NO: 29078 - DNA, 983 bp, Zea mays
  Clone ID: LIB4865-003-F10_FLI
ctcgaggccggccgggccgggactcactacccatgcccagttctccctgtccaccggccgccgccgccgctgccgtgcgcttaatcctacccctgtctgtctcctcatccagtgcaaggagcgcccaccgctgcctgtgtcgtttggtcaccggagatggatggggatgaggagaacgtcgggccgttccgccggactagcgcgcgcacgcgccgcatggccacgcgcatggcgtccgcgctcgccagctcggacaatcgcgcccaggttgctgacttgctgatcagttactgtgtctgaaactattctcctttatgttttgctgcctcattatggaaacacctctgtatctgtaatgccattcaggctgcattagctcgccttgaagctcttgagagcgataatggtggggtcgaggtggtagatcttaatgatgatgagtacggatccacggatgaagaagaccctgttctcatgcaaaaaaaacagtccaagatcatgaaacgtaaaacaaggcaagggaaagctttggagaagagggcagcaagatcactcatggacgtgctacaagaagcaaatttggagtccgttcctcctcatgtgccaacatattcaagggctgctgtgggtccaccgagcacttcatctcgacgccactactgctcagtttgcggtagctctgcaacctacacatgcgtgaggtgtgggacgcggttctgttcatgccgctgtcaagtcatacacaatgatacacgctgcctgaagtttgtggcttgatcggctggatatgtataagctacatttgatgtatgtccacatcctaatggctgttcatatgtgctctgatcagtatgatatacttgctgactatgtatcctactctgtaggtgggggtttggtaagttgtagaaaaccattttctcagtagtgtactgcagttgcaccgaccaaaaaaaaaaaaaaaaaaggcccctagggccctc

SEQ ID NO: 29079 - DNA, 1046 bp, Zea mays
  Clone ID: LIB4865-003-F9_FLI
gactaatcctaaaccaaccccttcgcgaaaagaagaaaagaacggtggtcgcctacccgatcggatcccaaaattctccccaaccccatggcggcgagtttgtggcgggcggtgatgggcaccggcgcggcgtccacgaacaccaccgactcctcgggcggcggcgttgagttctggcgcgccccggaacgcgtgggttggctgaccaagcaaggcgagtatatcaagacatggcggcggcggtggttcgtgctcaagcaggggcggctcttctggttcaaggaatcgaccgtcacgcgcgcttccgtgccccgcggtgtcatccctgtcgcctcctgcctcaccgtcaagggcgccgaggacgtcctcaaccgaccctacgccttcgagctctccacgccgcgcgagaccatgtacttcattgctgacaccgagaaggagaaggaggagtggatcaactccatcgggcgctccatcgtccagcactcccgctccgtcaccgacgccgaggtcgtcgactacgacagccgccctggcgacaaatgattgatttgtgagccggtcacacctgttactctgcagcgtctctatgctactttatctctgcagcgtctctatgataattagtgcctgtttggtttgtgctaattatgtcacgctttgcctaatgttagtcgtttcaattgaataactaaccttaaacagaaaagttagtcaaagtgtggtaagttaggacatgtttggtttgatgactaaattatcacattttgtctaacttttatgtttaagattagtttttcaattcgaacgactaagcttagacaaagtgtggcgcagttagccacgaaccaaacaggtctttagtcaccgaaccaaacaagcccttagttaaacaggtttttagtcaccgaaccaaacaagcccttagtttcacacttgttattgttgttttgtggatgtatgatctgtgtatttgtataatattttggtcattggggaataagttcggcatcttatgtatagcgtgctatctgatacagtactgc

SEQ ID NO: 29080 - DNA, 741 bp, Zea mays
  Clone ID: LIB4865-004-D7_FLI
gaggcggcgggccgggatctatctttgtggtcgtggtcctcccgtcgtcgtcgactcgtcgtcgtcggtgttgctccgatgggcaaggactcgaagccgaaggacgccaaggggaagggcaagcaggcggccggctcctctggcggcgacgacggcggcggcaagggaggcaagggcaagggcaagggcaagggcggaagtccgctgacggactcggcacttgcacctacgtcaaagctaggcacgtattgtgtgagaagcaggggaagatcaatgaagcttataagaagttgcaggatggatggctgaataatgggggcaaagttcctcctgctgagtttgctaaggtagcacaagagtattctgaatgcccatcagggaagaaaggtggagatcttggttggttcccgcgtggcaagatggctggtcctttccaggaggttgctttcaacacacctgagggaactgttagcgcaccattcaagtccacgcacgggtatcactttatcctctgcgaaggaaggaagaactgatctggaaatgtcggttggggagactgcatcatcaggttgtatgagacgcaatgcaaactactcaccttctctaataagcgctggacatgtgtactttgtgttgggctattcgcattctgttccaaacaagttgccaaaacaaaagaatgtgtgattcgctgtaattaacatattgtactgataatctgatatggcatacctatctggg

SEQ ID NO: 29081 - DNA, 1078 bp, Zea mays
  Clone ID: LIB4865-004-G9_FLI
ctcgaggccggccgggccggcttctttccctaatccccatctccccttctctcgctgctggtggcctgcgaatggcgggcggaagcggcgaggcggctatgtctccgccgtcctctagtgccagcgggaagcgcgggcgggacccggaggaggacgtgtacgtggacaatctccattcccacaaacggtatctcagcgagataatggcatccagtctgaatggactgtctgttggggattcactgcctgacaacatcatggagtcccctgcaaggtcagagactgcttcctgctacagggatgagatattatcccaatactcaccgatgtcagaagactcggatgattaccggtgctatgacactcaattaaaccccagtgggaatcatcctgatgcgatgatcagcccttcaactagcccaatgtcatctcctcatcgacaccagagaccacaatcttctttgttaccttcaaacccataccctctcccaagctgctccctttcgtcagtagtctgctctcatgctcggcgtggctccgataatgaaggccggttcccgtcctcgccaaatgacatgtgccatgtagcagatttgaggcgaacagcactactgaggtcagtgcaaatgagggtgcagggaccccattcgtatgacctatcattcggcatcagacaaggacaagatcatgcacatgagcatgaaggggaacatgaccatgagcatgaacatctagaggacttggaagggacagaaggatcatcttgcaataagtcaatcgttaacgaagtcacgtacaaccagagacgtgaccatgattttggtcggtcagagcacgagatagattacatcaacaacagcacatcagatgattgtgtaagtgatctaaaatttaagcaagaagataagagccatagtaaatttgatatccctatgcacaaaaattcatagcacatggaacatatgtgttagttttttggattataactctacttaacttcattgtattcttgacggatgccttatctattgtccgtggttttagaaaaaaaaaaaaaaaaaaggcccctagggccctc

SEQ ID NO: 29082 - DNA, 1199 bp, Zea mays
  Clone ID: LIB4865-005-G4_FLI
tcgaggccggccgggccgggaccgacaccaggaggcggaaggaaagaggaacccgcacagtgcacggacctgtaggctcccgaaaatctccccgagtccgacgcgtctccggcggccgcccccctctccctctcggatctctccctctccgctcgccgcgcctccatcggtccactcagccatgtatagtaattacgggaatccttcggggatgcagatgcccccgcagaactctcaacctgtccagtttgataatccattatacggtgcaagctcgggtctaatcagatctgggataggagtatatggggagaagtttttgggttctagttcagaattcatgcaaagcaacatcaatagatacttctccaacccgcagtattacttccatgtgaatgatcaatatgtccgtaacaagttgaaagttatactgttcccgttctttcacagggggcactggactcgaataagtgagccggtgggtggccgcttgtcctacaaacctccaatctatgacataaacgcaccagatctgtacatccctttcatggcatttggaagcttcatcatcctttcagggtttacattgggtttcatgggaaagtttactccagcagctataaatctgcagtttacaagggcgctcatcggctggggcttccagctcatggtcctgaaaggtctgctctactcgatgggtggtggcgaggtgccactgctcgacttggtagcgtacggtggttatttattcgccgggctatcgctcgccgtcgtcgcgaggctcatgtgggcgtactcgtactatgtgatgatgccgtggatgagcctgtgcatgggggtgttcctggtgaggacgatgaagagggtgctcttcacggagatgagaagcagcgagaggcactcgtcgcggcagcactacttccttctcttcatggcaatcgcacagttccccctgttcttctggctcggcagcataggtgcatgatgcagttttgtgtacttttcgcagcattaacgttgcaaaaatgatattgaagtgtttagatgtgttgtaaagaaaaaaacaattggacaatggtctcaacagcttagaggttggcagctctgcttgtgaagttgtatgtgatccacaatcatgttatgctattgactttttttggttggcaaaaaaaaaaaaaaaaaaggcccctagggccctc

SEQ ID NO: 29083 - DNA, 532 bp, Zea mays
  Clone ID: LIB4865-006-E5_FLI
taccctcgaggccggccgggccgggagcgctacttgtgctcccccaacgctactaccgccgctagctggttcaagtgcggcgagcggagccggagaccggtagaggaaattaagaggcgtcgatcgggcatggggtgcgacgacaagtgcgggtgcgccgtgccgtgccccggcggcaaagactgcaggtgcacgtcggggagcggcgggcagcgggagcacacgacttgcggctgcggggagcactgcgagtgcagcccgtgcacgtgtggccgggccacgatgccgtccggccgcgagaacaggagggctaactgctcctgcggggcgtcctgcaactgcgcatcctgcgcctcggcctgatccgtgcgcctcgccctcgtgctaccgcgctgcctagtggagggagttgtctactgtccagtgaggatctggacgaagcaactagcgctacttctagtagagtacgcgcatgaggataataaaggggcttgtgtcaaaaaaaaaaaaaaaaaaggcccctagggccctc

SEQ ID NO: 29084 - DNA, 1271 bp, Zea mays
  Clone ID: LIB4865-007-B3_FLI
gacaagccaaacgtgcagctgaggaatcgcaacggcagtgacgtgtgcgcgttgccaaataaagctactatactagtcaccgctcgattgccgtcgcagccgcccgccggccggagatgggtgcgccggcgctgtcgtccgtcgtcgtggtggccacggcggcagtggtttgcctgtgcggggcctttgcgcaggcgcaggacatggacagcgagtgggcgcggccggcctaccgcgggttcttcggcgccccggccgggtcgctgctgccgcagtcggacgtggacctgctggagttcccgctgaacctggagtacctggagacggagttcttctgctggtccgctctggggtacggcctcgacgccatcgacgccaacctcaccggcggcgggccgccctccatcggcggccagtccgcgtccctcaccccgttcatccgcgacgtggccacccagttctgttaccaagaagtcgggcacctcagggcgatcaagcagacggtgaggggcttcccgaggccgttgctggacatcagcgcggccaacttcggcaagatcatcgagcaagcgctgaacgcgacgctggacccgcccttcgacccctacgagaacagcctcaacttcctcgtcgcctcctacatcatcccctacgtcggcctcaccggctacgtcggcgccaaccccaggctcctcacccctcaggccagaaagctgctggcggggctgctggcggtggagtcggcgcaggacgcggtgatccgtacgctgctgtacgagcgcgggatggcgcgtgtgccgagctatgccggcggggtggcggagatcacggcacgcatctcggacctccggaactcgctggggaggaggggcgtgaaggacgagggcctggtggtggcgcccgagctggggcccgaggggctgaccgtggggaacatcatcgccggcgaccacctgtcgctcgcctacgaccgcacgccggaggagatcctcggcatcgtgtacggcaccggtaactccgcccagcacggcggcttctttccccagggcgcagacggccgcatcgccaggggtctcctcgcgtagcgcatgggtgagttgtgaccgtgcgctgagcagtatgaatccgtgcacggcgcagactgtagactagctagcagtactatacttgtttgtgagttggtatggtgtggccttgagtgccttgtgtaaactgggtgatatacatgaatgtaggtggaaacaaataaagtaaataatgggttgctgcgc

SEQ ID NO: 29085 - DNA, 1641 bp, Zea mays
  Clone ID: LIB4865-007-B5_FLI
ctcgaggccggccgggccgggatctacacactcacctcttctatatcatccgccattccttaagaagtccgtagtacgactcgtagtttaggtcgtcatggagtcattgaaaagccttgtgttctcgtcgtcatccgacgattccgacgatgagatcgataccttgttgcttgcccaacatgttgagcaccttgtagtaggagacacgagcacgcggcgtaggcgctcctcattgcctcgccgagttatccatagggaccacgctgctggagaaaatctcatcaaacatcactacttcggacctaatcctgtgtatccatcacatgtatttcgtcgaaggtttcggatgcatcgtcctttgttcctgcgtatccttcgtgccgttcagcgagaagacgaatacttcactattcgttctgatgcaaccggtttagcagggcttggtccattgcaaaaggtttgtgctgcattgcgtatccttgcgtatgggttaccaaccgatgcggtagatgagtacatacagattggacagactaccgctagagactgccttatccgtttttgtcgcgcaatcatctcttgctttagcgaacgataccttcgtatccctaaccacgacgacattgctcgcatactacgtgtaaacgccgacagggggtttccgggtatgcttggctctattgattgtatgcattgggaatggcgcaactgtcctactgcatggcgcggacagttttgtgggcgcaattcgaggccaacaatgatactagaggcagtcgcagggtacgatttgtggatttggcatgccttctttggaatgcctggtacgaacaatgatctcaacgtgcttcatcggtcacctgtgtttgatccgttacgtaacgggacgatgccaccagtgcacttcactattaatgggaccacttacaatttcggatactacttagcagatggcatatatccaaattggcctacctttgtaaaagctattcgccacgcatttgaggaaaaaaaggttcactttacaaccaagcaagagagttgtcgaaaagacattgagcgagcatttggagttttgcaggcaaggtgggctgttctacgtggacccgcttatggttgggatcgtaatcaccttgcagacatgatgactgcttgcattattatgcacaacatgattgtcgaggacgaaggagatggtgcagctaatgtggacttcattggcccctctgggccaccagagccgtgtaacaatactcctgaggtccgcaacgagtggctgaacaatcatatccgctcagagttaccaaacgatccggaccaggatctcacatgtcaggcaacttacttgtctttacagcacaacctcatagaacacctctgggctcgtcgaggctccatgggttgatgcctagtttccaaaggatgtgctataccaatgttgttcactttcaattatgaagtcaacgttgtgtaccaggactagatgtcgtatgtgctatgtatgtccttggtagagaagtgatagttccttctaagtgtaatgcctctggtacaaataagttgcataagtttccaaacttgaagtcatgtatcagaatccttattacaaaaaaaaaaaaaaaaaaggcccctagggccctc

SEQ ID NO: 29086 - DNA, 1078 bp, Zea mays
  Clone ID: LIB4865-007-C10_FLI
gccaacaagtctcttggccaggtctccctctccccggctctccgccttcctcttccagtccccgcgcgcgagatcgccgccccgtgtgggccctagatcccgatggcctcgcgccgccgcaccctgctcaaggtcatcatcctcggcgatagtggggttgggaagacttccttgatgaaccagtatcctgcgattcggatcgattcttgacaagctgacttgatttcgtttcgtcgatttttttatttcttctggttggttggcttgttttctttgagctgtgatgtaattcagatatgtgaacaagaagttcagcaatcagtacaaggctacgatcggcgcggatttcctcaccaaggaggtgcagttcgaggacaggctcttcactctgcaaatatgggacactgctggccaggaaaggtttcagagtctcggcgttgcattctaccgggggcagattgttgtgtcctagtctatgatgttaattctatgaaatcatttgacaacctgaataactggcgagaagagtttctaattcaggctagcccatcagatcctgataatttcccttttgttctgttgggtaacaaagttgatgtagatggtggcaacagccgcgtggtatctgagaaaaaggcaaaggcatggtgtgcttccaaagggaacatcccgtactttgagacgtctgctaaggacggaacgaacgtggaagacgccttccagtgtatcgtgaagaatgctctgaagaatgagccagaggaagaactgtatgtgccagataccgtggacgtggtgggtggcaaccgggcccagagatcatccgggtgctgttaaggcacgaggcatcacgaggcgttgtgaccatcatcgtcggttatgcagtgaccaaacaataccttagcattgctgggtctccgtggttatctacgtatccgtattccatttgttacctttccagtctcactgctatgtacccaagggcgcctgtcaattcggtggactttgtgcagtttcatcagtagcgtcataccttgtgaatacaattggccaaaataagaggaagtgtaaactaaagttc

SEQ ID NO: 29087 - DNA, 899 bp, Zea mays
  Clone ID: LIB4865-007-E4_FLI
ctcgaggccggccgggccgagatcacccatattattgataccaactagcaacatacatagtgaagtacagtagcaacatcttagcaccaatggcagccaagatttttgccctccttgccctccttgctctttcagcaagtgttgctaccgcgactattattccacaatgctcacaacaatacctctctccggtgacagccgcgagatttgaatacccaactatacaatcctacaggctacaagaggccatcacagcaagcatcttacggtcgttagcattgactgtccaacaaccatatgccctattgcaacaaccatccttagtgaatctatatctccaaagaatcgcagcacaacaactacaacagcagttgcttccaacaatcaatcaagtagttgcagcgaaccttgctgcttacctccagcaacaacaatttcttccattcaatcaactagctggggtgaaccttgctgcttacttgcaggcacaacagctactaccattcaaccaacttgtcaggagccctgctgccttcttactgcagcaacagttgctgccattccatctacaagttgtggcaaacattgctgctttcttgcaacaacaacaattgctgccattttacccacaggttgtgggaaacattaacgccttcttgcaacagcaacagttgctgccattctacccacaggatgtggcaaacaatgtcgccttcttacaacaacaacaattgctgccatttagccaacttgctttgacgaatcctaccaccttattacagcagcccaccattggtggtgccatcttctagatttttttatgctttatactgtaataataaagttctcataaaaaaaaaaaagtaaaaaaaaaaaaaaaaaaggcccctagggccctc

SEQ ID NO: 29088 - DNA, 842 bp, Zea mays
  Clone ID: LIB4865-007-E9_FLI
ctcgaggccggccgggccgggctattgatttgttcccgtcatattaacgccagggagggccttttctctctcctgtgaacgtcaaacagtgtctcttttccagttccagacctgaagaaactccgaccggccggtgggcggtggcggcagccggcaggatctgtgccgcgatggcgacgtcgaacacggcgcggatggaggacggcggcggcgacctgcggagcaccatcaagaagtggaatatcatctaccctgtctacctcaactccaagaagacggtcgccgagggccgccgcatcgccgctgccaaggcctgcccggaccccacctgcatcgagatcgctgactgctgttcgcacctcaagatcccccacgccatcgagttggataaggcgtaccctcgggatttcttccaggtggggagggtcagggtgcagcttaagaaagatgacggctcccccgtcaatcctgctattaaaacgaagaagcagctgatgatccaagtagcagagctagttcccaagcatcacggaaggacaaagaagcaggagccagcgcccaatcccggtggcagttcaaagaacacaaaaggcgggaaaaagaaaaagtgatgcagtatcattgtgttgttttttattctgttcgtcatcatacactaagcttctgtgaaaaagaaaaagtcttggacgttgttgttatgttgccattatgccatttttcatgtataagaacttactaagaatcttccattgactcggtaaaatgcaacataaaaaaatggcttcgctagattaaagggccctttgacaaaaaaaaaaaaaaaaaaggcccctagggccctc

SEQ ID NO: 29089 - DNA, 1014 bp, Zea mays
  Clone ID: LIB4865-009-C4_FLI
acttatgtgggtaccctcgaggccggccgggccggggagaaagcggtgagaattggagtgcactcgacgcgtcgagcggtcgattcccatcccgttcccgccccgcgcctcgccttgagatctgtggcgtcgtcggcaccagtccgtccgtccgtccgtcgtcggcgccggagaacgagtagagatggaggaggcggcggcggctgagaaggcgtcgtcgtacaggtactgggtgcgggaggccaccggcgacgcggcgccgctccccgtcccgcgcaagctcgacaccgctgccaacgggaacgggaacccgccgcccgtcggctccgtctggaatcaggctggaacatgggaggaaaagaacctcaactcatgggccaatagtagaataaaggatttgatgggctctttaggttcattggccttccctacagggaaggcatctattgacgaagtgtccaagtgctcaggcgacgcatttcaggtcattgtccgcaacaagaagagagtaggatataactacgaactaagcttgaggtttagtggtgaatggttaatcaaagaagaaaacaagaagatcaaagggcatctagacattcccgagttttcattcggcgagatcgatgacttggaggtacaagtaaggttcggcgatgacaagggcctcgcgtctgatgatagaacacggatctgcaaggatctcaagtcctttttggcgccgatccaggagaaaatgcgcatgtttgaagaagaactcaaaggtagatagcgagtattagcaagagttcgcagtgctaggcaagtgacttggcagttggcaccgccgtgctagctgtgatgtgtgtgtcgcaacgctctcaaagctgagactgtatgtgtactggtgtaatacacttgtcaagatgagcacgtacgaactgttctcttggtatccctcattttcagcatgtgatagtaaaaggaattcaagatgtttttggaaaaaaaaaaaaaaaaaaggcccctagggccctc

SEQ ID NO: 29090 - DNA, 506 bp, Zea mays
  Clone ID: LIB4865-009-E2_FLI
taccctcgaggccggccgggccgggaaaattgcagtctcctctagctggctgaacgggtctacaaatatacactactactccactaatgtcacatatccacaaccaggtgatctcaagtaattaacagaaaatatattccatcattgaaaatgagttccgttgttttgggtgctactggtagggagaataagacatcatggcctgaggtggtgggcatgtccatcaaggaggcaagagagatcattcttaaagacatgcccaacgctaacattcaagttctaccggttggctcgcttgtgacccaagactttcgccctgatcgtgttcgcatcttcgttgatattgttgcctagactccaacagttggctgacaaggatatgccttatctataggccaaataaacaaagcctacttttatgtatcatggctaataaatcctacatttcttggttaaaaaaaaaaaaaaaaagaaaaaaaaaaaaaaaaaaggcccctagggccctc

SEQ ID NO: 29091 - DNA, 903 bp, Zea mays
  Clone ID: LIB4865-009-G5_FLI
ctcgaggccggccgggccgggacccatattattgataccaactagcaacatacatagtgaagtacactagcaacatcttagcaccaatgggagccaagatttttgccctccttgccctccttgctctttcagcaagcgctgctacctcgacttttattccacaatgctcacaacaatacctctctccggcgacagccgtgggatttcaatacccaactatacaatcctacatggtacaagaggccatccaagcaagcatcttacggtcattagcattaaccctccaacaaccatatgctctattgcaacagccatccttagtgcatctgtatctccaaagaatcgcggcacaacaactacaacaacagttgctaccaacaatcaatcaagtagttgcagcgaaccttgctgcttacctccagcaacaacagtttcttccattcaatcaactagatggggtgaaccctgctatctacttgcaggcacaacagctactaccatttaaccaacttgtcgggagcccttatgccttcttactgcaacaacagcttctaccattccatctgcaagctgtggcaaacattgctgctttcttgagacaacaacatttgttgccattttacccacaggttgtgggaaacattaatgccttcttgcaacagcaacaattgctaccattctacccacagaatgtggcaaacattgttgccttcttacaacaacaacaattgttgccatttagccaacatgctttgacgaatcctaccaccttattgcaaccgcccaccattggtggtgccatcttctagattttttatgatttatactgtaataataaagttctcatgctgatatgtgcgacctctcagtaataaagtattagagatctatattttaaattcc

SEQ ID NO: 29092 - DNA, 1328 bp, Zea mays
  Clone ID: LIB4865-011-G12_FLI
ctcgaggccggccgggccggggagtcggccactgcctcggaggcgccgccgccgcaggacgcatggctcgtcgagctcggcagtcgcctcccgcagtgggagtcgctgcgggattcctccaaggtcattatcccgatttcaatatctagggtgaaccagtttgatgctgcaaggctagatgttgagatgtcggccatgttgaaagagcagctagtcaaagtgttctctttgatgaagccaggactcttattccaatatgagcctgaacttgatgctttccttgagttcctcatctggaggttctcaatttgggctgacaagcctacccctggcaatgcactgatgaacctgaggtacagagatgagcgggcagcacccatcactggaaaagaagttagaacaggtttggaaggacctgggctttctgtttctcaaaagatattttattgtattagctttgttggtggccaatatgtatggtcacgattacaatctttttctgctttccgtcgatggggcgattctgaacagagaccactagctcgccgtgcttgggcgttgatgcggaatgctgaagtattttatagggctgcttcattctttaacctattattgtttctttatggtggaaggtacaaaactgttgtagaaaggattctgaaggcaagacttgtttatgggagccccaacatgaatagagctgttagttttgagtacatgaatcggcagctggtctggaatgagttttcggaaatgttgcttttgcttcttcccctcctaaactcgtcttcggtaaagaagttccttctccccttctccaaagataaatcaggaggttcttctggtgatgaagcagattgtcctatatgtcggtccagtcctagcattccatttattgctcttccatgtcaacacaggtattgctactattgcctacgcacacgttgttcggctacgacttcttacagatgcacacgttgtgacggggcggtggttgcaattcaaagactaggatcaggttagttttacgacctagttgggttaaagaattctcgcccgtttctacagagaatcagcacttcggtgtttcatacggttacaagtttggatacgcgtcattcactgtatgtacatgtaattgccccaagtgtggacagttcggatgccatgagcccataactgacttgttgtatatcgaatgaatagtccgtcacaaaactaacacggattcactatgcgttttcttttcgattcgtctatttcaaaaatcgtgtattgaaaaaaaaaaaaaaacaaaaaaaaaaaaaaaaaaggcccctagggccctc

SEQ ID NO: 29093 - DNA, 848 bp, Zea mays
  Clone ID: LIB4865-011-H8_FLI
tcgaggccggcgggccgggataattggtgtagtagtgtattggtataggagggtatgcgcgagagagaggtcgcgagttcgaatcttaccatttacaaaacatattaaaaaaataactgcaaccccggaacagagcgaggcgacgccgaggcacctcatctccggcgaagggaaatggcgaccgttccaggggatctgatctggcagattgtgaggaagaacaactccttcctggtgaagcagtttggcaacggcaatgccaaggtgcagttcaccaaggagcccaacaacctctacaatgtacactcctacaagtactctggcttagcaaacaagaaaactgtaacgatccagccagctgctggaaaggactcggctgtggtcctctctactaccaagaccaagaagcagaacacacccgcgaagctcagccacaagtctgtaatgcgcaaggagttccgcaagatggccaaggctgtgaaaaaccaggttggcgacaactattacaggcctgatctgaccaagtcggcccttggtaggctgagctctgtgtaccgcagcctccaggttgccaagtctggtgtcaagaagaagaacaggcagcctacgcactaagcctgtgttctgtcgttggtgcccatagtctcagcttatatttatccaatgtctccaacagttttgagacttgttagaactagagcaaatcgtgttaagatgttgccgtttgtcattctatagcaagaattccatgacaaagattgcttggcacttgattgctgctttgtttgcaagctggctggccgggattacccgtaaaaaaaaaaaaaaaaaaggcccctagggccctc

SEQ ID NO: 29094 - DNA, 777 bp, Zea mays
  Clone ID: LIB4865-012-F12_FLI
ctcgaggccggccgggccgggaacccttcgctgcgccgccgcctccgacatcgtctcttcgtccccacgagcaaccgataatccgccggcgctgagatgttggtttatcaagacctcctatctggcgacgagctcctgtcggattcattcacctacaaggagcccgagaacggcgtcctgtgggaggtcgagggaaagtgggtcacccaaggtcctgttgatgtagacattggtgccaatccatccgccgagggtggtgaggatgaaagcgttgatgacacagccgtgaaggtggttgatattgttgacacattccgtctacaggagcaacctccttttgacaagaaatcatttgtctcttacataaaaaaatacatcaagaatctcactgctgtgttggagccagagaaagcggatgagttcaaaaagggtgtcgagggtgcaaccaagtttctccttagcaagctgaaggaccttcaattttttgttggtgagagcatgaaggacgaagcgtccgtggtattcgcctattacaaggatggtgccactaatccgacattcctctatttctctcatggtcttaaggagatcaagtgctagattagttacccatgttgggtactatatatgttctattgttatagccacaactatagctgccctgcctgaactgaactcaggttttttttaagaaaaaactgtccaagattggattgcttgttaaagctaaatattgttattgacgtgttattgcttagttgtcattgtctttcagcc

SEQ ID NO: 29095 - DNA, 566 bp, Zea mays
  Clone ID: LIB4865-012-G11_FLI
aggtcgtactcgtctcctcccacccgcaaccgcagggagagaaaggggaagcccgccgccccggcccccagcaaccagcagatcgggacctctgttctgcgcaatccatccatggcggaggaatcaggccgtcccttgccaaagtttggtgaatgggatgtcaacgatccggcttccgcagacggatttactgtcatattcaacaaagccagagatgagaagaagggtgggaatggtcaagacacagactcaccttccaaggaccccaggactgagagggtggagtcttatgctgcaaaaccaagcacgaagaaatggttttgttgtgtgacatccagccctacgcaatcctgaggaaggcaattgcatgcgctggaaatactgcccctttaattttctatacatactatccataagacactgtagaggtacccatggctctctgggctccaggatgggtgtctcataaaactctggcgtgcatgtatgtatggtgtgagagttgtcggcatacatttgcaaagtggacttctgcttgtaattctagtcctgtctcttttttttcc

SEQ ID NO: 29096 - DNA, 614 bp, Zea mays
  Clone ID: LIB4865-012-H11_FLI
gatcccaaagcacaagagcacgcactgcagcaccacttcctgcgctgctgctcatcacacaccgtagtactaacactccatcgccacaatggctcccaaggttgcgctcttccttgccctcagcctcctcttcgctgccgccgcgcatggctgcggaccctattgctccggcccagtcgtaccaaccccaccagtcgtgccgtcgcacagccacggacgctgcccgatcgacgcgctgaaactcaaggtgtgcgccaacgtgctgggcctcgtcaaggtcggcctgccccaacacgagcaatgctgcccgctgctggagggcctggtggacctcgacgccgcactgtgcctctgcaccgccatcaaggctaacgtcctcggcatccacctcaacgtgccccttagcctcaacctcatcctcaacaattgcggcaagatttgcccaaaggactttacttgccccaactaattgagctgaatatggagataaagccagcatccaaggaatgtaccccttagtgttccatctcgcgattccgattgttacttgatcatcatcgctgtttatctatttttatatttaattatcaataaaaaacataaaaaaaaaaatc

SEQ ID NO: 29097 - DNA, 1483 bp, Zea mays
  Clone ID: LIB4866-002-G1_FLI
gagttccaaaaagctcgcaacagccagccctaggtctgaactctctcggacgggtgacaggctgacagccgccgcccgccagctttggagagccacggtgacaggccgccagcagccatcgacggccctccctccacctcgccgtcgtccctcttcccccatctcgccgagccatcgtccctccacagcaggaccacctcaccgagccgtcgtccctccacagcaggagtgcaggaccgcatcgccgagtcgtcgtctctccacaccaggttcgccgtcgcggcgcggctacctcgctccggctcccagctcgtccggtccagctcactcgcggtcgcgaccatctccgtccacctcatccctccggcaagcagttgctaaactcatccagggtcagcagatcagcagctcttgccttatcccgctggctggccgcggcaccggtggtgtggtggaggatggcatcgaaatacgtggccagggtaccgtctccatggtgggcgccacaacgtcgtttggttggttcatgggtttccgtctgctcggtaaaatgcggtgcattgggaggacgggatgttgtgtgcgctgctgttagcttcagaccatgcatcgacattcacaaggggaaagttaagcagattgttggttctactcttcgggattcatccaatgatggcatggaacttgtgacaaactttgaatcagacaaatctcctgcagaatttgcaaaatcatataaagaagatgaacttcttggaggacatgttataatgcttggctcagatcctgcaagccaggctgctgcactcgaggcactacatgcatatcctggtggcttgcaagttggaggtggaataaatttgcagaatgcaatgtcttaccttaatgaaggggccagtcatgtgatagtgacctcttatgtgcttagcgatggcaagatgaacattgaaaggctgacaaaacttgtcgagctggttgggaaacagaggcttgtgctggaccttagctgtcgaaaaaaggatggcagatatactattgtaactgacaggtggcagaagttcagtgatgtgtttgtggatgaaccggcattagaatatctcgctgccttcgcagatgagtttttggttcatggtgttgatgtggagggcaaaaggttagggattgatgaggaacttgtggaactattggggcatcattcaccaatcccagtaacttatgctgggggtgtgtcaacaatggatgacctagagaggataaagaaggcaggcaaaagtcgagtagatgtaactgttgggagtgctctagatatatttggaggagatttaccctacaaagatgttgtcctttggcacaagaagcaaagtatggttggccaagtgtcaaggaacatgtggtagcgatcagtattgccagaatttattgtgtatcgctcgctaaaagcatatttattttcattacaaaacttcattgtgcgtttgaactg

SEQ ID NO: 29098 - DNA, 832 bp, Zea mays
  Clone ID: LIB4866-003-E4_FLI
ctcgaggccggccgggccgggcaccagcaccagcacggcgaccaaccctctcccaacccgactagtcggactcgcagctccgccccaaagtccaggtcgaagcatggaagtcgcggcggcgtcggcgaggcccgtcctgcgcgtggctgccatctgcggctccctccgcaaggcctccttcaaccgcggcctcctccgcgccgccgcggaggtgtgcgaggactccatcccggggctccgcatcgacgagctcgacatctccgacctgcccatcatcaacaccgacctcgagaccggcagcggcagcggcaccgtcttcccgcccgccgtcgaggccttccgcgccaaggtctgccaggccgactgcttcctctagaggaaagaactgttgggcagacaaagctgctgcgatcgtgagtgcaggcggcggctttggaggagggaggtcgcagtaccatctccgtcaggtcggggttttcctggatctccatttcatcaacaagccagaactgtgcgtccaagcgtttcagcagccacccaagtttgacagcgatggaaatctggtcgatgctgaaatcagagagcggctcaagaaagtgctcctatcccttcaggccttcacgctcaggcttcagaaggaggactgaatcaactcggtaccattgtagtacgtgcttccctgagaagcgtttattgctcttggaagtttgtaacgcgttgctgggtggcctggaagtttgtaataaatccaagaagtgttctcgctgaatatttaagatttgatcgcatctatatataataaagattgtgttctagcgtttttgcgtttcac

SEQ ID NO: 29099 - DNA, 1391 bp, Zea mays
  Clone ID: LIB4866-004-A10_FLI
ctcgaggccggccgggccggggaacccaacccaccgccatttctatacccctctcgccctgcgcctcgtcacctctctgatccctctcctcttgctttgatgctttctctctccatctcgtttcccccgcctgcccagccagcgcaaaccctagcccgtactgcgaggctcttggcagcggataactggacctgtccgcatgaatcgggggagagaaactggcggtaacttacgtgaatcgggtttgtttagtggctgcgacggcgacggcggcgcagggatggaccgtaagcgcattaaggacgtgctcgagaagcacctggagaggtcgtcgccgtccacctccaggggcgtcgtgtccaaggagagggagcgcctcgctgccgggaaactgccggcgtcgcttggcaaggcggagaaggtgtctgatggtgaggaatttgaaactgacagtgaagatgaagattctgatatcagtggttctgagagcgagggcacatcctggatttcatggttctgtacattgcgaggcaatgaattcttttgtgagatcgatgatgactatatacaggatgattttaacctttgtggtctgagtatgcaggtgccatattatgattatgcacttgatctcatcttagacattgagtcttctgatggtgagattgttgttccttaaggaagttgatgcatattggtttgcctttgaatttatgatacatacactgaggagcgaaaagaatttatcgagttgtctgcagagatactatatggattaattcatgcacgatacatcttaaccagcaagggtctagctgcaatgttggagaagttcaagaatcgtgactttggtggatgccccagagtgtactgctgtggccagccctgtcttccagcaggtcaatcggatgttcctagatcgagcacagtgaagatatactgtccaaaatacgaagaacttaactatccaatatccatgtaccaaggcagcattgatggatcatacttcgggacgacgttccctcatcttttcctgatgacctatccgcacttgaagccgcagaagccgccacagcaatacactccaagagttttcggcttcaaacatcacaagccgtcatgacagagctgcactttcagcagaaacaccctttgcacctaggatttagggagagcaccgtggccttcaaatattgttgcctgatcgatgtacgaattcgcgaccttgggtcctgctgcaaactgctgtcaaattgtacgtatctgttttctcgtattactattgcgtaacttaggttttctcagtctcacactcacttgatcagagtatgtcaacctgcatgacatggtttcacgtaaaaaaaaaaaaaaaaaaggcccctagggccctc

SEQ ID NO: 29100 - DNA, 939 bp, Zea mays
  Clone ID: LIB4866-004-B9_FLI
ctcgaggccggccaggccggatcacccatattattgataccaactagcaacatacatagtgaagtacactagcaacatcttagcaccaatgggagccaagatttttgccctccttgccctccttgctctttcagcaagcgctgctacctcgacttttattccacaatgctcacaacaatacctctctccggcgacagccgtgggatttcaatacccaactatacaatcctacatggtacaagaggccatccaagcaagcatcttacggtcattagcattaaccctccaacaaccatatgctctattgcaacagccatccttagtgcatctgtatctccaaagaatcgcggtacaacaactacaacaacagttgctaccaacaatcaatcaagtagttgcagcgaaccttgctgcttacctccagcaacaacagtttcttccattcaatcaactagatggggtgaaccctgctatctacttgcaggcacaacagctactaccatttaaccaacttgtcgggagcccttatgccttcttactgcaacaacagcttctaccattccatctgcaagctgtggcaaacattgctgctttcttgagacaacaacatttgttgccattttacccacaggttgtgggaaacattaatgccttcttgcaacagcaacaattgctaccattctacccacagaatgtggcaaacattgttgccttcttacaacaacaacaattgttgccatttagccaacatgctttgacgaatcctaccaccttattgcaaccgcccaccattggtggtgccatcttctagattttttatgatttatactgtaataataaagttctcatgctgatatgtgcgacctctcagtaataaagtattagagatctatattttaaattacaaaaaaaaaaaaaaaaaaggcccctagggccctc

SEQ ID NO: 29101 - DNA, 1054 bp, Zea mays
  Clone ID: LIB4866-004-G4_FLI
ctcgaggccggccgggccgggatttcgaagcccaccgaattccctgcgattcctctcccctcgcctcctcgtctccccctaggggatcgtcggagaggaatcgcaaagagggccgtctcatccgagttaaggaagccatggagcacaaggaggctgggtgccaggcccccgagggacccatcctctgcatcaataactgtggcttcttcggcagcgcggcgaccatgaacatgtgctctaagtgccacaaggagatgataacgaagcaggatcaggccaagctggctgcctcctctatcgacagcatcgtgaacggcagcgacgccgtcatggagccggttgttgctggcagcaacacggtagtagctgttgcccaagtcgagttgcaaacaatgaacgtgcagcagcccgctgatgttgccggacccagcgagggggtggcggcgatctccaaaggggggaaggtagggccgaaccggtgcagcgcctgcaggaagagggttgggctcacgggattcaactgccggtgtgggaacttgtactgcgcgctccaccgctactccgacaagcacgactgcaagttcgactaccggactgctgccagggacgccattgccaaggctaatccggtggtgaaggcagacaagctcgacaagatctagggggggttccctacggttggtgtcaggaagattgtaaaccgcggtaactcgtcatgcggaactgctgccttgccccccgcgcctttctcttccatgtttgctgctacaatcttgttgttgggcattgcagtgcacggtgcacacttgtgtagcccgcctccgagaattctcctgcctctgcatctggtcagttcaaaaatgatttgcatgttggctatgttgtgtaagctctatttatggtggtctcgctgagacgggtatttggcttcgcagttatctagctatgtgatgtactgttgtcttgtccctgggtattatatggtacactgcagccagtaatagtaatctgcaactgtgcgaaaaaaaaaaaaaaaaaggcccctagggccctc

SEQ ID NO: 29102 - DNA, 917 bp, Zea mays
  Clone ID: LIB4866-004-H5_FLI
tcgaggccggccgggccggggaacataaacgcaacgcaaggcccctcgacgcagataccgcgctcaggagcattcgagaagccgaagaaaattcgaagacgaggaccagctacactgcggacggacttcgggcatggagggccagttccaggttggcaaggaggaggtcatccaagcatggtacatggacgacagtgaagaggaccagaggcttcctcatcatcgtgagcccaaagaattcattcctctcgacaaactttccgaactaggaatattaagctggcgcctaaatgctgatgattgggagaatgatgagaacctcaagaaaattcgtgaagccaggggttactcttacatggacatttgtgatgtgtgcccagagaagttgccaaattacgaggctaagataaagaatttctttgaagaacacttgcatactgatgaagagatacgatattgccttgagggtagcggctaccttgatgtgagggaccaagatgatcagtggatccgtgtagcggtaaagaaagggggcatgatcgttttgcctgcaggaatgtatcatcgctttacgttggatagtgacaactacatcaaggcaatgcgtctatttgtgggtgagcctgtctggacaccatacaatcgtccgcatgaccatctcccggctaggaaggagtacgtcgagaaaatcatcaaccgaggtggaaaccaagccgtcgaagctcgttgagcgtgtccactctacatgtcctcctgccgtctcagcctcttgtgttttacaccctacaactcctagtaccgccgaataagatttgctatctgcaatgtgctcatgccaccgctgtgtgtgccagttaacagtttgcacgaaaccctagatattttgttatacgaatgaatgacatgtggtgtttgac

SEQ ID NO: 29103 - DNA, 822 bp, Zea mays
  Clone ID: LIB4866-005-A8_FLI
ctcgaggccggccgggccggcctcatacctcaatcatcatcttctttaatcaacactgcgagagcctccctcctcgtttggttcggacttttgcttcggcgactttacgcggtaggccaccgtaaaccctagccccagaccacgggtcatagccaacgagatgcagatcttcgtcttgatgctgacggggaagaccatcacgctcgacgtcgagagcagcgacaccatcgataatgtcatggccaagatccaggacaaggagggcattcgcctgaccagcagaggctgatttttgctggcaaacaattggaggatgggaggacattagctgattacaacattcagaaggagtcaacactccctttggtcttgaggctcaagggtggaactatgatcaaggtgaagacactaactaggaaggaaatcgagattaacatcgagcccaatgacacaattgataggattaaggagcatgttgaggagagagaaggcatcccacctgttcagcagaggctcatttatgctgggaagcaacttgctgatgacaaaactgccaaggattacaacattgaaggtggttcagtgctccatcttgttcttgctctgaggggtggttgctagattaaaaagttcttgtactttctgcttatgctatctgttacatggagttgttttagaattgaagccttgtattgggtggttgattgtaccttgtgattagcacactactagagtcaggtgtcatctgtactgtttaagaaatgcttgaactagttcattcagttgtcaaaaaaaaaaaaaaaaaaggcccctagggccctc

SEQ ID NO: 29104 - DNA, 899 bp, Zea mays
  Clone ID: LIB4866-008-D1_FLI
ctcgaggccggccgggccgggatagatccaattgttcccttcctatattgctattgctattactatacgccaagcgccgcagcggcaggccacgcatctctctcccttccttctccccgttctccgtgcaatctcggccgtttccgctcccgccatcgccatggaggaggccaaggttgtggagtccaaggacggaacgatctcagttgcttcagcatttgctggtcatcaggaagctgtgcaagacagggaccacaaatttttatcaaaggcagtggaggaagcataccgaggagttgactgcggcgatggaggaccatttggtgcagttgttgtccataatgatgaagtaatagttagctgccataacatggttttgaagaacactgatccaactgcgcatgctgaagtaactgcgataagagaggcttgcaaaaagcttgggaaaattgagctgtcggattgtgaaatttatgcatcctgtgagccatgcccaatgtgttttggtgctgttcatttatcccggattaagaggctggtgtatggagccaaggcagaagctgcaattgccattggatttgatgatttcattgctgatgctctcagaggaactgggtactatcagaaagccaacatggagataaagcaggcagatggaaatggagccataattgctgaacaagtatttgagaagactaaagagaagttccaaatgtattgaaccgtggaattacttggtgggatgatttaacattgtgatagccctctgattctcaaaaaagaataacacaacctctggtattatgtaatttatgatgggccacaaattgccattgtgcttccatttctgaaaacaagattgatgtcactccttgttcttcaatgagcagttgattctg

SEQ ID NO: 29105 - DNA, 577 bp, Zea mays
  Clone ID: LIB4866-010-E6_FLI
ctcgaggccggccgggccgggagccccgccgccgcaacatcccgagtcgctcgtcagatcctccagcaacacagcaccttcgccgccgccgccatgggtaaggttcacggatcgctggcccgcgctgggaaggtgcgcgggcagacgcccaaggttgcaaagcaggacaagaaggagaagccccgcggccgcgctcacaagcgcatgcaatacaaccgccgcttcgtcaccgccgttgttggattcagcaagaagcgcggccccaactcatcggagaagtagatctagctatggctttgtgttttattccccactagtttcctcactgatggcaacttgctgaagacttatgctattatctgtatcgatgttactgcaatactgttaagtaggatatatgcatcgtttagttgatcaagttgcctgtggtggtgatccttttagtttgtctggaatgttggaaacatgtttgtgtcgtgctgtgttcgttttgttttgaaactggtaacatgattgagtctaaatgccggtctattctgttttaaaaaaaaaaaaaaaaaaggcccctagggccctc

SEQ ID NO: 29106 - DNA, 606 bp, Zea mays
  Clone ID: LIB4866-012-E2_FLI
tcgaggccggccgggccgggccatttgctgcgtctccttgcccgcgccgccgctcgccgtttgcccctcgtctccgcaccgcgcgctgttgtccatccttgtgcagcaaaaatgacggctggctacattgttggctcactggtcggatcctttgccattgcatacctgtgtgacacatttatctctgacaagaaggcatttggaggtagcacccccaagactgtttctgagaaggagtggtggcaagccacagacaccaagttccaggcctggcctcgcactgctgggccaccggttgtcatgaaccccatcagccgccagaacttcatcgtcaagtccactgagtaggtttgggctggagaagctggttctgcgacttggtgccgccatgaagccagagttccttttctaaggtcttaatcaattgtaataaaacgaaatacagtcaggatttttttgtgatttttacttgatctgtgagcgaacactgggtctttcaccttgtcatccaatgggttctgctccttggtgaaatttcccaccagccagtaaagaactgggttgttttcataatatatgcttttgctacgcagcctctgctgttac

SEQ ID NO: 29107 - DNA, 936 bp, Zea mays
  Clone ID: LIB4866-012-F12_FLI
gaggccggccgggccgggatcacccatattattgataccaactagcaacatacatagtgaagtacactagcaacatcttagcaccaatgggagccaagatttttgccctccttgccctccttgctctttcagcaagcgctgctacctcgacttttattccacaatgctcacaacaatacctctctccggcgacagccgtgggatttcaatacccaactatacaatcctacatggtacaagaggccatccaagcaagcatcttacggtcattagcattaaccctccaacaaccatatgctctattgcaacagccatccttagtgcatctgtatctccaaagaatcgcggcacaacaactacaacaacagttgctaccaacaatcaatcaagtagttgcagcgaaccttgctgcttacctccagcaacaacagtttcttccattcaatcaactagatggggtgaaccctgctatctacttgcaggcacaacagctactaccatttaaccaacttgtcgggagcccttatgccttcttactgcaacaacagcttctaccattccatctgcaagctgtggcaaacattgctgctttcttgagacaacaacatttgttgccattttacccacaggttgtgggaaacattaatgccttcttgcaacagcaacaattgctaccattctacccacagaatgtggcaaacattgttgccttcttacaacaacaacaattgttgccatttagccaacatgctttgacgaatcctaccaccttattgcaaccgcccaccattggtggtgccatcttctagattttttatgatttatactgtaataataaagttctcatgctgatatgtgcgacctctcagtaataaagtattagagatctatattttaaattcaaaaaaaaaaaaaaaaaaggcccctagggccctc

SEQ ID NO: 29108 - DNA, 721 bp, Zea mays
  Clone ID: LIB4867-001-E2_FLI
tcgaggccggccgggccggggtctcctcgctgccaaaaaaaaagaaagaaggaaagaagattcccagctgattttcgccgtccccgcggcggatgtgtgtggtgaggctgacaacagcgcttgcttttcttgttgtttcgatttcttccaggccttccactgcaggcacgggaaggcgtacctcttccataaggttgccaatgtgacttctggagtaaaagaagatcgcatgatgatgacaggaatgcatactgtttctgatatcttctgtgttggctgtggatccatcgttggatggaaatatgaggctgctcatgagaagagccagagatacaaggaaggaaagtttattctggagaggtacaaggtgtcgggccctgacggaagccaatactggattccacaagatcctcacttgggtggaagcgacgccgatgatatatgaagcgcaagtcaacaagttcaagcctgctgttcgtcgcctcccctgtagataacctgggtgtttttgctctttagtcagccgggattgctcccattgaaataatccccggcataaattattgttgttcttgatgacatgatcatatccttcctattgcccttggaagttgttggatgtttctattgtatatgcgtaaccggtgttgcttataagttcatcgagttgtatgccaagcgctaatgaccaaataattaaagtttgttaattgtctgatcg

SEQ ID NO: 29109 - DNA, 524 bp, Zea mays
  Clone ID: LIB4867-001-G4_FLI
tagtctagtctgatggccagccgctgggtccgacccgaggtgtacccgctgttcgcggcgatgggagttgccgttggcatctgcgggtttcagctcttccggaacatcaccggcaacccggaagtcagggtaaacaaggcagggagggcagccggcgtgcttgagaaccatgaggaggggaggcgttacgccatgcatggcctcagaagctttgtgcacgacaagacccccgagatcatgccagctatcaacaagttctttactgaccccaagtgaagcaaagcagctttggttggccgctgatgacgatggttctgctactagttgcccttggggattgtgtaccctttttatggcaattcgatatgtgaatgagttcgacggtccctgtttgttcctcgtactcacctgtcatgtggatttgatgcacttaagtgataaaactgtcagccaacgttcattacaagtggatttttgcaaactggttatgtaaaggataagtaattgtaatttacaagtgttct

SEQ ID NO: 29110 - DNA, 1116 bp, Zea mays
  Clone ID: LIB4867-005-B12_FLI
gaagcctctctctcacacacacatcgttgtccaaacaagagcggcgctgctcacggcggcctaacgagctaggccggatattccttaacccgctgactagatagatcgatccatcagctggcagccatgaatatgatcagggcagtacggcgccggttcaccgtcagccacctggctacggccaaagaccccgccacgctgcgccacgcggccgccgaactcctcgccaccgccatcttcgtcttcgccgccgagggcgccacgctctctctcgggaggatgcaccaccatgacaagggcggcggcggcctggtggcggtggcgctcgcgcacgccctcgcgctcgcggccgccgtggggtgcgccgccaacatctccggcggccacgtcaacccggccgtcaccttcggcgcgctgatcgccggccggatctgcctcgtccgctccctcatctactgggccgcgcagttgctcggcgccgtcgccgccgcgctcgtgctcaggctcgccaccggagggatgcatctgccggagtacgcgctggccgggggcgtgagcggatggaacgcggcggtgctggaggcggccatggcgttcgggctcatgtacgcctactttgcgacggtgatggacaaagcgcggagggtccgcgccggcgccggagcgctggcggcgccgctcgccgtggggctcctggcgggggccaacgtgctggcctgcggcgcgctggagggcgccgtgatgaatccggcgcgcgcgttcgggcccgccgtcgtgggctcccgtcgctggagacaccaatgggtgtactgggtggggcccatggtcggcgccggcctctccggcatcgtctacgagcacctcgtcgccggcccggccgccgaggaggaggaggagcccgcgccgagctgcggcgaccgccgtcgtgcgtagaggactacatgcatgcaggagcagcaggacgtcgtcgtcgtccccgctcctcggaatcttctgaataaaaaaacagcttgcatgcgtgctcaattgttgtgtgtcgtggtcgatcatgagtagaattaatgtttcatgcatgcactcttaccgtcttctacttatgtccttgtttgcttcaat

SEQ ID NO: 29111 - DNA, 525 bp, Zea mays
  Clone ID: LIB4867-006-E12_FLI
ctcgaggccggccgggccggaacgctccccggaacgaacgacgcagcccaacccgttcccaccaaaccagcggcaccacccatggcttcggcggcggcgagatccggtctccggtcgctggcggtgcgcgccggcccgttgaggcgccgcatgtcctcctccgtccacgacgacgcctatgagacggccaagtgggagaagatcacctacgccgggatcgtgacctgcaccctcctggcggcgtacaacctgtccaagggccacccccacttcgatgagccgccggcgtacccctatctgcacatccgcaacaaggagttcccatggggccctgatggcttgtttgagacgaaggaccaccactgagccctgattagcacacattcaggagctggtgcatgcttaaaagagttatatggttgtttcagtgattttccttttcccttgagacctatttgctgcaacaagaaataagaatgaccaaactcttgtattgacagtgaggttttaactgtgttagctgtt

SEQ ID NO: 29112 - DNA, 933 bp, Zea mays
  Clone ID: LIB4867-010-D10_FLI
ctcgaggccggccgggccggcatcacccatattattgataccaactagcaacatacatagtgaagtacactagcaacatcttagcaccaatgggagccaagatttttgccctccttgccctccttgctctttcagcaagcgctgctacctcgacttttattccacaatgctcacaacaatacctctctccggcgacagccgtgggatttcaatacccaactatacaatcctacatggtacaagaggccatccaagcaagcatcttacggtcattagcattaaccctccaacaaccatatgctctattgcaacagccatccttagtgcatctgtatctccaaagaatcgcggcacaacaactacaacaacagttgctaccaacaatcaatcaagtagttgcagcgaaccttgctgcttacctccagcaacaacagtttcttccattcaatcaactagatggggtgaaccctgctatctacttgcaggcacaacagctactaccatttaaccaacttgtcgggagcccttatgccttcttactgcaacaacagcttctaccattccatctgcaagctgtggcaaacattgctgctttcttgagacaacaacatttgttgccattttacccacaggttgtgggaaacattaatgccttcttgcaacagcaacaattgctaccattctacccacagaatgtggcaaacattgttgccttcttacaacaacaacaattgttgccatttagccaacatgctttgacgaatcctaccaccttattgcaaccgcccaccattggtggtgccatcttctagattttttatgatttatactgtaataataaagttctcatgctgatatgtgcgacctctcagtaataaagtattagagatctatattctaaaaaaaaaaaaaaaaaaggcccctagggccctc

SEQ ID NO: 29113 - DNA, 2162 bp, Chlorella sorokiniana
  Clone ID: LIB4918-005-F2_FLI
atcccagcacgtctcgtctccctcccacaaaaaaaaaaaaaaactgctcggttactgctcctgctccgccgcgccggcatcatgtgtggcatcttagccgtgctcggttgctccgactggtctcaggcaaagagggctcgcatcctcgcctgctccagaaggttgaagcacaggggccccgactggtcgggcctctaccagcacgagggcaacttcctggtgcagcagcggctcgccgtcgtctccccgctgtccggcgaccagccgctgttcaacgaggaccgcaccgtcgtggtggtggccaatggagagatctacaaccacaagaacgtccggaagcagttcaccggcacacacaacttcagcacgggcagtgactgcgaggtcatcatccccctgtacgagaagtacggcgagaacttcgtggacatgctggacggggtgttcgcgttcgtgctctacgacacccgcgacaggacctacgtggcggcgcgcgacgccatcggcgtcaacccgctctacatcggctggggcagtgacggttccgtctggatcgcgtccgagatgaaggcgctgaacgaggactgcgtgcgcttcgagatcttcccgccgggccacctctactccagcgccggcggcgggttccggcggtggtacaccccgcactggttccaggagcaggtgccccggacgccgtaccagccgcccgtcctcagagaggccttcgagaaggcggtcatcaagaggctcatgactgacgtcccgttcggggtcctcctctccggcggcctcgactcctcgctcgtcgcctccgtcaccaagcgccacctcgtcgagaccgaggccgccgagaagttcggcaccgagctccactcctttgtcgtcggcctcgagggctcccctgacctgaaggccgcacgagaggtcgctgactacctcggaaccatccatcacgagttccacttcaccgtacaggacggcatcgacgcgatcgaggaggtgatctaccacgacgagacgtacgacgtgacgacgatccgggccagcacgcccatgttcctgatggctcgcaagatcaagtcgctgggcgtgaagatggtgctgtccggggagggctccgacgagctcctgggcggctacctctacttccacttcgcccccaacaaggaggagttccacagggagacctgccgcaaggtgaaggccctgcaccagtacgactgcctgcgcgccaacaaggccacgtcggcgtggggcctggaggtccgcgtgccgttcctcgacaaggagttcatcaacgtcgccatgggcatggaccccgaatggaaaatgtacgacaagaacctgggccgcatcgagaagtgggtcatgaggaaggcgttcgacgacgacgagcacccttacctgcccaagcatattctctaccggcagaaagaacagttcagtgacggcgttggctacaactggatcgatggccttaaatccttcactgaacagcaggtgacggatgagatgatgaacaacgccgcccagatgttcccctacaacacgcccgtcaacaaggaggcctactactaccggatgatattcgagaggctcttccctcaggactcggcgagggagacggtgccgtggggcccgagcatcgcctgcagcacgcccgcggccatcgagtgggtggagcagtggaaggcctccaacgacccctccggccgcttcatctcctcccacgactccaccgcgatcgaccacaccggcggtaagccggcggtggccaacggcggcggccacggcgcggcgaacggcacggtcaacggcaaggacgtcgcagtcgcgatcgcggtctgacgagagtacgtgctcgcgcacctccctgcttctaccgggctgcagcctgcagcatgcactgtgcgagcacagccgatcagcgccaataaactggaggataagaacgactggtaggtgtgtgtgtgtgtcgtgcgtgcccaccggccatatcccggtgcggcagcacgtgctattgttacgtgttgtactgccaccagcgtacgtgtctgtgtgtctcgatcatatctgtacgtttttagatttagaagagaaaaaaaaaagtatgcccgtgtctgtatgtctggatcatatctgtacgttcttagatttagagg

SEQ ID NO: 29114 - DNA, 2228 bp, Zea mays
  Clone ID: LIB4980-057-B2_FLI
agggacgacaggatagagaagcgaacttccctgcctaaaactcccatttcgccgtccgtgacgcgagagacctcttcgcatcccgaggcggcgcttttggggtcggaagcgacacgggcgcccggcgggtccgcgggtggtggtgctactgctagcaagcagcagcaggcgacgctaggcgagagccccagtcggagcaggccaccatgtgcggcatcctcgctgtcctcggcgtcgctgaggtctccctcgccaagcgctcccgcatcattgagctctcgcgcaggttacggcaccgagggcctgattggagtggtttgcactgtcatgaggattgttaccttgcacaccagcggttggctattatcgatcctacatctggagaccagcctttgtacaatgaggataaaacagttgttgtaacggtgaacggagagatctataaccatgaagaattgaaagctaagttgaaaactcatgagttccaaactggcagtgattgtgaagttatagcccatctttacgaagaatatggcgaagaatttgtggatatgttggatggaatgttctcctttgttcttcttgatacacgtgataaaagcttcatcgcagctcgagatgctattggcatctgccctttatacatgggatggggtcttgatggatcagtctggttttcttcagagatgaaggcattgagtgatgattgtgaacgcttcataacattccccccagggcatctctactcaagcaagacaggtggtctaaggagatggtacaacccaccatggttttcagagacggtcccttcaaccccttacaatgctctcttcctccgggagatgtttgagaaggctgttattaagaggctgatgactgatgtgccatttggtgtgcttttatctggtggactcgactcttctttggttgcatctgttgcttcacggcacttaaacgaaacaaaggttgacaggcagtggggaaataaattgcatactttctgtataggtttgaagggttctcctgatcttaaagctgctagagaagttgctgattacctcagcactgtacatcatgagttccacttcacagtgcaggaggggattgatgccttggaagaagtcatctaccatattgagacatatgatgttacaacaatcagagcaagtaccccaatgtttttgatgtcacgcaaaatcaaatctttgggtgtgaagatggttatttctggcgaaggttcagatgaaatttttggtggttacctttattttcacaaggcaccaaacaagaaagaattccatgaggaaacatgtcggaagataaaagcactacatctgtatgactgcttgagagctaacaaagcaacttctgcctggggtgttgaggctcgtgttccattccttgacaaaagtttcatcagtgtagcaatggacattgatcctgaatggaagatgataaaacgtgacctcggtcgaattgagaaatgggttatccgtaatgcatttgatgatgaggagaggccctatttacctaagcacattctctacaggcaaaaggaacagttcagtgatggtgttgggtatagttggatcgatggattgaaggaccatgccagccaacatgtctccgattccatgatgatgaatgctggctttgtttacccagagaacacacccacaacaaaagaagggtactactacagaatgatattcgagaattctttcccaagcctgcagcaaggtcaactgttcctggaggtcctagtgtggcctgcagcactgccaaagctgttgaatgggatgcatcctggtccaagaaccttgatccttctgggcgtgctgctttgggtgttcacgatgctgcgtatgaagacactgcaggggaaactcctgcctctgctgatcctgtctcagacaagggccttcgtccagctattggcgaaagcctagggacacccgttgcttcagccacagctgtctaaccttatgtttatcacccagcaatgcttgaaacagcaaaggttctccattgcttgtttcagtttccttccgatcatgtttttagttccatcaatcaagcaatggagacatgcttgtgcttcatgcttggcagcatcgtgtttggggttttcactgagcagtactgtttaatttttatggactgaaaagactcagttttgtaaatattcgtcactgtgaccaattcctgtggtggtttatgtgatttgt

SEQ ID NO: 29115 - DNA, 612 bp, Glycine max
  Clone ID: LIB5-01-A6_FLI
atgggtcacaacatgttgctgagactactaggaaatgtggaaatggagaaggatcaacaagcccttgcaagaggactcatgaagatcatcaagctagaaagttgagtcctctagaaagccgagcaatggcttgggatgaggccgaacgtgccaaatatatggccaggttcaagcgtgaagaggtgaagattcaagcctgggaaaatcatcagataagaaaagctgaaatggaaatgaagaaaatggaggtgaaggctgagagaatgaaagcattggcacaagaaaggtttacaaataaactagcttcgactaagaggatagctgaagagaaacgagctaatgcacaagtgaagctgaatgacaaagctttgagggctactgaaagggttgagtatataagaaggacaggacatgtgccttcttctttctctttaagctttaagttgccttccatttgctggtagtagcaattttgcaaccaatatatgtaatatcttgtcgtgtgaaatataaaaccttcagtacaattggtaaaatttatcatgaagctgttgacatatataaggtaatgtttcattaaattacacttgggtgcatttcaaatgtaaattt

SEQ ID NO: 29116 - DNA, 576 bp, Glycine max
  Clone ID: LIB5-01-F10_FLI
cggaggaagaagaaagcggagtatcgatacaactggaattcccgaagggtcgggtgaagaagattatggcgctggacaaagacgtgaagagggtgagctcagaagcgttgtttctggtgtcgcgctccacggaattattcctccaattcctggctgaaaaatcggcgcaggttgcgattgaaaagaaacggaagaccgtgaatctggaacatataagagaggccgtgaagaggcaccagccaacccgggattttctcctcgacgagcttccgccgccatctcagcccaccaagcccgataggcccactcagcctgccggtcggcccaaattggatcctcctccccgtggtactcgccgcatcgatctatttttccggaaaccagaacttgacaacccagcccaagcccaaccacctgaaaatccagctcaagctcaaccgcctgaaaatccagaccaagaccaagcccaatcgccagtacccgtagatgagtcttaggttttgtttgtttatacacctgcgtttgagattttgtatccgatctgaatctgagataacatctaacaatgcattagcg

SEQ ID NO: 29117 - DNA, 2224 bp, Glycine max
  Clone ID: LIB5-01-G6_FLI
gataagtatgaagaataaaaacagtcgagctaatcggaaagctcgttcggtgaaaccccccgattcctgtttatcttcttccaattcaaacaagaaatggatggttccctataaattctacgatgtcaagggtcccaattccgagtcaaaccctaatgttgactcgtctagttgggttttgtgcaccgaggttcaattggaaaccattctgttgaaaaacattgaaattatatacaatgacactgtgccaaagcttgttgctttgggctacagtgaggagattgctgtcaaagcgattctgtacaatggacattgttacggtgccaatgatttggcaacaaacgtgctgcacaactccttggcttgtttgacaacggggaccttggacttgtctgagtccagccctgcgttccctgatatgaagaagcttcaggagtactctttgatgaaccttgtgtctttgttgaaagaggtgaggcccgatttaagtaggggtgatgctatgtggtgtctcctcatgagcaatttccatgtgttgaaggcgggcgccatcccggttcctgttggaaacacgtgccctcctcctcctcctcctttgcccgagcttgagaacacgggatggagatttgcgaaagagggaggcttgggttttcctttgaatgggctcttttctgatactgatatgactatacggttacagagagatattgaattcccaaaaagatttgaccttactcctgccatgaaaagcttgttgaaaagaaatgttgcaatgtttgctgatggttttagggctaactcaaaacaggtgcagccgcaagccagtgaatttcctaggactggctctgtttcgaaattgggttcttcatctgcttctgggactgctgcagtccttggtgagcagcctggtgactctcacaatcagaatgaccaggaggacttgaactctgtgatgagtaaatttcttgatctaaatattgatgataatgtggagtttgtgccagaagacgacaaggaggaggtgatagtcactctagttaatcagataaaggatcttgagaaacaggtcaaggagcggaaagattgggctcatgagaaggcaatccaagcggcaaaaaagctaagcagtgatctgattgagctgaaaaagttcaagatggaaagagaggagaataaaaaactgccgaaggagacaggggcagctgaggagctggacaacccaaccatgatgagactctcagaaatggagaatgccttgagaaagactagtggtcaaatggaccaagcaactgcagctgtcagaaaacttgaggcggagaaagctgaaatcaaagcagagttagaggcttctaaattaagtgcatcagagtcagtcacaagctgtttgcaagttgcaaaaagggagaaaaagtgcttaaagaagcttctgacttgggaaaaacagaaagtaaagatacatcaggatatttcagatgaaaaacagaagatattggagatacaagaagaactagctcagattaaacagtgtgcaaaggaaactgaggtaacgaggaaggaagagttgaaggctaaggaagaagccttggcactaattgaagaggagcgccgttctaaggaagcagctgaggctaatcataaaagaaatcttaaagctttacgcctgaagatagagatagatttccagcgtcgtaaggatgatctccctaaggctgaagcagagattcacgccctaaaagcacatgcacggtctactactttgcctacaagtgagtctgaggatgcagagccccagagagagacacttgctaagcttctgctagagttagataatgtgaaggatttttctggaaaagaaatcaacggtgatagagaatgcattatatgtggaaaggatgaagtttcagttattttcttgccatgtgcacaccaagttatgtgtgctcgttgcggtaaagagtatgggaaaaagggtaaagctgtttgtccatgctgccgggttccaattgaagagagaattcctatatttggggcatgttcgtagtcttacatcggtaagctatgaatattttgcagaaaaactatgttctgccgtagcttatcttttgaatgtctgaaaatgaaaatctattattactaccttgaaaataagataggtaaatactaacatgtgctttgaaggcactagtcaaggattaaaaaatataaatgattttaggatatgagt

SEQ ID NO: 29118 - DNA, 1002 bp, Glycine max
  Clone ID: LIB5-02-C9_FLI
caggcgtttggttgaatggaagcgcgtgggcgggtggttcgtgtttccgttcacaacagtgtcaatgtcctcctcccttcttttcccttttaagtcatagctttccccttcccttcaaattctcctcaaaccctacctccctttccccccccctcttcgcgtcttttcgcaaccgactgcatcttggatactggaatagtgtgccaatatgagctctcgggcaggcaagggacctgccgtcagaagttatcggaggagaaagacagcgttggaccttgaccttaaccgtgtaccagctggtgagaatcgtgagcaggagggaccttcgactcagtcggtgcctcgagaagttcaagttgaacagcagcagcaggctactcaacctccgatgattgacgtggaagccattgatgatgatgttgttgaatgtaccccaagggcttttgctgaggctaaaaacaattcaagaagagttcgtaggaggactatagttgatgttgatctagaagatcagactaggcgcaacaaacgccgaagagaattgccaaatctgattattaattgtgataagtatataaatttggaaggcggtagcagttccatggagcaaagttttaaaaagccacctgaacctccaaaggagcttgtcttcaactgtccaatatgtatgggccctatggtacatgaaatgtcgacaagatgtggtcatattttttgcaaggattgcatcaaagctgctataagtgctcagggtaaatgccctacctgtagaaaaaaggttgttgcgaaagatcttataagggtgtatctcccatcgactagttagaggctttccgtggaagctgtaaagaggagacagggattggaagaaacgtcattgtactttggacaatactgaatggctgtgttgtttctaatatgttccctcatagctgatgcttagtctgttgttgggtagctgtttctcttaatttatcatattaatacatgatgacatttggt

SEQ ID NO: 29119 - DNA, 1064 bp, Glycine max
  Clone ID: LIB6-01-B11_FLI
ggaattcatgatggggtacaggaacgacactttcgcggaggataatgcggttcgtgaagctgcgtcggggctagagagcgtcgagaaactcatcaagttgctgtcgcatactcaacaacaataccagacaacctcaaagtcttccatggaaaacatcgacaccgactacacagctgtcgctgacgtcgcggtttctaagttcaagaaggtcatttcgcttctgggccgcaccagaaccggtcacgcgcgttttagaagagcccctgtgcctgtgcctgtgcctgtggcttcacctccaccttcggaaccgagagtctaccgtgctacgccgctgcagcagatcccgccacccacccttcacactcactctgtcactgaccactctctgatccccaaaattgagagaaaggactcttccaagaccattaatttctcctattcaaattcgtttgtctcctccctcaccgctggcgataccgacactaaacaaccgtgctcgtcgtcgccgtcgccggccacggcttttcagatcacgaatctctctcaggtctcctccgccggaaagcctcctctttcgtcctcttcgttgaagaggaagtgtagctctgagaacttgggttctgctaagtgtggcagttcctctagccgatgccattgttcaaagaagagcagaaaaatgaggcagaagagggtggtgagggtaccggcaataagcttgaagatggctgatattccaccagacgattattcttggaggaaatacggacagaaacccattaaaggatccccccatccaagaggttattacaagtgcagcagtgttagagggtgtccagcgcgcaaacacgtagagagggctctggatgatccatctatgttggtagtcacctatgaaggagagcacaatcatacactctctgcagccgaagctactaatctcatcctagaatcctcttaactaattaatcatcgttttcccatcacaaagtatgttctgatcatgtcattcatggcttgtacaattgaaatttttaatcgagcagagctttatctcgaaggagatt

SEQ ID NO: 29120 - DNA, 848 bp, Glycine max
  Clone ID: LIB7-01-G1_FLI
attctgagaaccacttccatctccactcctatctcttcctccaaatccaaacccattttctcaactcttcttcgttcttctccttccaccattttccccccaaagtccgttactcccaccactcttttcgtttctgccacccccttcttcactctccatcccaagcttggttttcgtggtgggattgtggccatggccgcacctggctctctccgcaaatccgaggaagagtggcgcgcaattctctcccctgaacagtttcggatcctcaggcaaaagggcaccgagttccctggaacaggagagtatgacaagttctatgaagagggagtttacaactgtgctggttgtgggactccactctacaggtccataacaaaattcaattctggttgtggctggccagccttctatgaggggattcccggagccataaatcgcaatccggatcctgatgggatgaggacagaaataacgtgtgctgcttgtgggggacatctaggtcacgtctttaaaggagaaggatttccaacacccactaacgaacgccattgtgtcaatagcatttcgctgaaatttgcgccagccaattcttattcttaataaaattgagtctgctgtttggacgtgactacttaagtacccaacatcggtaaaaaaattatgcaatgtacttatattatgaatgaagttaaaaaaaaaatgatggctaaataacaatgttgataatttgtacctttattcctctgttccctttttcacttggtgctagatctactatgttcatttgtgcttgtgttcgtacttgggtttatatatgtgatatgtccaagtagattaaaggtgat

SEQ ID NO: 29121 - DNA, 1174 bp, Glycine max
  Clone ID: LIB7-01-G3_FLI
aaaataataacaaaggaatcttctctttctctctctctctctctctttgagttgagtttcgagttgcgccattttcacctgtcctctctctctctctctctctctgtcaccgtgttgcaagtatgaaggactgttggtttttacaacaatttcaatggtctgtcggatgagagtcttgatgatgtgatggacatggagcttttggatttgccccttgactttgaggatgtggaaactgatgctgtggaagaacaagattgggatgctcagctcaaactccttgaagacccaccaccaccacttggagttttcccactacaacaatcctctgcattctgtggacaaactcggaatgagaatgcgaaactcggcagcaagagtttctctgcttctctagcgaagactgtcagacctgcatatggcaaaactattcctgtccagaaagtctctttaaaaggaaaagatttgctccaattccaaaccaacagcccagtttctgtttttgaaagcagtagtagttctccctcggttgagaactccaactttgagttacctgtcatcccaacaaagcgtccccgtaccaaacgccggcgtctctcaaacatcagcctgctttactctattccttttatccttacttcaccggcttttcaaaaatttcagaggatggatttctccaaatcagatatacaaacacagccttctggggaattattatgcaagttcaaaaagaagcagaggaaaaaggatattcccctgccgactaacaaaattgagatgaagagatcctcatcacaggagtcagttgcacccagaaaatgcttgcattgtgaggtgacaaagacgccgcaatggagagaaggaccaatgggtcctaagaccctatgcaatgcctgtggggttcgataccggtctggccggctctttgctgaataccggcctgcatctagccccacttttgtagcatcactgcactcaaactctcacaagaaggtcttagaaattaggaacagagccacccaggtgactgttagataaaccttcgttgaaattctctagattagtattgttttagattttattgagtgcttgtgctaaacaggattgtccttgattattgttctccttttttatggactaatcttaatcttatattgcttagctagttagcatc

SEQ ID NO: 29122 - DNA, 1769 bp, Glycine max
  Clone ID: LIB7-02-D11_FLI
acctgattgcgattatagtgatgctgaccttgttgtcgagggaattccggttagtgttcatcgatgtattctggcctctaggagtaagtttttccatgaattattcaagagggagaaggagtcatcagaaaaagaagggaaattgaagtataacatgaatgatttgttgccttatggcaaggttggatatgaagccttcctcatattccttggctatgtatatactggtaaactcaagccctctccaatggaggtgtctacttgtgttgacaatgtttgtgctcatgatgcgtgtagacctgccattaactttgctgttgagttaatgtatgcctcttccatttttcaaataccagagttggtatcacttttccagagacgtctacttaactttataggaaaggcccttgtggaagatgtcatcccaatcctcactgttgctttccattgtcaatcaaatcaacttgtcaatcaatgtattgatagggtggccagatcagaccttgaccagatttcaattgaccaagagcttccgcatgaactctcacaaaaagttaaattgctccgccgcaaacctcagcaagatgttgaaaatgatgcttctgtagtggatgctttgtctctaaaaagaatcactagaatacacaaggcgttggactcagatgatgttgagcttgttaaacttcttttgaatgaatcagacattactttggatgaagccaatgctctccattatgctgcagcctactgtgaccccaaggttgtttctgaggtacttggtttgggactggctaatgtcaatcttcgaaattctagggggtacacagtgcttcacattgctgccatgcgtaaagagccttccattatagtatccctacttacgaaaggggcttgtgcatcagatttgacttttgatggtcagagtgctgttagtatttgtaggaggttgacaaggccaaaggattatcatgcaaaaacagagcaggggaaagaaacaaacaaagatcggatatgcatcgatgttcttgaaagagaaatgaggaggaatccaatggctggggatgcctgtatgtcttcccataccatggctgatgatctccacatgaaactactgtaccttgagaacagagtggcatttgcaagacttttcttcccttcagaagccaaactagccatggacattgcgcatgctgagacaacatctgagtttgctggtctttctgcgtcaaactcaaaaggttcaaatggaaacttaagggaggttgatctcaatgagactcctatagtgcaaaataaaagacttctttctagaatggaagcccttacgaaaacagtggagatggggcggcgctacttcccacattgctcggaagtgctggacaagttcatggaggatgacctgcctgacttgttttaccttgaaaagggtactcatgaagagcagagaatcaaaaggacgcgtttcatggagcttaaagatgacgtccacaaggctttcaacaaggacaaggccgagtttagccgctctgggatttcatcttcatcatcctcatcatccctcagagattctgttgtacattacaaggctaggaaagtgtaattttaaaaccatacatagtgtttttgattttgacatacatattatatatagtgcaaattttaaaggtgaagcccaccaactcatctgtaaaattctcgaagcaggaaagttgatgtaaacaacctgcgcatatatttttgaaaatgttttcatatgctttttggtggag

SEQ ID NO: 29123 - DNA, 1352 bp, Brassica napus
  Clone ID: LIB80-006-F5_FLI
aactctttctcaaagcataatccatctttcacacacaaagatggtagctcacaaagagaccgtgtgcgtaaccggcgcatcaggattcattggttcatggctcgtgatgcggctactggaacgtggttattttgtccgtgccactgttcgcgatcctggaaatttgaagaaagtgcaacatcttcttgatttgccaaacgcgaagacgcaactcactttatggaaagccgatttatctgacgaaggaagctacgatgacgccataaacggatgcgacggcgttttccacatagcaactcccatggattttgaatctaaggaccccgagaacgaagtgataaaaccgacagtgaatggagtgttggggataatgaaagcatgtgataaggcaaagaccgtacgaagaattgtgtttacttcgtctgctggaacggttaatgttgaggaacaccagaaaaatgtctatgatgaaaacgattggagtgatttgactttatcatgtccaagaagatgacaggatggatgtatttcatgtcgaaaacgttagccgagaaagcagcttgggattacgcgaaggaaaaaggaatagatttcattagtattatcccgacattggtgatcggtccatttataacaacatctatgccgcctagccttattaccgcgctctctcctatcactcgtaacgaggcacattactccatcataagacaaggacagtatgtccacttggacgatttatgcaatgcccatatattcttgtacgaacaagctgctgccaagggacgttatgtttgttcctctcacgatgcaacgattcttactatctccgagtttctcaggcaaaaatatccagaatataacgtgccttcaacgtttgaaggagtggatgagaatctaaagagcattatgttcagttccaagaagctgattgatatgggatttaacttcaagtatagtctcgaggatatgttggtggaatcgattgagacatgtcgtcaaaagggttttctccctgtcactttaccggaacatttgaaatctgaggacaaagttccgggcagtgatgataataaggagattaaaaacggatctgcaggtttaactgatggtatggtagcttgtaagaagaccgaaccagggatggccggcgagaaagccgatagtcacatgtcggcacagcagatctgtgcttagaaattgaacccgtatctaatatggatctattgtcttatgaatgtgtgatttgttttttttttctttttaagtttgtatgaaagtgttgtggacttatttatggtatatgatatcatgtgtgagtgtgaaaaattatgaatcaatattattaaatt

SEQ ID NO: 29124 - DNA, 1334 bp, Brassica napus
  Clone ID: LIB80-018-E12_FLI
gtatactctttcccaaagcataatccatctttctaacacacacaaatggtagctcacaaagagaccgtgtgcgtaaccggcgcatcaggattcattggttcatggctcgtgatgcggctactggaacgtggttactttgtccgtgccactgttcgcgatcctggaaatttgaagaaagtgcaacatcttcttgatttgccaaacgcgaagacgcaactcactttatggaaagccgatttatctgacgaaggaagctacgatgacgccataaacggatgcgacggcgtttttcacatagctactcccatggattttgaatccaaggatcccgagaacgaagtgataaaaccaacagtgaatggagtgttggggataatgaaagcatgtgataaggcaaagaccgtacgaagaattgtgtttacttcgtctgctggaacggttaatgttgaggaacaccagaaaaatgtctatgatgaaaacgattggagtgatctcgactttatcatgtccaaggaagatgacaggatggatgtatttcatgtcgaaaacgttatgccgagaaagcagcttgggattacgctaaggaaaaaggaatagatttcattagtattatcccgacattggtgatcggtccatttataacaacatctatgccgcctagccttattaccgcgctctctcctatcactcgtaacgaggcacattactccatcataagacaaggacagtatgtccacttggacgacttatgcaatgctcatatattcttgtacgaacaagctgctgccaagggacgttatgtttgttcctctcacgatgcaacgattcttactatctccgagtttctcaggcaaaaatatccagaatataacgtgccttcaacgtttgaaggagtggatgagaatctaaagagcattatgttcagttccaagaagctgattgatatgggatttaacttcaagtatagtctcgaggatatgttggtggaatcgattgagacatgtcgtcaaaagggttttctccctgtcactttaccggaacatttgaaatctgaggacaaagttccgggcagtgatgacaataaggagattaaaaacggatctgcaggtttaactgatggtatggtagcttgtaagaagaccgaaccagggatggccggcgagaaagccgatagtcacatgtcggcacagcagatctgtgcttagaaattgaacccgtatctaatatggatctattgtcttatgaatttgtgatttgtttttttttctttttaagtttgtatgaaagtgttgtggacttatttatggtatctgatagtctcatgtgtgagtgtg

SEQ ID NO: 29125 - DNA, 2073 bp, Schizochytrium aggregatum
  Clone ID: LIB81-015-D5_FLI
cttttggtttgactcggtcatgcccggaagtctcggtgtcgagtccatgttccagctcgtcgaggccatcgccgcccacgaggatctcgctggcaagcacggcattgccaaccccacctttgtgcacgccccgggcaagatcagctggaagtaccgcggccagctcacgcccaagagcaagaagatggactcggaggtccacatcgtgtccgtggacgcccacgacggcgttgtcgacctcgtcgccgacggcttcctctgggccgacagcctccgcgtctactcggtgagcaacattcgcgtgcgcatcgcctccggtgaggcccctgccgccgcctcctccgccgcctctgtgggctcctcggcttcgtccgtcgagcgcacgcgctcgagccccgctgtcgcctccggcccggcccagaccatcgacctcaagcagctcaagaccgagctcctcgagctcgatgccccgctctacctctcgcaggacccgaccagcggccagctcaagaagcacaccgacgtggcctccggccaggccaccatcgtgcagccctgcacgctcggcgacctcggtgaccgctccttcatggagacctacggcgtcgtcgccccgctgtacacgggcgccatggccaagggcattgcctcggcggacctcgtcatcgccgccggcaagcgcaagatcctcggctcctttggcgccggcggcctccccatgcaccacgtgcgcgccgccctcgagaagatccaggccgccctgcctcagggcccctacgccgtcaacctcatccactcgccttttgacagcaacctcgagaagggcaacgtcgatctcttcctcgagaagggcgtcactgtggtggaggcctcggcattcatgaccctcaccccgcaggtcgtgcgctaccgcgccgccggcctctcgcgcaacgccgacggttcggtcaacatccgcaaccgcatcatcggcaaggtctcgcgcaccgagctcgccgagatgttcatccgcccggccccggagcacctcctcgagaagctcatcgcctcgggcgagatcacccaggagcaggccgagctcgcgcgccgcgttcccgtcgccgacgatatcgctgtcgaggctgactcgggcggccacaccgacaaccgccccatccacgtcatcctcccgctcatcatcaacctccgcaaccgcctgcaccgcgagtgcggctaccccgcgcacctccgcgtccgcgttggcgccggcggtggcgtcggctgcccgcaggccgccgccgccgcgctcaccatgggcgccgccttcatcgtcaccggcactgtcaaccaggtcgccaagcagtccggcacctgcgacaacgtgcgcaagcagctctcgcaggccacctactcggatatctgcatggccccggccgccgacatgttcgaggagggcgtcaagctccaggtcctcaagaagggaaccatgttcccctcgcgcgccaacaagctctacgagctcttttgcaagtacgactccttcgactccatgcctcctgccgagctcgagcgcatcgagaagcgtatcttcaagcgcgcactccaggaggtctgggaggagaccaaggacttttacattaacggtctcaagaacccggagaagatccagcgcgccgagcacgaccccaagctcaagatgtcgctctgcttccgctggtaccttggtcttgccagccgctgggccaacatgggcgccccggaccgcgtcatggactaccaggtctggtgtggcccggccattggcgccttcaacgacttcatcaagggcacctacctcgaccccgctgtctccaacgagtacccctgtgtcgtccagatcaacctgcaaatcctccgtggtgcctgctacctgcgccgtctcaacgccctgcgcaacgacccgcgcattgacctcgagaccgaggatgctgcctttgtctacgagcccaccaacgcgctctaagaaagtgaaccttgtcctaacccgacagcgaatggcgggagggggcgggctaaaagatcgtattacatagtatttttcccctactctttgtg

SEQ ID NO: 29126 - DNA, 1094 bp, Schizochytrium aggregatum
  Clone ID: LIB81-021-A4_FLI
caagatgggcctcgagctcgccaaggacgtctcggtcaagtcgatctgcttcggtccctgggacggtggcatggtgacgccgcagctcaagaagcagttccaggagatgggcgtgcagatcatcccccgcgagggcggcgctgataccgtggcgcgcatcgtgctcggctcctcgccggctgagatccttgtcggcaactggcgcaccccgtccaagaaggtcggctcggacaccatcaccctgcaccgcaagatttccgccaagtccaaccccttcctcgaggaccacgtcatccagggccgccgcgtgctgcccatgacgctggccattggctcgctcgcggagacctgcctcggcctcttccccggctactcgctctgggccattgacgacgcccagctcttcaagggtgtcactgtcgacggcgacgtcaactgcgaggtgaccctcaccccgtcgacggcgccctcgggccgcgtcaacgtccaggccacgctcaagaccttttccagcggcaagctggtcccggcctaccgcgccgtcatcgtgctctccaaccagggcgcgcccccggccaacgccaccatgcagccgccctcgctcgatgccgatccggcgctccagggctccgtctacgacggcaagaccctcttccacggcccggccttccgcggcatcgatgacgtgctctcgtgcaccaagagccagcttgtggccaagtgcagcgctgtccccggctccgacgccgctcgcggcgagtttgccacggacactgacgcccatgaccccttcgtgaacgacctggcctttcaggccatgctcgtctgggtgcgccgcacgctcggccaggctgcgctccccaactcgatccagcgcatcgtccagcaccgcccggtcccgcaggacaagcccttctacattaccctccgctccaaccagtcgggcggtcactcccagcacaagcacgcccttcagttccacaacgagcagggcgatctcttcattgatgtccaggcttcggtcatcgccacggacagccttgccttctaaatctaaactagtgaatcgcgacaagttgtctttttgttactct

SEQ ID NO: 29127 - DNA, 3209 bp, Schizochytrium aggregatum
  Clone ID: LIB81-045-C6_FLI
cccgcgctgcctcaagatgcgccgcgattggagctcccctgctggcagccgctacgcgcctgagccgctcgccagcgaccgcgtcgccttcatgtacggcgaaggtcgcagcccttactacggcatcacccaagacattcaccgcatttggcccgaactccacgaggtcatcaacgaaaagacgaaccgtctctgggccgaaggcgaccgctgggtcatgccgcgcgccagcttcaagtcggagctcgagagccagcagcaagagtttgatcgcaacatgattgaaatgttccgtcttggaatcctcacctcaattgccttcaccaatctggcgcgcgacgttctcaacatcacgcccaaggccgcctttggcctcagtcttggcgagatttccatgatttttgccttttccaagaagaacggtctcatctccgaccagctcaccaaggatcttcgcgagtccgacgtgtggaacaaggctctggccgttgaatttaatgcgctgcgcgaggcctggggcattccacagagtgtccccaaggacgagttctggcaaggctacattgtgcgcggcaccaagcaggatatcgaggcggccatcgccccggacagcaagtacgtgcgcctcaccatcatcaatgatgccaacaccgccctcattagcggcaagcccgacgcctgcaaggctgcgatcgcgcgtctcggtggcaacattcctgcgcttcccgtgacccagggcatgtgcggccactgccccgaggtgggaccttataccaaggatatcgccaagatccatgccaaccttgagttccccgttgtcgacggccttgacctctggaccacaatcaaccagaagcgcctcgtgccacgcgccacgggcgccaaggacgaatgggccccttcttcctttggcgagtacgccggccagctctacgagaagcaggctaacttcccccaaatcgtcgagaccatttacaagcaaaactacgacgtctttgtcgaggttgggcccaacaaccaccgtagcaccgcagtgcgcaccacgcttggtccccagcgcaaccaccttgctggcgccatcgacaagcagaacgaggatgcttggacgaccatcgtcaagcttgtggcttcgctcaaggcccaccttgttcctggcgtcacgatctcgccgctgtaccactccaagcttgtggcggaggctgaggcttgctacgctgcgctctgcaagggtgaaaagcccaagaagaacaagtttgtgcgcaagattcagctcaacggtcgcttcaacagcaaggcggaccccatctcctcggccgatcttgccagctttccgcctgcggaccctgccattgaagccgccatctcgagccgcatcatgaagcctgtcgctcccaagttctacgcgcgtctcaacattgacgagcaggacgagacccgagatccgatcctcaacaaggacaacgcgccgtcttcttcttcttcttcttcttcttcttcttcttcttcttcttctccgtcgcctgctccttcggcccccgtgcaaaagaaggctgctcccgccgcggagaccaaggctgttgcttcggctgacgcacttcgcagtgccctgctcgatctcgacagtatgcttgcgctgagctctgccagtgcctccggcaaccttgttgagactgcgcctagcgacgcctcggtcattgtgccgccctgcaacattgcggatctcggcagccgcgccttcatgaaaacgtacggtgtttcggcgcctctgtacacgggcgccatggccaagggcattgcctctgcggacctcgtcattgccgccggccgccagggcatccttgcgtcctttggcgccggcggacttcccatgcaggttgtgcgtgagtccatcgaaaagattcaggccgccctgcccaatggcccgtacgctgtcaaccttatccattctccctttgacagcaacctcgaaaagggcaatgtcgatctcttcctcgagaagggtgtcacctttgtcgaggcctcggcctttatgacgctcaccccgcaggtcgtgcggtaccgcgcggctggcctcacgcgcaacgccgacggctcggtcaacatccgcaaccgtatcattggcaaggtctcgcgcaccgagctcgccgagatgttcatgcgtcctgcgcccgagcaccttcttcagaagctcattgcttccggcgagatcaaccaggagcaggccgagctcgcccgccgtgttcccgtcgctgacgacatcgcggtcgaagctgactcgggtggccacaccgacaaccgccccatccacgtcattctgcccctcatcatcaaccttcgcgaccgccttcaccgcgagtgcggctacccggccaaccttcgcgtccgtgtgggcgccggcggtggcattgggtgcccccaggcggcgctggccaccttcaacatgggtgcctcctttattgtcaccggcaccgtgaaccaggtcgccaagcagtcgggcacgtgcgacaatgtgcgcaagcagctcgcgaaggccacttactcggacgtatgcatggccccggctgccgacatgttcgaggaaggcgtcaagcttcaggtcctcaagaagggaaccatgtttccctcgcgcgccaacaagctctacgagctcttttgcaagtacgactcgttcgagtccatgccccccgcagagcttgcgcgcgtcgagaagcgcatcttcagccgcgcgctcgaagaggtctgggacgagaccaaaaacttttacattaaccgtcttcacaacccggagaagatccagcgcgccgagcgcgaccccaagctcaagatgtcgctgtgctttcgctggtacctgagcctggcgagccgctgggccaacactggagcttccgatcgcgtcatggactaccaggtctggtgcggtcctgccattggttccttcaacgatttcatcaagggaacttaccttgatccggccgtcgcaaacgagtacccgtgcgtcgttcagattaacaagcagatccttcgtggagcgtgcttcttgcgccgtctcgaaattctgcgcaacgcacgcctttccgatggcgctgccgctcttgtggccagcatcgatgacacatacgtcccggccgagaagctgtaagtaagctctcatatatgttagttgcgtgagaccgacacgaagataatatcacatacgcttttgtttgttc

SEQ ID NO: 29128 - DNA, 1346 bp, Brassica napus
  Clone ID: LIB82-006-G2_FLI
cgcaaagtaacacatcgatcaaactttagttaaaacctagttggtttaatatggtgatggggccttcttcgttggatgagatcagaaaggcacagagagcagacggtcctgcaggcatcttagcgataggtacggccaaccctgcgaaccatgtgctccaagctgagtatccagactactacttccgcatcaccaacagtgaacacatgaccgaccttaaggagaagttcaagcgcatgtgcgataagtcgaccataagaaaacgccacatgcacttgaccgaggagttcttgaaagagaaccctaacatgtgcgcctacatggctccttctctcgacgctagacaagacctcgtggtggttgaagtccctaagctaggcaaagatgcagcagtgaaggccatcaaggagtggggtcagcctaagtcaaagatcacacacgttgtcttctgcaccacctctggagttgacatgcctggtgctgactaccagctcaccaagctccttggccttcgcccttccgtgaagcgtctcatgatgtaccagcaaggttgcttcgccggcggcactgtcctccgtctcgccaaggacctcgctgagaacaaccgtggcgcacgtgtcctcgtggtctgctctgagatcacagccgtcaccttccgtggcccttctgacacccaccttgactcactcgtgggacaagctctcttcagcgacggtgcagccgcgctcattgtcggctcggaccctgatgtctctgctggagagaagcccatcttcgagatggtgtctgctgctcagaccatcctcccagactcggacggtgccatagatggacacttaagggaagtgggactcaccttccatctcctcaaggacgtccccggactcatctccaagaacattgagaagagtctagacgaagcgtttaaacccttagggataagtgactggaactccctcttctggatagctcaccctggtggtccagcgatccttgacgacgttgagaagaagctaggactcaaggcagagaagatgagagccacgcgtcacgtgttgagcgagtatggaaacatgtctagcgcctgtgtcctctttatattggatgagatgaggaggaagtctaaggaagatggtgtggccacgacaggtgaagggttagaatggggtgtcttgtttgggttcggaccaggtctcaccgtggagacagttgtcctacacagcgttcctgtctaaacagaaagctctcttcctataaatgcctacctacctttcacatacttaccatcatatcatgtctttatgttttttttttcaatttaagataatatttgtaatgcaataatt

SEQ ID NO: 29129 - DNA, 1062 bp, Brassica napus
  Clone ID: LIB82-020-E9_FLI
ctccgcgcccatctcagctttgcttcctccggtgaggcgtttaaaatggcggcagccttacctttatctccggttagccatcagttatgtcggataagcaacaggttctggtataacgctatgactccccggttctgttcgccagtttcttcgccctgttacatcggcgtgaaaggaatcggctcgtcgagtcagttacgggctcgccaccctctgatctcttcagcggcttcgactgattatctattgcatgacgtcggagccacggtggcagttcttagtggtgcctacgcgcttgtcttactcttcgagagtctcacgaagcgagacgtgattccacagagattgagcagaaagcttgtgcatatactctcaggtctgcttttcgcgctctcgtggccaatcttcagcgcatcaacggaggctcgatactttgctgcttttgttcctttagtgaatggcctaaggcttgttgtcaacggtttgtccgtctcccctaactccacgctaatccaatccgtaactagggaaggaagaccagaagagttgcttaaaggtccattgttctacgttctagcccttctagttgctgcagttttcttctggagagattctcctaccggtatgatatcgctggcaatgatgtgtggtggcgacggaatagctgatatcatgggacgtaagtacggatcatacaagataccttacaacccaagaaagagcttggcgggaagcatctccatgttcatattcggcttcttcatctccatcggattactttactattactcaagcctagggtatcttcacatgaactgggaaacaacctttacgagagtcgcgattgtctcattggtcgctacgttggtggagtcactacccatcaccgatcaaatagacgacaacgtttcggttcctctggctactattttggctgcttacctaagttttggatattagactcatccctcataaactgtataagttgtatttgtatgaatacgacctgggaatgcagctacgaatatgctaccagttgtatatattttactgttactgctc

SEQ ID NO: 29130 - DNA, 2012 bp, Zea mays
  Clone ID: LIB83-001-B4_FLI
aatggaggtgatgacttggatgaggatattgccagtccagctagtggagcaagaaagaagagggcgtgcaacactagtactgcaacaagtccattgaagagaggacaaagccctatgttgaagattatgaggggcatgtggggaactttgcagtctaatagtgttgctgcaaaaagggtcctagagggagaattaaggacagagtcaatcaagaaggcgatgaatctggttaaggaatgtggtgcacctgaaggaagtgttgagcattacatggctacaaaattgttcgtgaaagctgaaaaccgagatatgttctttacttttgaatcaaatgaaggaagattgtcttggttaaagagaaattgtcaggactatgggttgtcttgagttggtagtagtcatgagtgtgtctgcctatctactgtcatggaccttttatgtattgatgtcgtgaacattctatgtgtgtctgctgtcacaaaccttttatgtactgctgtcataaacctactatcatgaaccttttatgaatcttctatgtgtttcaaatcatatgtatgtgccttgaatgattaagtttgttgatctcttattattgtctatgtagattgattttttcccaaatgatgaggatgagacagatggcatagttgaggtggctcttggtgaacttgagatgatggaacaatatggtgccttcatgtctacatttggtatgtactatgatgctaccttctttaataaaagaagtcgtagggaacctcaagtcactggatatgattgggtagtgaggacacttaatgatcctagagagtgctttaatatgtttagaatgagtaagcatatatttgaaagtcttcatgatgtccttgcatcaacatatggattgcggtcaacatgtcagatgagttccatagaagctttagccatgtttttgtggatcattggtgctccacaatcaattagacaagttgccaatcgttttgagaggtcaaaagagacgattagtagaaaatttgaagaagtgttacattgtgtttataagatgtctgctcatatcattaaaccaaaagatccagaattttctattgtgcacccaagagtacaagctccccaattttcaccgcattttgataaatgtattggagctatagatgggacacatgtgcgtgttgttgtcccatcatcaaaggtgctgcaacatatagggcgtcatgggtatacaactcagaatgtattggccatatgtgacttcgatatgaggtttacctttgtggtcgccggatggccagggtcagttcatgatatgagagtgtttaatgatgctctgcgcaaatatggtgacaaatttcctcatcctcctcctggaaaattttatcttgttgactcggggtaccctaaccgtgatggttacctagctccttacaagggaactaagtatcatgtaccagagtttcgacaaggccctagaccaagtgggaagaaggagttattcaatttttgtcactcatctcttcgcaacgtcatcgagcgttcgtttggcgtgttgaagatgaaatggaggatcttgttacacttaccatcgtatccaatggtaaagcaaacaaagattatacttgcgtgcatgacccttcataatttcattagagaaagtgctatggcggacgtggattttgaaatgtgtgacaatgatgagaactatatatcgattcagagcaacaatttgtttgaagaagatggtgatgaagaacaaggcatgaacgctttccgtgacaacattgcaaatgcgttgttcatcatgagagggtgacaagttggagatactatttgtgttcacaaagtagttcagtttgtatcgctatgagacaagtttctctacatttttataaacagatgtacattttcagaatgactgtttttgtttgaaaaaagatgaggttgagatgggcagttgaaatgaacggttgtaaagctgaaattgaatattgattagataaaaaatggttgaaatc

SEQ ID NO: 29131 - DNA, 398 bp, Zea mays
  Clone ID: LIB83-001-B5_FLI
cttatccgcggaggaagaaccttggcccgacaccatgctcccaatggccgtccaccccaccaccacgccggccttgtccccgcgcgcccgcgtctcgccgcacaggcctcccatctcctccctggcggacccctcgtcctccccctgccatcgcatcgtcagtttcaaaagcaggaggctgccacttcgctctctccacatcgccgctgccgctgccgccggggcagaggaagaagaggcgcaactaggtggaagtgtgaacgcggtcgacgaggaggaagcggaggtaatggcctttcgtacccaatagctaggattcgagcaacttacccggctcagtcgctgtcttgtctgtataaccggaaattacgcagttcaaatttaaaatggttatgttt

SEQ ID NO: 29132 - DNA, 729 bp, Zea mays
  Clone ID: LIB83-001-C4_FLI
agaaatcccccaaccaaaccaaaccctcgccgtgccgccgcctccgactcctgctccgtccgagcctaccaccacagggcaagggcttcatccagccgcgtgcgagcctgaccgcccagttagacgatgagccgcagcctcggtatcccggtgaagctgctgcatgaggcggcgggccacgtcgtcacggtcgagctcaagaccggcgaggtctaccgcggctccatggtcgagtgcgaggacaactggaactgccagctcgaaaacatcaccttcacggcaaaggacggcaaggtgtcgcagctggagcacgtcttcatcagggggagcagggtcaggttcatgattatacccgacatgctcaagaacgccccaatgttcaagcgccttgaggccaggattaggggtaaaggctcagctgttggtgtcggccgaggccgcgcggtcgccatgcgggctagggctgctgctggtcgtggcggtggtcctgttggacgaggtggtgcaccccctgtgaggaggtagatctgtcgcgctatgtggcaaatcaagcttttgccctagttgcaaaaactttgcttgagcagcgatgctatatggttgttaagggtagcttatcagcagcagttcatgtttacagcatagatgcaggactttgtgtaactttgcacgagaagactgtggacagtttcgacgatgctatattgctattgagggtctgatttggat

SEQ ID NO: 29133 - DNA, 897 bp, Zea mays
  Clone ID: LIB83-001-C7_FLI
ccagaatttgctgatgcagacgaagaaaagctgtatgattttcttaatattgagctagaaagtgatttaaatctgaaaagaatgcggcactatgaagtagtttatctaattcatgaggaccgtgttgaagaagttgaaaatgttgtatcaaaagtacaagattttatcagggagaagaaaggaaggatatggaggcttaacaattgggggctgcgcaggcttgcttacaaaataaagaaagcaacacatgccaattacattttaatgaactttgagatagagtcaagatacatcaatgacttcaagaccctgctagacaaggatgagaggatcatcagacatctggttatgaaacgggatgaggcaattactgaagattgccctcccccaccagtatttcacactctgcgagctcaacaatattttgatgatgaatatgaagatgagggggaagaggaagaggatgaggatgctaggagtgagccaaagtctgccaattatgatgaggatgatgttgaagctgatgatgagcctgaaattatttatgtcgatgaagctgatgaggataattacgaagacactagaagaaggaacacaaagctaaaggtgaagaagtatacatcagagaaggtattgaggcagcattagtgtatggttttccacttagtttaagtctttttagctcttatagaaaggactatctgtgtctgtatgatgaggaagtttcacttaggtgtttttttctgatgccaaggaccactgcatgataatgagataggtatatgtgctatggttggtacagcccttgtaaatgctttctttagtgcacctttgtttttgtgcaactttattttccaaggaaaccaaaagcttaaatactatattattagtttgaat

SEQ ID NO: 29134 - DNA, 525 bp, Zea mays
  Clone ID: LIB83-001-D4_FLI
ccaatcgaaaactaccccgcgagggccgcgtcgtccgcgatgcggcggcgaaaacgaaggggggcctctttctcttctctcctctcctcctgtggtctctgcagcagagacactgctctgctcgattgctccgttgcgcctgcgcctgcgaccgccttgtcgaggagggggaggagtgtttgttcttgggcggagccggtgcagagggggcgagagagaaagaggtcaaaagagccgcatcgcattcgcatggggcagtgcgcgtcccatccggggccggcggccggcggcggaggcggcgttgcgaggagggggtgcctggcggtgccgcgggagcagcggtcccggttctacatcttccggcgctgcgtggccatgctcatctgctggcgcaagtacaagaagatctgacctcaccacgccctctcgcctgtaatataatcctgtcctgttctgaaccacgctaccctccctcctgtacattttaatccctaatatccatgataatagacgactctactctct

SEQ ID NO: 29135 - DNA, 760 bp, Zea mays
  Clone ID: LIB83-001-F8_FLI
cgcgtcgtggcgccggccccggagctcgccaccgcggccgacccaggcaagacggcgaccaccaccacgacgacgagcgagatcaccacggagactggcgcgctggaggactccgactccctggcgcacctgctgctgcagcccgggacagaggacgcggaggccgtcgcgctcggcctcggcctctccgacttcccctccgccgggaaggcggtgctggacgacgaggactcgttcgtgtggcccgccgcgtcgttcgacatgggcgcgtgctgggccggcgcagggttcgccgacccggaccccgcctgcatcttcctcaacctcccgtgacagccacacacggtcacggcgccgaggcgtacgtcctcctgctctgctctgctctgcgcctgatgatgagtgcaaggaaatggagcgctttgattcttcagctatttgatgcatctgctaattgatttggcagtggtggtaaggtacacgcacgatgagctgactgcgtggttcttggtttgggccttagtatatgatgacgatgacgatgatactagttgtatgtgtgacgtgagagacgatcgcgacgacgaccttgaattttagtttctgagatgaaaaaggtcaactagtggcctctgtatgactttagttttactcatgaactcatcagatggctggctatggctgtggctgtggctgtggctaactcatcgtcaagtgtttctaccggctgcctataaactagactgagctttggtctggt

SEQ ID NO: 29136 - DNA, 494 bp, Zea mays
  Clone ID: LIB83-002-A11_FLI
agctacaaaaagctagaggcaccccaacgcagtgatgatatggaacagtgccatatctgcctaactgaatatgaggatggagaccagatacgaattcttccttgcaagcacgagttccacctgcaatgtgttgacaaatggctgaaagaaatacacagggtgtgccctctgtgccgcggagacgtctgcgaagtcgcctcgtgaagaccttggcgctgccatccctttcctcacggcaccggcagatagcgcatcccccgcctgctccgttgttgaagctggtttggtcaggcaacggcgatcacgtcccgtcaatctgggcgtccctgccgaagagcgtggccagatcctgcgaccaatgcgtcgctgttcctgccatcaactttttaagataccgagactgtatatagctcttgtagcctctccgtgtatgacaacctgtacatatatatgtaaattctagattccaatgtccattattttgtcctacattc

SEQ ID NO: 29137 - DNA, 979 bp, Zea mays
  Clone ID: LIB83-002-B10_FLI
atttttttaaccaagtctgaaaattcgctcccgataggaatggaacccaggatttggaggtgctactcggaagtccttaaccgctaggctagaggccctttcgctggacaaagaataatgcgacatctttagtatgctgtgctgtgccttagctaactcgttaaaatgagcaatgcagacctgaggcaccgttgattcttaaatggctattgttgattgactgttctaaattttacttccatgattcttgtgagttcttaaatttggcattttttccttgcttccctgtagactccaagatgtggctgggtatggagttgccttggcagtaaaggatatctacgctgatgcctttggagaaagaaatttggactctgaccttgtggatttgatggtaaaggatggacgacaaggaaaggtgaacggcaaaggttactacatttatgagaagggtgggaagccaaagccagatcctagtgttaagcatgttatcgaggagtaccgaaagcacgcaaacacaatgcctggtggaaagcctgttactttaacggatcaagatattttggagatgattttcttcccagttgtgaatgaggcatgcagggttatggatgaaaatgttgtaattcgagcttctgatcttgatattgcttctgttcttggaatgggctttcctaaatacaggggtggtcttgtcttctgggctgacactgttggagcaccttacatacattctaagctaagcaagtgggctgaaatttatggccccttcttcaaaccatcatcatatttggaacagcgagctaagagtggtgtaccattgagcgcaccaggagcttcgcagcaaggttcggcgaggtcacgcatgtgaggtgctgtccagcattgagcagaaataatgcagaatacttgcgggatgagccattgacggctgcttcgctgattaaaacacctccgtgaacacaaacatgaggcgcag

SEQ ID NO: 29138 - DNA, 950 bp, Zea mays
  Clone ID: LIB83-002-B9_FLI
gcagtgacccgcaggcgcagctgccaattgcaagcatgtgcgggagtaagaaatccgtagcctacttcgcccacgaccgggcgcaccggctgctccccattgccggcggcgacgacttcacctgcggcgggtgcctggtcgctggcgccggcccgcggtaccggtgcgcccacccgggctgcagctttaccgtccacgaggcgtgcgcgcgccgctccccgaggacgctcaggtccgccgtgcacccgctgcacaggctgaggcggcgcgaggccgcgggagccgacggcagcggcggcggcggcgggtgcgaggtgtgcggcgaggccgtggagcgcgcgtgctacgcctgcgtcgcgtgcggggtcgccgtgcacccgctgtgcgcgcggatgcccgggtcggcgcggggccccgcgcacccggacgacggccacgaggcgtggctggtccgagtcgcgtcgccgccggacgacggcgatggcaagcagaagcagaagcaggcggcggggtgcggctcgtgcggccgggccctgggcgcgtggcggtaccgctgcgtgacgtgcgccgcggagttgcacccccgctgcctggtgccggcggtagaccagtgccgcggcgccggcgagggcgaggccgggcgcgcgggttccgcggccagtagctgctgcttggggctggtgcacgacctgacgcgctgcttggccacgctgggcaccgccctccactaccgtggttactacaatggttgacgttgtaacgcgggaagcttggaaattatgcgtgcatagccatagcatcggcactctggagatggatctcccagctctgaatatgatcgagtgcaaaacagtagcagtactaccaacctgttccttgtttgctcacccttgccatgtctgtcgtccttgtcctgatgagttatcatgaaaaagctcaagatggccacc

SEQ ID NO: 29139 - DNA, 1037 bp, Zea mays
  Clone ID: LIB83-002-E8_FLI
gcaaccggtccagcactttcacgctcagctccagcaatggctgcctccaccatggcgatctcctccacggcgatggccggcacccccatcaaggtgggctccttcggcgagggccgcatcaccatgcgcaagaccgtgggcaagcccaaggtggcggcgtccggcagcccctggtacggccccgaccgcgtcaagtacctcggccccttctccggcgagcccccgagctacctcaccggcgagttccccggcgactacggatgggacaccgccgggctgtccgccgaccccgagaccttcgccaagaaccgcgagctggaggtgatccactcccgctgggccatgctcggcgcgctcggctgcgtcttccccgagctgctctcccgcaacggcgtcaagttcggcgaggccgtctggttcaaggccggctcccagatcttcagcgagggcgggctggactacctcggcaaccccagcctgatccacgcgcagagcatcctcgccatctgggcctgccaggtcgtgctcatgggtgccgtcgagggctaccgcattgccggcgggccgctcggcgaggtcgtcgacccgctgtaccctggcggcagcttcgaccccctcggcctggccgacgaccccgaggccttcgccgagctcaaggtgaaggagctcaagaacggccgcctcgccatgttttccatgttcggcttcttcgtccaggccatcgtcaccggcaagggcccgctcgagaacctcgctgaccacatcgctgacccagtcaacgcatgggcctacgccaccaacttcgtccccggcaactaagctcaacggctatgctatgcaacttcattgtctttcggatcggagagggtgtacgtacgtggattgattgatgctgcgagatgcatgtgtgtcttttgtttcacgttgcattgcataggcaagtcgagatgatgagttggcgttgtacactaagatgaaccatgtttgtgcaatagtggtggtttttgtttcctgctggttaattgttgatatccatt

SEQ ID NO: 29140 - DNA, 174 bp, Zea mays
  Clone ID: LIB83-002-F4_FLI
attttgcagtaataaaaatctatcaacgcggatggtactctgttgtttatagtccctgctgctaaccacccttgttgctggtgctgctggagaggcattgtacctgtccatgcatatatgatatatatgttgtaacgttgtgaaagcaaacaatcttgggtaccaatgtttgtt

SEQ ID NO: 29141 - DNA, 477 bp, Zea mays
  Clone ID: LIB83-003-A12_FLI
gtctccacagcaaccagcacacatttccctttggcggatcgaaggaaggaaggaaggaggagatgggtggcggcatggaggtgcacaaaaaccggtggatcgaagagtggaacgccggccgcgagaacctcgagttcaatttccgctggacccgccgcagcctcgccgtcgtcggcctcttcggcctcgctgtccccatcctcgtctacaagggcatcgtccgcgaattccatatgcaggacgaggatgcaggccggccatacaggaagttcctgtaagcggcgtccagggccgcaggagacgtcgatccctcgaccggggctgcgaggaggggagtttccattcagtttgtgtcggtattgttttagtctgaatctgatggagcagtttggaatgctgaactattgtgcctgatccaaatgaataaggtgtaatgactcgtcttttcaattactgaaactgaacatgtttgaattt

SEQ ID NO: 29142 - DNA, 1032 bp, Zea mays
  Clone ID: LIB83-003-F10_FLI
ggaaagtccaagcatcatagagttaccactgagcatggtgtcgaggcatcttccatgcatgacatcaaatctagtacttttggtggtactgacagtgggatggtctggcatataccaaaggctcatctaggtagtgtcacaaaggtaacgaccatcccaaataccagcttgttcttaaccggaagcaaagatggagatgtgaaactttgggatgctaaaaactcccagctagtctttcactgaaaaaaggtgtgccgttcatgcatctttgtccagtgaaagactagctggggctttggcggtgttgttagagctgctgtaacagatctccaggtgttgcctaatggtttcgtttcatgtggaggtgatggttctgtgaagcttgttcagataaaagatgatctcgctgcagcatatcagcgttaaaacaagcaaagagggaagaagacatgctagaaaatgcgatggatgcagttggtcacttgatatcattctattttgctttgctcattatacttttgagatgctttactcctttcaggggtggtatagcaaggaggaagctatgatttaagagcactagagcagacatctaggcaatttgacatcagcatttatacgtcgagtttttatacgagcctggtttgtggctagtcaaactgccctcagtggtttttttgaggcctgaattttcgcactttggacagggcaatgcggaccataattttttgtacatctgtacagtcaaatatcttgttttgttggccaggatgttgatggagggtgtaaagttgtaagctagaagtagggagataccaagctacaatacctttttgttacttaatacaaaagtgctgggtttagggttaatgtacaatggcagagcaaatggaccaaacaaatattgtatttggtacgggagtatgtatgcggtttgtcaaggggaccgcagtagttcatcattcaaaacaatattttgcattattttgtactgtagatttcactgtttctatagtgaagtttgaatatgag

SEQ ID NO: 29143 - DNA, 1219 bp, Zea mays
  Clone ID: LIB83-004-D7_FLI
gtgcccgttcttttcgcgtttcacggcggcgcggacagagagccatcggcggcgcactgaccgccggcgaagggtacagagatgaagacggttagcctcggcgcctctaggccttccactgtcaacttccgcatgccgacgagggacaacctcgtgcctatacgcgtcgacgtcgaggtggacggccagcgctacagggacgccttcacctggaacccgcgagatcccgactcggagataatcagcttcgctaagcggacggccaaggacctcaagctgccggccaatttcgtcccccagatgctccagtccatccaggggcaacttgcggagttccgctcctacgaggggcaagagatgcaaatcaaagagaagattgtgcctctgaagattgacctccgagtgaacaacactgtaattagggaccagttcttatgggatatcggcaaccttgatagtgaccctgaagaatttgcgaggacgctgtgtgatgatttgaacattacagaccctgaagttgggcctgcaatagctgtttccatccgtgagcagctttatgagattgctagtcagagcgtctctgttatgagagagaagcaaatgtcaaagaagggaaggcgagcaccagaattttcttcaaatagtaaagccgtgaacaatgcagtggatttgttcaagtattttggcagcaaagggagcgtcatccggaaaaggaaggaatggtacctgtatgagcctgttgttgatgtggtagctaatgacgaagacgggaaagaggaggctaataattctagcaggccgaagaaaagagccgacgaagagaaagctgcaagccttcagtccctttgaacacaagctgctgatagttctaaccaaggagggtttctcttgccaatcccagcagatgcctgcctttgacattcgtcgtaggatggcttcatcatagctacatatttgtatgtaagcggtgtgagaggtgttattcctgatgagggtcgggtgctgccctgtcacctagtctgacgacacccgtccagtactccagttgttgtatttgtatattcagttggctttgctgctcttgtttttacgatgcatgtccaaagctaaaggaagcctttgaactgaatacccttggaagaacagtggcacatgtaatctcaggtagcattgcaagcgtccgctgccgcctgctggtcagcaatagaaacaataatat

SEQ ID NO: 29144 - DNA, 673 bp, Zea mays
  Clone ID: LIB83-004-F4_FLI
gacagtatcatcagtggactgaacaacctttcaagcaatgtcagcgaagttctcaagctagatgctggaatgaaggagcttgcctcttcgctgatcgactcagagtcgctcctcgtgttcggaaggggttacaactacgccaccgcgctggagggcgccctgaaggtcaaggaggtggcgctgatgcacagcgagggcatgctcgctggcgagatgaagcacgggccgctggccctcgtggacgagaacctccccatcattgtcattgcgacccgcgacgcgtgcttcagcaagcagcagtcggtgatccaacagctcctctcgcgcagggggcgcctgatagtgatgtgctctaggggagatgccgcggctgtgtgccctagcggtgggtcgtgcagagtcattgaagttccacaggttgcagactgtctccagccagtgatcaacataattccattacagttgctcgcgtaccatctgactgttctccggggattcgacgtggaccaaccaaggaatctggcgaagagcgtgaccacgcagtagggagaggtagatgagatgtttgtattgtagttaattgtccttgctcttgaggtggctagtacgtagcataaatattatggtgcgttaaacttgttgttttgtgaacgaaatgtacctctcttttttt

SEQ ID NO: 29145 - DNA, 953 bp, Zea mays
  Clone ID: LIB83-005-C1_FLI
caccaaatggcgctagaccacggcgccgagcatatcttcctctttccctaccgaccgagagggagatgagcggtggcgtgcggagggtcctggaggcgtggaggctcggcgtggtgaagtacggcgaagcgctccagttgcaggagcgtctcgtcgcggaccgcaaggccggccgcgtcggcgacctcgttctgtcgctgcagcacccgccgacctacaccctgggcaagcggcgcgagaaggcggagcggaacctgctcgcgccggaggccgacctgcgcgccctgggcgccgagatccaccgcacggagcgcggcggcgacgtcacgttccacggcccccggcaagccgtgctgtacccgctcctctcgctccgcaccttggggcttggcgcgcggaggtacgtcgaggggctcgagtccgcgatgatccaggtcgcggcgctgcacggcgtctccgcgaggcccggggaccccggcgagaccggggtgtgggtcggggaccgcaaaatcggcgccatcggggtcaggatctcctccgggttcacgtggcacggtctggcatttaacattgaccccgacctggagtacttcgagcacataatgccatgcggcatcgccggcaagggggtgacgtcgctgcggcgggaggtgggggacggagcggagctcccggccgacggggtcatccacgaccagctcgtggggtgcttggcgacaactttgggttttactgatgtggaattcaaggacgattctgagcgtggagacctgatcggagttacagcttcacagtattgacgcctgattcagttttgcgttagaacgtcctgtaatcaaatttcggaatgttttttttatcttcatcagatacgtcctgtgatccatttttgaagcacagcttgtccaggaaaggcacaacttacattgtttttagaattcgaatcgtcagtg

SEQ ID NO: 29146 - DNA, 2271 bp, Zea mays
  Clone ID: LIB83-005-C10_FLI
ggctggtgatgctctgggcgccaagtgtgtacatcttgctcctcgcaaggctcattgatgggttcggtatcggtttggcggtcacacttgttcctctctacatctccgagactgcgccgacagacattcgtgggttgttgaacacgttgccgcagttcagtgggtcaggagggatgttcctctcctactgcatggtgtttgggatgtccctcatgcccaaacctgattggaggctcatgcttggagttctgtcgatcccgtcacttatttactttggactgactgtcttctacttgcctgaatcaccaaggtggcttgtgagcaaaggaaggatggctgaggcgaagagagtgttgcaaaggctgcggggaagagaagatgtctcaggggagatggctcttctagttgaaggtttgggggtcggtaaagatacacgtattgaagaatacataattggtcccgatgatgaacttgctgatgaagggctggctccagatccagagaagatcaaactatatggacctgaagaaggcctatcttgggttgcccgacctgttcggggacaaagtgctcttggaagcgcgttaggtctcatctctcgtcatgggagtatggcggctagtcagggtaagcccctcgtggatcctatggtcactcttttcggaagtgttcatgaaaagatgcctgagatcatggggagcatgaggagcacattgtttcccaactttggcagcatgtttagtgttgccgaccagcagcaggtgaaagctgactgggacgccgagagtcaaagggaaggtgaagattatgcttcggatcatggtggcgatgacattgaggataacctccaaagcccacttatttctcgtcaggcaacaagtgtggaaggaaaggagatcgctgcacctcatggtagcatattgggtgctgtgggaaggagcagtagcttgcagggtggggaggcagtaagcagcatgggcattggcggaggatggcagttggcgtggaaatggaccgagagagagggcgaagatgggcaaaaggaaggtggcttccagcgtatttacttgcatgaggagggcgtacaaggcaacaggggttctatattgtcattaccaggcggggatgttcctcctggtggtgagttcatccaggctgcagctcttgtgagccaaccagctctttactctaaggaactgctggagcaacgtgctgctggtcctgcgatgatgcatccatctgaagcagttactaaaggtccaagatgggccgacctatttgagcctggggtgaagcatgcactgtttgttggcataggaatacagatcctgcaacagtttgctggcatcaacggcgttctctactacactcctcaaattcttgagcaagcaggcgtcggtgttcttctgtcgaacctcggccttaacgcttcttcggcatcaatcctcattagcgccctgacgaccttactgatgctcccaagcatcggcattgcgatgaggctcatggatatgtccggaaggaggtttctcctcctcgcgacgatcccagtcctaatagtcgcgctactcgtcctggtggtgtccaacatcgtggacgtgggggacgtggcgcacgcggcgctctccacggccagcgtcatagtctacttctgcttcttcgtcatggggttcgggcccgtccccaacatcctctgcgcagagatcttccccaccacggtccgcggtgtctgcatcgccatctgcgccctggccttctgggtcggcgacatcatcgtgacgtacactctccccgtgatgctgaacgtcgtcgggctcgccggcgtctttggggtgtacgccgtcgtgtgcgtcctagccctcgcgttcgtgttcatcaaggtgcccgagacgaagggcatgcctctcgaggtcatcaccgagttcttctccgttggggcaaagcaagccaaggaagaggaggaggaggaggaggccagggaaggttgatcacccggacggccggacccagttaccggcaccgcctgtggggatttttgtggtctgcacacttcaccgtggttggtcctgtgatgatgtatttgtgaaaaaaaaactttgggtagggggcagagatgatttggctgtacaatgtgaggcttgattctgccaaaggctggccttcagaactaggaagggtgtctgttatcttcttttgttgcttggagaccttgtgcttgtgttggttggaattttgttgcctatgtaactagtggtgtatgacagttatgct

SEQ ID NO: 29147 - DNA, 859 bp, Zea mays
  Clone ID: LIB83-005-C7_FLI
gtgccagtgccaccatctcgccgtcggcgtcggctcgtcgcctgagagccgaggccacgcaggcacccgggccgggggatgtcggcgccggcggcacaggccgtggtggcgctggctctcgcggccatcctctcgaccccggcgccccaggcggacaccttctccaacgtcccgcccacgctctccgggggcgacgggaagcaagagcggatcaagcaccccaggtcggccaaggcgttgcagtgcacgaccaagtgcgtcggcacctgcatccgcggcggcggcggcgcgcccggcgaggggcccctcaacgtcaggaggcccctcgtggtgttcaaggacggcttccgcagccggcagtactggtgggtactactactacctgcactacagccccctcttcttttcactatagcagatgctaccactgctcgtgggtcaccaaagatgggcaggacggaccctgagacgggccagaggaacaacatgcccaagcccaaagttgttggagcaactgccatggctgcggtgcaggctagatatgggatccggttcttctgccaggcctccagaagcagaacttcagaggcgacaagggtaataaggtacagtaaaccagtcagtaacatataggatccagagacatttgctagcaacaaaatccgagaaaagctgttaagagtgatgcgtagtggtcttgataaccgttaatgcgatgaacgtcaggaccatgatgaacagatacaatgcataaatagcaccatgatgaacttaagtttttatctgggagtaggagttatgtacagtttttcttttaatgaaactcgacaagatgtcgagacggacgaaccgattaagg

SEQ ID NO: 29148 - DNA, 925 bp, Zea mays
  Clone ID: LIB83-005-D1_FLI
cgcaagaaaatctcgcgatttcccctcgcagtctctcgcacgcgccggcatggcgacgctcgcgcggtggcatctacaacctcctactgcccgccccctcgctcgccggcggatcccgcgccgggctgcgaccgtggtttccccgcgcgcgttcagccgcgcggacttcgatggcttcgtgcggcgcgcgtggcagggcgccaacgcgggggccgagcgcttcgccttcgaggcacggcaggccgcgcagcggctggacagcaggttctcgatctcccggaggctcgcagacgcttcccgtgccgcccgcgcccgcgcagttgagatcgacgccgagttcggcatcgggcggcggtggcgctccttctctgtcgacttctcccgcaactggcccaggtatcggagggacatcaatgacttcatgggaactcccatcgggagagcattagctacaatatttttcctgtggttagcactgtcagggtggttgttcagaattttcatttttggcacgtttgtgctgccatttgctgcccctcttctccttgggacctttgctaacagggttgccattgagggaacatgcccagcatgcaaaaggcgtttcgtgggctaccgcaaccaagtgattcggtgcatgagctgccaaaacattgtatggcagccaaataacagcccatctggtggtgctagaagttcacgaagctcggaacctgatgtgattgatgtagaatatgaagagaggtaagaacattctgccccaccctacaccgaaaagcaaaaatcacgtgggcggaagaagaggcaaggcttcagacacaggctgcaccccatgagctatttgtagatttggttgtttgtgtttttctggtgtacatacattacgtgctcctttcgaaataaaatggaaattctggtgttgtgc

SEQ ID NO: 29149 - DNA, 497 bp, Zea mays
  Clone ID: LIB83-005-E7_FLI
cccggttccgcgtgcctttccccacctactctcgcggctctcgccagccagtctagggtttcggtcccggcgtgcttatccgcccccgccggccatgtcgaagcaaggagggaaggccaagccgctgaaggcgcccaaggccgacaagaaggagtacgacgagacggatcttgcatatctgcagaagaagaaagatgaggaaaaagcactgaaggagcttaaggccaaggcacagaagggcgcgattgggggctcgggtctgaagaaaagtggaaagaaatgagactggtcacccgtctccaatacctagaggatgataaggcagctgtctatctgtgttgcgcttcactaagtgtgattgtaacagtggtacctcttgtgttctgtgttccgcgatgttgcagttggttgcttgatcgaaagatgtttcaacctcccatctgctagctatgatacagatggtcccctgataataatgatgacatattctgtgatgg

SEQ ID NO: 29150 - DNA, 2194 bp, Zea mays
  Clone ID: LIB83-005-F5_FLI
ttttactcaccaagcagcagtatagacattgggcatggtgttgtagctatgaaaggaacccagcagacccttaaatacactcagcaagggttgaacctgtgtgttgactattcagttatgccattttacaaagctggaccggtgatggatcttgttcacaaaatagtggggtaccttgattatcgaacaactctgaacaagaggcaaatggaaaatctggttgatgagcttaaaggccgacgtgtaaccgtgattcatcggaggactaatcagaagtacacagtgcaaggcttgacacccttacctgccagccagatgacctttgtggatgctgaatccggacaaacaaagtgtcttgtggagtattatgctcagaaacatggcattgtgattgagtatcagatgctgccatgcttggatttgagcaagagcaaggacaaaccgaatcatgtcccaattgagctctgcactcttcttgaaggacagaggtttccaaaagcaaacttggataagaattctggcaggatactaaaaggaaaggctctaattcctgcatccaatcggaggaaagagattctagacttggtgaatgcttcggatggaccttgcagaggagaaattgcacagcgatttgggatttccttggatttacgaatgacagaagtcacgggtaggatccttcccccaccaaacctcaaactcggggcatccaatggccagacctccaaattcagtatcgatcagaactgccagtggaaccttgtgaagaagagactcgtagagggccgggatcttcagtgttggggcattgtcgacttcagtgctgagccgtctgacccccagcaggagcccctcaatggaaggatgtttattgagaagattgtgaggaagtgctgtgagcttggtatccgtatgaactccaacccatgcttcgtacacaaatcaaagatggcagtgctctccgatccgcatcgactacaggaggagctaaacaaggcaaaacaggctgcagtgagcaagaagcagaggttgcagctccttttctgcccgatgtccgagcagcatccagggtacaagacactgaagctgatttgcgatacacagcttgggatcatgacccagtgtttcctgggcgaccgcgcaaacaagccgaatgggcaggaccagtacatgaccaaccttgccctcaagataaacggcaagcttgggggcagcaacgtccagctgttcgactcgctcccacgggtcggtggggcacctttcatgttcatcggtgctgacgtgaaccacccgtcaccggggaacgtggagagcccatcgattgcagccgtggttgcgtctatcaactccggtgtcagcaagtacgtgacaaggatccgtgcccagccgcaccgctgtgaggtgatccagcagctcggcgagatctgcctggagctcatcggagtcttcgagaagcgaaaccgcgtgaagccgcagaagatcatctacttccgcgacggcgtgagcgacgggcagttcgacatggtcctgaacgaggagctggcggacctggagaaggcgatcaaggtgggcggctacgcgccgaccgtcaccgtgatcgtggccaagaagcggcaccacacgcgcctgttccccaaggaccccagccagccgcagacgaagaacgggaacgtgccgcccggcacggtggtggacacgggcgtggtggacccgtccgcgtacgacttctacctgtgcagccacgccgggatcctgggcacgagcaggccgacgcactactacagcctggtggacgagcacggcttccggtccgacgacctgcagaagctggtctacaacctctgcttcgtgttcgcgcggtgcaccaagcccgtgtcgctggcgacgcccgtctactacgccgacctcgcggcgtaccgtggcaggctctactacgaggcggccatgatgccgtcccactcctccgctgggacttttggcgtcactaacttcccgaggctgcacaaggatgtggagaacaacatgttcttcatctgacaccagtattttcttttgtgtgtacgcgtcttgccttttcttttgtgtggttatcagtttttaaaaaaaacttcaagtacactgcagtgtgcaaagttcgtactggatatacactgcatgactgtagatgaaggaaaagaagcaggtttgagttgtg

SEQ ID NO: 29151 - DNA, 388 bp, Zea mays
  Clone ID: LIB83-005-G6_FLI
gcgactaggagagagcctggtgacatactacaaccaaccccttattgctggtttgttgtcattcgtggctaggacactgaactcatactggggaacacagcaatgggttgatcttgcgcggtacactgggttacagagaagcgaggaaaagcctcctgctgaggccactatgccacctgattcagcacatttggagggttgtacgacggaaggacatgattttgatgacagcagcaataacaccaacaaatcgactggtccgagctagtgatttgattacttcacagtggctgcagatcacatggcctattttcatagacaatgaaagtggctgccttcctgctcttgggatcacaaggaagcggaaatttgaggaaatattagtcac

SEQ ID NO: 29152 - DNA, 1151 bp, Zea mays
  Clone ID: LIB83-005-G9_FLI
gcgtggaggaggctcatcaagcacaagcacgccacgcgatccacacacggcaagcaacgcccagggctcgtgctcgccccgcgacccgcgaaagatctgtgctggttcgctcgctcgctcgcgccgcgccgccgcgtgggggtgccgatgagctgcgcggggcaggccggcgggtggctgctcgactacgcgctggtggaggaggagatccagggctccgagttcatctacatggtcgacgacccggccgtctccagcgtgatactggggtttgatgctcccaggaaagaggacggcgtccaggacaaccccggcgccaagaagagatcccggccggagtccagcgcgccacccggcaccaaggcttgccgtgagaagctccggcgagacaggctcaacgaaaggttcaacgagctctgtgccatcttggaacccggcaagccacccaaggccgacaaagtcgctatcctaagcgacgctgcccgtctcctgaaccagctgcagggcgaggcccagaagcttaagcaatcgaacgaatcgctccaggagtccatcaagagtcttaaggctgagaagtccgagctgcgagacgagaagacgaggctcaaggctgagaaggagaggttggagcagatgctcaagggcgtcgtcagccacgccgcggtggctgctccggggcccttcgtcccgcaccctgctgcggtcgctccatctttccaccaccacccggcggcgtttgctcaggctggaaagttcgtcccgtaccccagctacccgccgccggctgcgttctggcagtggataccgccgacgtccctcgacacgaccaaggaccccgcacactggccgccggtcgcctagccgacctaccacctcaccgtggcatcattcatcggtgatgcgttgccgtgtgtactgaatttgatcgaagcatgcctgaaaaaagaaaccttggctgctgctcgtgtcaaggacgtgatgtgctgaagttcaggcgatctaggtcggctggagaagtctatgtaacagccataatgctaaagcaatgaaagtgatatattaattgaatcgggctagtgtttcctgaaactacggttatttagacattgcctggaaggctagaacaatgcaaacttgggtaacattgtgac

SEQ ID NO: 29153 - DNA, 1385 bp, Zea mays
  Clone ID: LIB83-005-H11_FLI
cactccaaggtctgcggcacgcgcgagtaccgctgcgactgcggcacgctcttctcgcggagggatagcttcatcacccacagggctttctgcgacgccctcgcgcaggagagcgcccggctgccgcccccaggcctcaccgccagccacctctacggcgccaccaacgcggccaacatggggctcagcctctcgcaggtcggttctcacctcgcatccacactcggtgcggacgctcacggccaccatcaggacctcctccggctcggtggcagcaacgccgcgagccgctttgagcatcttctggggccgtccaatgcctccgcgttccgccccctgccgcctccaccatcgtcggcattcctcatgggcgctccgcaggagtttggcgcaggcgacggcagcgggtcccacgggttcttgcagggcaagccgttccacagtctcatgcatctgccggatctccaaggcaacggcgccgggggtgcctcggcgtcgtcggctacgggtctcttcaaccttggctacatcgcaaacagtgcaaacagctcaggtacttccagccatggccatgcaagccagggacacctgacaagtgatcagttcagcgaaggaggtggcggcggcggctccgagtcatcggccgcgatgcttttcagcggcggcgggaacttcgccggtggtgaccaccaagttgctcctggcgggatgtacaacaatgatccggccgtgatgctgccgcagatgtccgcgacggcgcttctgcagaaggcgtcccagatgggctccagcgcgagcgcgcatggcggcgtgtcgtccgtgtttggggggctcgtgggctcgtcggcgccctcggctaggcacgcccgggcacccatgctcgaccagagccagatgcacctacagagcttgatgagctcgctggctgccggcggcatgttcggcggcgccaacagcggcagcatgattgacccgaggatgtatgacatgaaccaagatgtgaagtttagccagggccgtggtggcgctgagatgacgcgcgacttccttggcgtcggcggcgatggtgtcatgagaggcatgacagtggcgagagcggggcaccaagacggtgccggtgacatgaactccttggaagccgagatgaagtcggcctcgtcgcccttcactggagacaggatgcaataagagttcccaataagagaaccttgtgtgctcgcatagtgagcgagtcctgtgcagcctgccatgcacatgcacccatgggtgtactgaatccattacagcaggttgttatagcgtacactgcacaaggcatgggagtagtataaggttgctgcattccatgcaatgatgcaataaagggtaaagacaggtttgcacct

SEQ ID NO: 29154 - DNA, 743 bp, Zea mays
  Clone ID: LIB83-006-C9_FLI
gccgagctcacgccagtagagatgagggccacgtcgtcccccgtggctgccgccgtcctcgccgccccttcctccgccgccgccgtagtcgtaaagcctctgcctcgtggcgcagcgaatggcggcagcacgggcaggcgcgacgtgcttgccgggaccgggctgggcgcggcgctgctgctggcgctggggcccgtgtgcggcgcggcgcgtgcggcggacgaggaatacgtgagcgagacgaaggaggtgatcgggaaggtgcggtcgacgatcaacctggacaagtcggacccgagcgtggcggacgcggtggcggagctccgggagctgtccaactcgtgggtggccaagtaccggcgggagaagtcgctgctggggcggccgtcgttccgggagatgtactcggcgctcaacgccgtgtcgggccattacatcagcttcggccccacggcgcccatcccggccaagcgccgcgcgcgcatcctcgaggagatggacaccgccgagaaggcgctcctccgcggcaggtaggccaaatcccagcgaagcccggccatggcgatcgccgtcgccgtggtggcaggaacgcagctctcagcgacaacgctaccattttgtaactactgcggtgtagtatatatatgcatgcattcgtacgtgatgcgagctgtgttttcggtccgatgggagcgcgtcctgtgactgtgactggagtaaaaatttaccgagcttctgagagt

SEQ ID NO: 29155 - DNA, 1199 bp, Zea mays
  Clone ID: LIB83-006-E4_FLI
ggagagtgtagcgagcggcgttcagctcaccgggggctgctgggtgagtgagggagctagcgtcgtcgtgagagcgctccacgatgattacggggacggacttctaccacgtcatgacggccgtggtgccgctgtacgtggcgatgatcctggcctacgggtcggtgcggtggtggcgcatcttctcgccggaccagtgctccgggatcaaccgcttcgtggcgctcttcgcggtgccgttgctgtccttccacttcatctccaccaacaacccctacaccatgaacctgcgcttcatcgccgccgacacgctgcagaagctcatggtgctggccatgctcaccgcgtggagccacctcagccgccggggcagcctggagtggaccatcacgctcttctccctctccacgctgcccaacacgctcgtcatgggcatccccctgctcaagggcatgtacggcgacttctccggcagcctcatggtgcagatcgtcgtgctccagtgcatcatctggtacacgctcatgctcttcatgttcgagtaccgcggcgcgcggatgctcatcaccgagcagttcccggacaacgccggggccatcgcctccatcgtcgtcgacccggacgtggtctccctcgacggccgcagggacgccatcgagacggaggccgaggtcaaggaggacggcaggatacacgtcaccgtgcgccgctccaacgcctcgcgctccgacatctactcccgccgctccatgggcttctccagcaccacgccgcggcccagcaacctgaccaacgccgagatctactcgctgcagtcgtcgcgcaacccgaccccgcggggctccagcttcaaccacaacgacttctactccatggtcggccgcagctccaacttcggcgcggccgacgcgttcggcatccgcaccggcgccacgccgcgcccgtccaactacgaggacgacgcgtccaagcccaagtaccctctccccgtggtgaatgcgacgtccggggcggcggcggcggcggcggctcactaccccgcgccgaacccggccgtggccgcggcgcccaagggcgccaggaaggcggcgacgaacgggcaggccaagggcgaggacctccacatgttcgtctggagctccagcgcgtcgcccgtgtcggacgtcttcggcggtggcgccccggactacaacgacgcc

SEQ ID NO: 29156 - DNA, 819 bp, Zea mays
  Clone ID: LIB83-006-E8_FLI
cagccactactaggaattgccgagcgagcgagcttgcgccgtgcgcgatggagggtgacgagaagtcggcgggcggggcccctgcttactggggcctgggcgcgcggccctgcgacgcgtgcggcgccgaggcggcgcgcctctactgccgcgcggacgcggcgttcctgtgtgccgggtgcgatgcgcgggcgcacggcgccgggtcgcgccacgcgcgggtctggctctgcgaggtctgcgagcacgcgccggcggcggtcacgtgccgcgcggacgctgccgcgctctgcgcctcctgcgacgccgacatccactcggcgaacccgctcgcgcgccgccacgagcgcctccacgtggcacccttcttcggcgcgctggccgacgcgcccaagcccttcgcctcggcggcgccgcccaaagcaaccgacgacgacgggagcaacgaggacgaggcggcgtcgtggctcctccccgagcccgaccacgggcagaaagaaggcgccacgacggaggtgttcttcgcggactccgacccgtacctcgacctcgacttcgcgcgttccatggacgacatcaagaccatcggcgtccagcagagcgggccaccagagctcgacctcgccggcaccaagctcttctactccgatcactccgtgaaccacagtgtgtcatcgtcggaggcagcggttgtgcccgacgcggcgtctggcatggcgcccatggtggcagtggtcagcaggggcctggagcgggaggcgcggctgatgcggtaccgggagaagcgcaagagcaggcggttcgagaagacgatccggt

SEQ ID NO: 29157 - DNA, 1000 bp, Zea mays
  Clone ID: LIB83-006-G4_FLI
ctccgttgcgcctcctccaccttccttttcagcacctgcaccaatccgttgcgctcgtgctcccctctcgtccgccgccagcacccccgcgccgccatgaccacggactcctcggccgcctcgttccagaagatccagatccagcgcgaggacaccacttttgatgcttatgttgttggcaaagaaaatgctcctggaattgtggttttgcaagagtggtggggagttgactatgagataaagaaccatgcgatccacatttcccaacttggtggaggatacaaagcactcattccagatttataccgtggaaaagttgctctggatgttgctgaggcacaacatctgatggagggtctcgactggcagggtgcagtcaaggatatccaggcttcagttaaatggctgaagtcaaatggatcacccaaggttggtgttactggctattgcatgggaggtgctttatcaattgcaagtggagttttagtcccagaggttgatgctgttgttgctttctatgggacaccatcttctgagcttgctgatccttctaaggctaaggctcctatacaggctcatttcggggagcatgacaattttgttggtttttcagatgtcactgcagccaagtccctggaggagaagctcaaatcttccgggatatcatatgaagttcacatataccctggatgttcgcatgccttcatgaacacttcgcctgaggcactcaagaggaagaaggggatgggtctgactgatgagaaccaggaagccgtcgacctggcctggtctcgcttctcttcttggatgggccggttcctcggatctgcttgattatgtgccgcgtgatgatgtgtggagtcaggtcccatgaataaaatagaataaaataaaatgttcagattcaggaaccatgcaaatggactgggctgtacggttctctggctttgcttgtccttctgtttataattatctacctcagtgtgatttccttattttc

SEQ ID NO: 29158 - DNA, 738 bp, Zea mays; identical to SEQ ID NO: 13519
  Clone ID: LIB83-006-G9_FLI

SEQ ID NO: 29159 - DNA, 1199 bp, Zea mays
  Clone ID: LIB83-006-H1_FLI
gtggctggttccttcggacttccctctgaacgacgacgagttcggccagagcagcgctgagagctacggcaacatgctgcagaacaaggctttcggtggtggtacggaccgatctttggttggcaacagactccctccctatgtgtacctccacctggacggcaactatggtttccacgacaaactcttcttctgcgaggacgaccagcagttcctgcgaggtgttccgtggctggtcatgaggacggacatgtacttcgtgccgtccctgttcctcgttccagctttccaggacgagctcggcaggctgtttcctgagaaagacaccgtcttccatcacttggcgcgctatcttttccatccgacaaatggcgtctggtattcggttacaagatgcttcaggtcctacctggccaaagcggaaaaaagggtgggaattcagatcaggatatatgaaaccaaaggtatcttgcagagaaacggcccgttcccacacattctgaaccagatcctctcgtgtgctcaaaacgagaagctgcttccagaaatcagtatggcagagggagcagccgatgggactcggaataaccgaacagcagccgggagtgggactcggaacaaccggacgatcgctgttctaacgacttctctgagcgcttggtacagcgagcagatccaggagaagtacgacgagcagtcggctgttgatggcgtgtctgtcagagtgttccagccgagccacgaggagtaccagaggtcgaggaacaaggggcacaacatgaaggcgcttgctgagatctacctattgagcatgaccgacgtgctgatcaccagtggcttttccacgttcgggtacgctgctcaggggctcgccggcctgaagccgtggatcatgcttaagtcggagaaccacgtgacgccagacccaccgtgcgtccgcgccatgtccatcgagccgtgcttccatcaagctcccttctacgactgcaaggcgaggaaggacaccgatttgggcaaggtagtgccttacgtgaggcactgcgaggacgtgagctgggggctcaagattgtagatcaaactcatttgtagtgtagctgtaatctggtcaggactcacggcagacttgcttgctaactagggcagaactattgttattcttattcttaatctgcgaaacacaaaggaaccatacaaaatg

SEQ ID NO: 29160 - DNA, 1080 bp, Zea mays
  Clone ID: LIB83-006-H11_FLI
aaagacaacatctactgagcatgtgcagcctccaggacaaccagctgccaagagaagaaaaaggagcagagcctcaaacaaaaattcgacagatgagttctcacaaattcgtaaacgggttagatacattttgaaccgaatgaattatgagcaaagcctaattgaagcttatgctagtgaaggctggaaaaatcaaagtttggataagataagacctgagaaggagcttgaacgagccaaatcagaaatcttacgatgcaaattgagaatacgggaagtcttccaaaatattgattctcttctatccaaggggaaaattgacgaatctttatttgattctgaaggagaaatatcttgtgaagatatcttttgtgctacttgtggttcgaaaaatgctacattgggtaatgatatcattctctgtgatggagcttgtgacagagggttccaccagaactgtctaaatcctcctctgcgtactgaagatattcccatgggagatgaaggatggctctgcccagcatgtgattgcaagttagactgtatagatctaataaatgaactccagggcagtgacatctccattgaggacccttgggagaaagtttttccagaggcagctgctatgaccaatggctctaagcaagatgaagcatttgatcttccatctgatgattcggatgacaatgattttgaccccaatatgcctgaagagcatgtggctagtaaggaagaaggatcttctgaagaggaagaggatgatgacggaggatcagactctgacgactctgacttcttaacctgttctgatgatttggaacctttgatagataaaaagaaggttgatgacctgggattaccttctgaagattcagaggatgatgactatgatccagcaggtcctgattcggataaagatgtcgaaaagaagtcaaattctgatgagtctgatttcacgtctgactcggatgatttttgtaaggagattaaaaaatctggtggacatgatgaagtttcatcgcctccattacccgatgtcagggtgggtgatatggaaaagaacactgctcagtctaacac

SEQ ID NO: 29161 - DNA, 1492 bp, Zea mays
  Clone ID: LIB83-007-A12_FLI
tcctccttcccatcaaatctctcctctccatttgcatctcctcctcgtgcgccccgtgcccccatcaaatcgcctcgccccgtgccccctgctcaaaaccctagccctgccgcagccgtcctccatggctgcggatttccgcacccctgaccgcctcctgcccgccgcaactgaggagccgacgaccccgcagggccaccctcccaatccggtgctcagcacccccaccgtccccgacgccacccacgatggcctccgcttctggcagtacatgctcgccggctccgtcgccggcgtcgtcgagcacacggcgatgttccccgtcgacaccctcaagacccacatgcaggccagcacgccgccctgccgcccgacgctatctctgagggcggccttgcgtaacgccgtggctggcgagggcggcgccctcgccctctaccggggacttcccgccatggcgttcggtgcgggccccgcccacgccgtctacttctccgtctacgagttcgccaagtcgtccctcaccgaccgcctcggccccaacaaccccgccgcgcacgctgcctccggggtcgtcgcgaccgtagccagcgacgcggtcttgacgcctatggacaccgtcaagcagcggctgcagctcaccagcagcccctacacgggcgtagggcactgcatccgcaccgtgctgcgcgacgaggggcctagcgccttcttcgtttcctaccggacaaccgtggtcatgaacgcaccctacaccgccgtccactttgccacctacgaggcggccaagcggatgctcggggacatggccgccgaggaggagtcccttgccgtacacgccactgctggggccgcagcaggggcacttgctgctgcggtcaccactcccctcgatgttgtgaagacgcagctacagtgccagggtgtgtgtggctgtgaacgcttctcaagcagctcgataggagacgtgtttagaacaatcataaagcgagatgggtattctgggctcatgaggggatggaagccaagaatgctgttccatgcacctgcagctgcaatatgttggtctacatacgaggcctcaaagtcatttttccaaaggttcaatgaggaaaggcggaaatagtctgggggcattacttttagacccatgtatttttttttcttgaagtcaatgtacttctatacggaagcatactcgctcagctgaatgagaagacgcagctccaggatgcgtttgttggtgatccttgtgcccaagagctgccagcggttgattgagatctgtctaacgaagatctgtctgtgcccctgtattccttttcagataattcgatgtatttatttttcccagcctcggggtgaggaaataacactagaatttttctttttccagtttgatcagtcagcaagcttatctttactgttgtatggcctcctgccgtgtgccagatttttttatataattcaaaggctttggtttcgttgcaac

SEQ ID NO: 29162 - DNA, 749 bp, Zea mays
  Clone ID: LIB83-007-A4_FLI
tcctgcggaagaagtttctaacgggctacatcccaccaccgcacgatgtcggcagcggcgcgagtgctgccgaaggcggtgaccttcgtgacgggcaacgccaagaagctggaggaggtccgcgccatcctcgggtcttccgtcccattccagtcgctcaagctcgacctgcctgaactgcaaggggagccagagtacatatccaaagagaaagcacgaatcgctgcatctcaggtgaatgggcctgtactggtggaggacacctgcctatgttttaatgcgctcaaaggcctaccaggaccctacataaagtggtttcttgagaagattgggcatgaaggtttaaataatctgttaaaagcttatgaagataaatcagcgtttgctatgtgcatcttctctcttgctcttggacctggagaggaaccaatcacatttgttggcaaaactgcgggaaagatcgtgcctgctagaggccctaattattttgggtgggatcctgtgttccagccagatggttttgaacaaacatatgctgagatgcccaagtcagtgaagaacaacatatctcacagagggaaagctcttgctctggtgaaagaacacttcgcatctgctagctatacagttcagagcaacgactcaacttaaagtttgacttggattcctagacgaatgaactgtcattctggaatgtaaactgaactactacttttagtccggtgcctattatacttgcgagttgcgac

SEQ ID NO: 29163 - DNA, 873 bp, Zea mays
  Clone ID: LIB83-007-E2_FLI
ttttgccatggctggtgcatcgctcctctccccatcctgcacgctcctccgcctgattcccagcgcgtcgcacatctgctgctcgtcgcacttcaagagattcgatcgggttcgccggttcgcgcccgccgccatggcgacttcctcaggaccaaaggaggcgccagcgaataaccctgggctccagaccgaggtcgaccccgccaccaaaggctacttcttgcaacaaacgatgttacgtgtgaaggacccaaaagtgagccttgacttctactcacgtgtgatgggcatgtcgttgctgaaaaggttggattttgaagagatgaaattcagtttgtattttctaggttacgaggatgtgaccttagcccctgatgatcatatcaagcggactgaatggacttttaggcaaaaagctactcttgagctcacccacaactggggcacggaaaatgaccctgaattcaaaggttaccataatgggaactcagaccctcgtggttttggtcatataggagtaactgtggatgatgtccacaaggcatgtgaacgctttgaacgtcttggggttgagtttgtgaagaaacctgatgatggaaaaatcaaaggcatcgctttcatcaaagatcctgatggttactggattgaaatatttgaccagacgattgggacggtaacttcttcagcatcatgatgaacagtagtggttccttatatggtgcgcaagatcatacaactctggcataagagcttttcatatgtgtgtctggggtctggactcggattaagggctggaatctgtttacttctagcatcttcttgctttaataatatgcgaactatgttgaggaatgaaataaaataagttcgggt

SEQ ID NO: 29164 - DNA, 695 bp, Zea mays
  Clone ID: LIB83-007-F11_FLI
gtgaggcaggaactgctccatgcaaatcaaattttcgcccaacatccaatgtggccagtcattgcggtcactggaagagctatagaggaaacagctgctgtcgttgtgaggattctccaagacaggatacagaagtactccatgccacgcatatcaaaacggtactaagggcacgtttggtttcattagtctctgtttggtttcagggactaaaagtgttaagaactcattaaattactcataagaatactaaaatgtcctttaccattcttccgccattactcttcttccactgcaatagaaataaataaggggcaaaatgtggaattaatatggtttagtcccttttagtcatcccttgagggactagatactaaagcagtttagtctctattttagtcctactgtttagcaatttggggactaaatgagactaaaatgcaggaaataatctttagtctctgaaaccaaacaaatcctaacattgtgttctatctcttctacaacttgtaatgtgtgcatgttttgttgagctctgtgtcaagcaccatagcctttatgtttttttgtcagaccaccttctaggtggcgtttgtatcttaaaggcaacttgagatttagcacaacagaaacatatgtatattgtatttacgacattctattggccttactttatttggtcgttagtgaattgt

SEQ ID NO: 29165 - DNA, 992 bp, Zea mays
  Clone ID: LIB83-007-F7_FLI
cctggtgaagcagcgggtgtgctccaagattgcgagcgccttaaggaattggtgttgtcccacgatgctatcttcttgttgaccgacacaagagaaagcaggtggcttccaactctcctatgcactaacgaaaacaagattgctatcactgcagcattagggtatgatagttaccttgtcatgcgacatggggctggccctggcataagctgtgaagcttccagtgtggtcactgccatagacaagatgtccacggaggatgcccttgggcgtcaaaggctggggtgttatttctgcaatgacgtcattgctcctgtcgactcagtttccaatcggacactggatcaacaatgtacagtgacacgaccggggttggcctctattgcatcaggacgcgctgcagacctcttcagaagaatgttacaccatcctgatgggatacatgctccaggagagattgctggtacaggcagtggtcatgagcacggccttttacctcaccagatgcgtggatcactatcgcagtacaacatattaaccctgttgggctattcctcgagtaattgcacggcatgctcccatgcggtattgtatcaatatcggaggagagggatggatttcgtgatgcaagtaatcaatgaaccaacctatttggaagacctgaccggcctcacggagttgatgaaatccgcgtcttgctcacaggtcgagtgggtagatgaaattgatgaagacgatttcgtcgaggtctgatatgttacatggttttgacgactggtagatagtatcattctttacaacatggtaaagagatgacgaagcaatcaaagcaaccaccctatatatttgtaactcgctgctagctttttactctgtccgtcttaaaatgtaattcgttttaggctaaacctacattcattaatctgctccgtctcaaaatgtaattcattttaggctaaacctacattcattaatcaggtactcgtgaatgt

SEQ ID NO: 29166 - DNA, 500 bp, Zea mays
  Clone ID: LIB83-008-A11_FLI
cattcgtgctgctccgaccccaccgccacaggctcggcggtccggcgatctcgctcaccggcgggaacatgactacttcaaggcgcctcgctgacaggaagaccgcaaagttccagaagaacatcaccaggaggggttctgtgcctgaaaccactgtcaagaagggaaatgactaccctgttggccctctagtgcttgggttcttcatctttgtcgtcattggatcatcgttgtttcagatcatcaggacggcaaccagcggcggggtggcttgagagagccggcccacatctaatccccagtatagagagttgcttgttatacatgcgtccagctaggattgggtagcagctaaaatgttaaacgtgacaagactgccctgcattccgttcatttggtgggccttgaatctggaactgaaccataaagcagaatcatgtaccttatataaattgttgaatgggtaactggatctcagtgtttcatttagtgtttcattt

SEQ ID NO: 29167 - DNA, 911 bp, Zea mays
  Clone ID: LIB83-008-C11_FLI
gctgcatatatcaccgagcaccctctctctctctgttcccctccctcgctcgacatggaggtcgccgccgccacttgtacgctccttgctgccgtcgccctaccagtttcgtcctcagcagcagcagcacgctctgcgacgaaacagagctactcgaggaggaagacgacggccgtgcgagccgtcatgcgaggccgcatcaggtgccgccgcctgccaccgccaccgccaccacgtaccgcgacaactggttcgacaagctggccatcgggtacctgtcccggaaccttcaagaagcttctgggatgaagaacagaaaggacggctacgagggcctgatagaggcggccctggccatctccgcgctgttcagggttgaccagcagtgggacactgtggccagcgctctccaacgggccttccccagctacatcctcaccatgatcaaggtgatgatgccaccctctcgattctcgcgggagtatttcgccgccttcaccacggtgttcttcccttggctcgtcggaccatgtgaggtcagggaatcccaagtggatggaagggaagagaggaacgtggtctacatacccaaatgcagatttctggaaagcaccaactgtgtcggaatgtgcacgaacctctgcaaaatcccatgccagaggttcatccaggattcacttggcacggctgtctacatgtctcccaattttgaggacatgagctgcgagatgatctttggacagcaaccacctgaagatgatccagcactgaagcagccctgcttccggacaaaatgcatcgcaaagcagaatcatcaagtgaattgctctatttgatttgagaggaagtggatatgtaaattactatactactatcagtggaaattcccaaaattacatgctttcatgttt

SEQ ID NO: 29168 - DNA, 606 bp, Zea mays
  Clone ID: LIB83-008-C6_FLI
tttctgtttgtggtttgtttctcttaattccagttggtgcttatggtgcaaagcaacagtaagtttttctgcgtaagatttgttatttgatttggccgaataacttcgagaaccatacagactaatctgtgtatggtgtgcccgatgatgatagaagtcaaggcttgtttctctacattcgcagttgccgcctaagagctttcgccctgccaggcttgagagctaatgctgctaattccttccttggatgtctgagggcacaataatgccagataattttgctttgaaatctgtttaactgttgttaccctggttttatagttttaattattaaattttattttatttgaaggatttgtaagagtatgcaggctttgtgggaagattttataagaacatgcgaggttcgtttgaagaatttaactggtttctatggataaaagccagcttgtgtggactgtttcatctgcaatctctgtagaagcaaccaacagagtacggattaaaagccaagtgaatagactgtatgatgtaaattctgttgtagatcttcataggtcccattgttaacactataaatatgttaatcctccatgcggctttcct

SEQ ID NO: 29169 - DNA, 403 bp, Zea mays
  Clone ID: LIB83-008-D3_FLI
ggctacggcgatggtttcaagtgggtctcccaatacatcaagtagggcccttgccggggcgcttgctcagcccagcgatttttttgccttgttatttgttctggttggtatttcgtcacgtgaacgatgatcatcatatcatgacagtatcatggaggggtatgaagaggaaaaaacagtgcttaacattggggaacatgttgaatctttagcgtgaaaacattttgttatgtcagtcaaactcctggaattcttttgcttttccgtaggacctttactaaggacttgcctgcgatgcattataagattattgattgcttaaattatgtgttataatatggtggtggattggtactgagtatcggtggttgcgttatcaatgcatgtattcatttgtttgctt

SEQ ID NO: 29170 - DNA, 582 bp, Zea mays
  Clone ID: LIB83-009-C8_FLI
cgaactcgccgttgccattcgcctagggtgaagtccatgtcatctccctgccctggtgcacaccgtcgcgcttctgtgatctgggccaacacacctagccaatggagcccgtccgcatgtcactgttccgcttcccacgccgaggtgggttatcctggaagtttagatgaaggaagtgaagatcaacacgacattactagatgtttgatgaattgtgtggatcggatccgtcattagtttggtacgctaatgatcaaaatgcgaaggccagggtctaggttgatcccaaatggtgcaaaggatggtctactctgagaggcgatgtcggcggaccaatctagcagatgaatcaagtaccaggatggcagatgctcaccaagtgatcgtcatctaacaacactgacttagtgtttattccagacaagccccggtgcatttgccacctctttgctgttttaaaacttttatcactaatatgttgcattaggcggtaggagttaaatgattaaacctttgttacataacttccttgaactattgattatcatccttgataccagatttgaaaagcaagatgtgctt

SEQ ID NO: 29171 - DNA, 483 bp, Zea mays
  Clone ID: LIB83-009-D2_FLI
gcggccgctgaaagatctcattgagtttccacggttcttcagttactccctggaggacaggatagaacctcggcaccgaactttggtggcgaacaggatcaacatgaagctgcgttacatgctgactggttctgatgaagagtttgcgcagagggtgcgagaggctgttgagaggagagcgagatttgaagctggaaaggctgctggtctggagacattctcatgttcttcagagacatctagtgatgcagaagctacagaagcagcagcatgccaaaacagcacggatgtggtcggggttctgcaaaaacaagcatagcattgcttccttaccgtgtgcatgttctaaatgggaaggaaaagattacatatatttcactgtgggtaagaatgcaaaaatgctaatgttgtgacaaaataataaagtagagaatggaatagcaacgtccacgagtaaagtgaaaccctagcgattcgtgcatc

SEQ ID NO: 29172 - DNA, 1697 bp, Zea mays
  Clone ID: LIB83-009-E1_FLI
ctatgacattttggtccttggattcgtggtcctgctctgcggtttgcttggtatccctccatctaatggagtgcttcctcagtctcccatgcacacaaaaagtcttgctgtccttaagaggcagttgctaagcaaaaagatggttgatactgccaaggagagcataggaggaagtgctaccagtttggaaatatatggcaagatggaagaagttttcatcaaaatggatagcgaacagaatactgattctgttgacagggagttgaagaacttcaaggatgctgttctgcaagaaggcgacgaagaagggagattggctagagaatttgaccctcgcaaacatatagaagcccacttgcctgtccgagtgaacgaacagagactgagcaatctgctgcagtccatactggttggtgggtgtgttggagctatgccagtcatcaggatgatacccacatcggtcctctggggttactttgcctacatggccatcgacagtctaccagggaatcagttctgggagaggatacagcttctgttcattacagaaagccgacgctacaaggttcttgaaggtccccatgcatcgtttgtggagtcagtggttcccaaaacagtaaccatcttcacgatcttccagttggtttacctcctaatatgcttcggcataacgtggataccgatagccgggatcctgttcccagtgcctttcttcctcatgatcgtcatcaggcagtatctcctcccaaaattttttgatcccgtcgtcttgagggagctcgatgcagctgagtacgaagaacttgacggggtcccccttgaacacaaactggaagatgaagcatctgaagtaggaagttgtcctagccgtcctgatgcggagatattggatgaactcacgaccaaccgcggagagctgaagcacagaagttctagcctgcgtgaagaaagaccaattcaagtgacagtgagcacgcatatggtactgcaacaagatatgatttgaagatggctcgtcgatttactctctgacctttttttttttcctgctggccttcaataggagccaaccggttgaattttttgggctcttttcttttctctgggataacaagtagtcaagtacgcaccacgcatgtcagtggctgctttccgcctaacataggaagattttcacaggctagttcgagttaagcacattccacgcctttctctttctttttctttccttggagagagagagagggggctttggatttcgagtttattgtttaacagcttcatctccacactacaggttgcttcaagtgcggttcagccaagcctgtgaagacggcgaagtgttctttttatccgtagaattatgatcctcaagctgcactccgttgatgtgaatactgttgctatgtaatgtactgctactactagtgttgtacttgggtttttgacccaaacgcgtctgttggtaaggggtgatttgtaagaacagggacttacgtaaactacgtaggatcgattggtaagaagagagggagagaggagatgcaatacaagtcttcttggatatgaaagggggaatgccgaaggggcatggagtagaataatatcatatattgtcattagttcaaatagactgtagtaaccaagtttgcactctttgactgcaatcgcgtcagtgaagctgacggtgaacggtt

SEQ ID NO: 29173 - DNA, 214 bp, Zea mays
  Clone ID: LIB83-009-E12_FLI
atgtgaataaagttaccatctcattagataagatggtagaacagctgctgatgccttagccactagccagaacagctgttctaccatcttatctaatgagatggtaagcagtatgtgaataaagctggtgttgcttaccttcagtttgtgaatgccattatgtactgtaataaaaaactctgtattgtactccctagcattatcattatgcttt

SEQ ID NO: 29174 - DNA, 1629 bp, Zea mays
  Clone ID: LIB83-011-A8_FLI
agaggaagaagaagaacccagccaaatcctcagtcttcaggctgctcacagctcgtgccgtccactctcccccgaggcagtctcttgcgttcgctgctcgacatggcgctccaggcggcgacgtcctttctcccctcggccctctccgcgcgcaaggaggggtcggtgaaggactcggcgtcgttcttgggtgttcgtctcgcggcggatggcctcaagctggacaccaccgctctgggcctacgcaccgtgagggtgagcaggtcggcggacatccgcgcgcagacggcagcggtgtcctccccgtcagtgacccccgcgtcgccgtctggcaagaagaccctccgcaagggcacggcggtcatcaccggcgcgtcgtccggcctcggcctcgccacggcgaaggccctcgcggagacaggcaagtggcacgtcatcatggcctgccgcgacttcctcaaggcgtcgcgcgcggccaaggcggccggcatggacaaggacagcttcaccgtcgtgcacctggacctcgcctccctggacagcgtccgccagttcgtcaggaacgtgcgccagctggagatgcccatcgacgtggtggtctgcaacgccgccgtgtaccagcccaccgccaaggagccgtcctacaccgccgacggcttcgagatgagcgtcggcgtcaaccacctcggccatttcctcctcgcccgcgagctcctcagcgacctccagtcctccgactacccctctaagcgcctcatcatcgtcggctccatcaccgggaacacgaacacgctggcggggaacgtgcccccgaaggcgaacctgggcgacctgcgcggcctcgccggcggcctcaacggcgttggcagctcggtgatgatcgacggcggggagttcgacggcgccaaggcatacaaggacagcaaggtgtgcaacatgctgacgatgcaggagttccaccgccggtaccacgaggagacgggcgtgaccttcgcgtcgctctacccgggctgcatcgccaccacgggcctgttccgcgagcacatcccgctgttccgcctgctcttcccgccgttccagaagtacatcaccaaggggtacgtctccgaggaggaggccgggaagcggctggcgcaggtggtgagcgaccccagcctgaccaagtccggcgtgtactggagctggaacaagaactccgcgtccttcgagaaccagctctctgaggaggccagcgacgccgacaaggccaagaagctctgggagatcagcgagaagctcgtcggcttggcgtgatgcccaccgtggccggcgccggcagccggcgacagtttttcctacctaggacatgctcattagttggtctcactctcagtcgagtagtcgacgtgtggtgcgcccgtgtcagagtgccaagccaagacagaaagtgagtacaaacgtgtaaaatatgtgctactgcgacgtgatggtttgggcagtggactgtatgtatctctactctctaggcttctgctttgctttgcatatttaattttctgctaataagaggacagcaaatgcctttcgagcttctttactttgtcggcatttagcagattcagatttttcttgaggacatggcacgtgaat

SEQ ID NO: 29175 - DNA, 1338 bp, Zea mays
  Clone ID: LIB83-011-D9_FLI
cgctccatagatttcgccgcaaggggcaacggcacacccaccaactgacctgacccacgagggatccgcagatgaagatcattccggtcccttgcctggatgacaactatgcctacttgtacgaatcagcccgcaccgcttgttttcactactctttcagttgttcgtttcaaatcgttgaattcttgattgctatttgtttcttccgttcgaagaatcgtggacgagagcaccaagaaggcagcggccgttgaccctgtggaaccggagaaggttctcaaggcggccggcgaggtcggcgcctacgtcgactgcgttctcaccacccatcaccactgggatcatgctggtggcaatgagaagatgaggctgcaggtgccagggataaaggtatttggaggatccctggacaatgtgaaaggctgcactgatcaggtggagaatggaatgaagttgtcacttgggaaggacattgagatactatgcctacacacgccttgccacactaaaggtcatatcagctactatgttactagtaaggagggtgaagatccagcggtcttcaccggagataccttgttcattgctgggtgtgggaagttttttgagggttctgcagagcaaatgtatcagtcccttattgttacactgggttcgctgccaaagtcaacccgagtttactgtgggcatgagtatactgtgaagaacctaaaattcatgctgacactggagccagagaatgagaagacgaaacagaaactggaatgggctgaaaagcagcgcgaagcgaatcagccaacagtgccctcgactataggagacgagtttgagataaatactttcatgcgtgttgatctaccagaaatacaggcgaaattcagtgtcaactctccagttgaagcaatgagagaggtcaggaagaccaaggataactggagaggttgaggacacccatggctgccactagtctgttgaaccagcattccgaagtgaactaatgctgaaaccttgccccagtagcgaagctagcaaataatttatcggggtcatcagtattatctactggatctttactatagaacttttgttattaacactgtttttctattagatattcaaaaaattaccggggtcagctgacaccaaaataagggctggctccgcccctgccttgccctgtaggtgggaatgaggtttactgccgtgcaatgctttgataaatgtgttgttgtgaaggagaagactcctacagtaagctccgcgttaatgagtagtaacaatacgctccttgtaacttgtggtctgtttgccaataataatgtacgaactgtagtgcct

SEQ ID NO: 29176 - DNA, 980 bp, Zea mays
  Clone ID: LIB83-012-A2_FLI
gtgcagtctcgccgctccccttcctcccccgcaggaatccgaatcagtaagtccggcgacctaggtctctcggcttgtccgcagcccgccggtcagtaatggcgcaggatgatccggttgtttctgctcagtggctgcacgagcacctagggatgcctgatgttaaggtaaaaaaaaaacatctagtttgcgtgttcatattcacttcagagacacttcagtaatgcttccttcatcgaagaagaaagttcagagatatacttcttctatcccctgcgttactggttttggatgcttcctggtacatgccggtagagaacagggatccatggaaagaatatcaggtggcacacatccccggtgcgctattcttcgacttagatggcatagttgatcggacaactgatttaccgcacatgctgccatcagaagaggcttttgcagcagcaatttctgagctggatataaaaaaccaggataaagttattgtctatgatggaaagggattcttcagtgcacctcgtgtttggtggatgtttagagtgtttgggcacaagaaagtctgggtactagacggcggtttgcctcagtggcaagcttctgggttcaacgtggaaaaggccagccctgacgatgacgcagttctgaaatcaatcgctgcaaacagggctgtcaaaagggtttataatggtgaacagacaaatacaatctcgtttcagactgaatttcagcctaatctattctgggcactggaaaaggctagtgactttttttaacctcaaagtactagctttgcatgggtagaaaatgaataatgtatcagtctggtcatatgatccccttttgctttctttgatttaacattgatgccccacccaaaattccgtggaactccataaacttgatcgattctctgaagtaataggatcagctctgaattctgtaaatatgatcaactcaaaaaggagctatgaagatcc

SEQ ID NO: 29177 - DNA, 497 bp, Zea mays
  Clone ID: LIB83-012-A9_FLI
ggggctcgcgcgtggcgccggcccgcactacagaggcgtcaggaagcggccgtggggccggtacgccgcggagatccgcgacccggccaagaagagccgcgtgtggctcggcacgttcgacacgcccgaggacgccgcgcgggcctacgacgccgccgcgcgcgagtaccgcggcgccaaggccaagaccaacttctccttcccttcgtgcctgccgctcgccgccgcggacgtcggcggcgcctgccggagcggcaacagcagcagcaccaccaccaccgtcgactccttcggcggcgacgtgcaggcgactctgatctttagagtgaaactacgaacatgtggtttaaatggttcaaagttaactctatatggtttatactcatgagaaacggctaaaaaatattgcaagctgttgcagatattcggacggctaacagaaactatttatttcctgttctcataaactgaagtgagatctacgagctgcaaagatc

SEQ ID NO: 29178 - DNA, 1731 bp, Zea mays
  Clone ID: LIB83-012-E3_FLI
cacgtagatagcagcagcagcagcggagctgttcgacgaaatgccgccatggccgccgtgcctccagcctaccctcaccaccgctcgccgcgccaccgtattctccaggacgaaatgtctctcttctacccccgcctctcctacctacgagcaggggcaacacgaggaggagccatcgttggtcgttgtggggggcggcgcggcgggcgtgtacgcctccataagggccaagacccttgctccgcacctcaacgtcgcggttgtggagaaaggcaggttcttgtccaaggtcaagatctccggcggtggccgctgcaacgtaaccaatggccatcaccttgagcccatgggactggcgagaaattatccaagggggaacaaggagctccgaggatccttctttaccgctcacggtccgcaggataccatccgctggttcacagatcacggtgtaaagcttaagacggaggacgatggcagagtcttccctgtcactgacaattcagcttcagttgtagactgtctactgaacgaagcaagaaggcttggggtttctctgcaggccggcaaaactgtgtctagtgcatctgttgctcaagacgggaagtttgttctcaaggtggagaagcgtactgccgatcttgttgattatatcaacgctaattacatcttggttgctacaggtagcagccaacatgcctattcaatcgctgcacaactcggtcattccattattgcaccagttcccagcttgttcacatttaaaatcgcagacaagcggctggctgatctcgccggggttacatttccaatagtcaaagcaaaactgaagctagatggtgttcaaaaaagtgttcccgagttaactcagactgggcctatgttagtaacacattgggggcttagtgggcctgttgtgctgcgattgtcggcatggggagcacgtgagctacatcagtgcaactaccaaggaaatcttatggttgactttgtacctgatattcatatcgaggacgttaagcgcgtcctattccactacaaagatcagcatgcgaagcacaaagtgagtaacacgttccccacggagtttggcctggtgaagagattttggagattcctgctagaacaggagagtttaaatggtgatacacactgggcctccatgccaaataatcatctaaacgcagtggccttccggttgaaacaatggacgtttgaggttgttggaaagggccaatttaaagatgaatttgtgactgcaggaggtgttccaattacagagatatcgcttggcactatggaaagcaagaaacagccaaacctgttctttgcaggagaggttcttaatgttgatggggtcacaggcggattcaattttcagaatgcatggaccggtgggtatatagctgggacaagcataggcacattggcatcgactagcaatctcccagagcagcagtcatgtttccagttgtaactgggagtttcagagaaggaaatggattgagttatgaaagagactccttagatcatctgggaatgattcagggataccaacaagtttgcaatcaagataaggatattccaagatgaattgtaacactaacctaagatggggtacatataacaagactgcacgatagtggttacaatctaggtgtacaaagtgcaatctggaacgatagtagttacaattgagttaaataagttgtgatttgtacttgaccgatc

SEQ ID NO: 29179 - DNA, 778 bp, Zea mays
  Clone ID: LIB83-012-F7_FLI
catcatcatctatctagactagagcaagctaagctcaagctcggctagcattccagaagctgcatctatcagctaccggcctctcgattcatcgcttgcgatcgaatggagaagatgaacgtggttgcgagcaggaagcagcccggcgactggagctgccggtcgtgccagtacgtgaacttctgcaagcgcgacgcgtgccagcgctgcggcgagggcaagctgggcgtggagcgcacggactacgcggcgctgggcggcgactgggacgtgaagcccggcgactggtactgctaccgctgcggcgtgaacaactacgcctcccgcgccagctgcttcaagtgcgccgccgccaagaacgagtccacggccgccgtcgcgcagggctgggggtacaccgtcgccggccaggccggaatgatgcccggggactggatctgcccaagactgggttgcaacgtgcagaactacgccaaccgaaccgagtgcttccggtgcagtatgcccaaatcatactacggttgatggggcgcggcggccggccgggcaactacgtacactgatgagcaaaacaaacaaacaaaaagacataataagccgtacgatgagcttgaagagagagctagatactgatgatggttggtcaacacgccacgaggacatttaaccattttcctttctttttttgtcaccctttcgaatgatgcatgtaactatattcaccctttcgagcagcaactgaagctaaataggagaggaggaatgtgaaacaaaaccc

SEQ ID NO: 29180 - DNA, 438 bp, Zea mays
  Clone ID: LIB83-012-G1_FLI
tcggccttcctcccctccacctcctccccctccccgccatcctcgtcgcaggcaccggcgccagcgccgttccggctctcggggaagagccagcggcgcggcgggctgatcgcggtgccgcaggcgagccgcgtggctaggcggtccgtgatggcagcggcgggggcagccgcagccgccccggcggcggccaagctcgaggacgccgacgcgctcatcgactctgtggagaccttcatcttcgactgcgacggtgtgatctggaagggcgacaagctgatcgacggcgtgctggagactctcgacctgctccgatcaaagggcaagcggctggtgttcgtgaccaacaactccaccaagtcgaggaagcagtacggcaggaagttcgagacgctggggctgagcgtcgacgaggaagagatcttcgcttcgtctttc

SEQ ID NO: 29181 - DNA, 1064 bp, Zea mays
  Clone ID: LIB83-013-B4_FLI
gtctggcctcgtcgtcctctggacgacttttctcccgtcttccacaaccccgagtccccaacccaccacggcgttgcggaatccacctgcaactgcaagcccacgaaatcgagccgagccccgacgccaccaaatcgtgtggcctcggagatcgagcagggtctggaagaaccaggggagagaccgtcagaagaggaggaccagcagcaggcaggcggtggtggcgaagtcgtcggcgtcggcggccggggtatctacgatgataacccggtcgaagctggtggagcaactgcgcgactaccagatccgatcccagcacaagcgtgacgttatcggagctatatcatggggcttgttgtgttgttttctgataatatcatcgtacatgacgctatacttcaggcacttttggcttagtgccattattatctcactcggtattcttcttcctgctggcctgtatattttgaggcaaagaaagctggctaagaaacgagagagaagactgttgttgcctctctctgtgtaaggttgttggtaggttccttgtttttgcgcctattcctgtcttgatagaatctgcattcttaacttgctgcttgtctggcgcacatccaacattttatacatctctggaccctaatacatattcttattcttcagtgttttcctaagtgctacaggagaaatgatagttttgcgagtagataccagttgtgttgtcagctacaaaactcatttttgtaaatttgtttggtcgatgacttcagcccaaggaaacaactcaacatgtcataatacattgggcgtcgccatacacgtgtatgcagatactagttcgtacttctgatggattttgttagctgcattccatcctagctcatttgctaagtgagtttttggttaaaatgaggacactggatggttttctgtttcttgtgcccagttgatgtttgtttctgacaaggttgtatatttgatggtttgtattgtgttacggaaaaaatgtatattattggctgaatccagcttggtactgaatgaatttacgttattgccgcgcg

SEQ ID NO: 29182 - DNA, 1783 bp, Zea mays
  Clone ID: LIB83-013-B7_FLI
ggggtgaagcccgtgcagtcaccgggtccgttcctcgccggtatggagccgagataccaatcggtgtccagggaggacatactcggggagcccctaaccaaggaagaggtctccgaactcgtgaaagggagcctcaaatccaaacggcaactcaatatgggcagggatggtttgacacacaatatgttggagaacattcattcacattggaagaggaaaagagtttgcaagataaagtgcaaaggtgtctgtacaatagatatggataatatctgccatcagctagaggaaaaagttggaggaaaagtaatacaccgccaagggggtgtcatatttctttttcgtggtagaaactacaattacaggacccgcccatgttttccgcttatgctctggaaacccgttgcacctgtgtacccgcgccttgtcacgaaggtcccaggtggcttaactccagatgaggccacaaaaatgcgcacgagaggacatcagttaccaccaatttgtaaacttgggaaaaatggtgtttatgccaaccttgtgaagcaagtcagagaagcatttgaagcatgtgatcttgtccgtgttgattgctcaggtcttaacaaaagtgattgcagaaaaattggagctaaactaaaggatctagttccttgtatcttactgtcttttgagtttgagcatatactgatgtggagaggaagtgattggaaatcatctcttcctccattagaaaacagttatgaagtgacaaaggtgcaagaaagttttagtggcaaagaatctaatgaaaaggttacacattcaggaaatgttctgacccagattgagttggtcagtgttgcaacatctcacaagaactggaacttggatgaaggtcaagaaaaatttaaagattccattgacagtgatatggtactgagttctgcaaaggatgttcctgcattgttccattctacaggtatatctagaactgaaccctcagcagacattccattggaatattccccattaaatccagtatgtgatattatggatccatccctgaactgccgaagtatcccaacaaacaactgtgaaaatagaactctggtagagaagtcagaacattgtccggatgattataatttggaaatgaagaggaaaagaaacgatggtacaaaaggtacagttgttctaaatagcggttctaaagtagagggattgttatgtcttttggaacaggccattcacagtggcagggcacttgttctgagtgaagatgagcttgctgattcagatctggtctatgaaaagtctgttgcttttacaaagtcaattccgcgaagactggtttttgagaatactcgaaggaagtccagtgccaggagaaatgtgccagacaatcatgcaagaactaaaacacatcttgtagaaaataaaatgttgagcagttctgttgaaaataaatttatcgttaatggaggatctgcaatgcagacagaccatggacaagagtttctttctgatgttgttcatcaaggtaccttaagagtagatgaactagcaaagttactagcttgagaggtgattgctcttttatcaaccacatagaccagtatcaacatcctttgaaacatatgcaagatttgcatgaactctgaatttggttaaaacaggtctcaggtctgttgcgtcgtggtgagtcctttttaaccttgaaatactgaactataatcctgtgcgatgtacaaaccaccttcagaatacatattctctgatttgtctgttgtcaccaaaaaac

SEQ ID NO: 29183 - DNA, 1003 bp, Zea mays
  Clone ID: LIB83-013-H1_FLI
cagccatcgcgttccgcatcgaaccagcacatcgcaagacaagcagcagcagccaccactgccatcacatggagtacgccgccgtcggctacggctacgggtacgggtacgacgagcgccaggagccggcggagtccgcggacggcggcggcggcggcgacgacgagtacgcgacggtgctgtcggcgccacccaagcggccggcggggcggaccaagttccgggagacgcggcaccccgtgtaccgcggcgtgcggcggcgcgggcccgcggggcgctgggtgtgcgaggtccgcgagcccaacaagaagtcgcgcatctggctcggcaccttcgccacccccgaggccgccgcgcgcgcgcacgacgtggccgcgctggccctgcggggccgcgccgcgtgcctcaacttcgccgactcggcgcgcctgctccaggtcgaccccgccacgctcgccacccccgacgacatccgccgcgccgccatccagctcgccgacgccgcctcgcagcaggatgagactgccgccgttgccgctgacgtggtcgcgccctcgcaggcggacgacgtcaccgccgccgccgccgccgcggcggcgatgtacggcggcggcatggagttcgaccactcgtattgctacgacgacgggatggtgagcgggagcagcgactgctggcaaagcggcgccggcgccggcggatggcatagcatcgtggacggcgacgacgacgacggcgccagcgacatgacgctctggagctactgagctgtagagtctgtctccagcgcaggaggttgggagaggagagaccacgctatggagctactactggactgggaagaaagtgggggtgccgggagcgagttcgaatttgaattcagaaactctgtactggcactggcacacgcggggaacgcgccacgcaagggcgagcgctatttccctccctttttgggtgctgggagaataataaaaagaccaacaatgaaggcattagtact

SEQ ID NO: 29184 - DNA, 484 bp, Zea mays
  Clone ID: LIB83-014-B7_FLI
gctcgttggcttcgtacggatgatcctccactccggcaagtatgaaagtggcgatcggctgtgtcctgaacatgagaaggcgattctggaacgtttgcttccataccatccacaatataatgagaaaattgggtgtggtattgactacatcacggtagggttacatccagaattcgaaaactcaaggtgtttattcatagttaggaaggatggcgagcagatcgatttttcgttctggaagtgcgtcaaaggtctcattcggcaaaagtaccccatgtacgcggacagtttcattctcaggcatttccgcaggagacaagactactgaagtagttgctcgtacggctgtttcagtgttatatttttctgtgtaattgattttgtcctgtccctttcatatcatgcgattctagcatttgttacgtggagtttttcattaagcatattattccatgcaacataaatagatataggtttgtcgctt

SEQ ID NO: 29185 - DNA, 554 bp, Zea mays
  Clone ID: LIB83-014-B8_FLI
gcacggttcaagcacatcgacacacacgagcacagaagagaaacgggcacacgcaactgatcaaggcaggcaaccaatattcaccgtcggcaatgggcgacctgatccctgggctgccggatgaagtggcgagggagtgcctcgtccgggtgggcttcgaccagctgccggtggtgcgccgcatctcgcgccagtggaagtcggcggctgggacccggagacgtgggcgccgacggacgcggtgctcgtctacgacttcctgtcgggcgcgtggcggcgcggcgcgcccatgcccggcccgcgcaggtccttcttcgcctgcgcggccgtgggcggcgccgtgtacgtggccggcggccacgacgccgagaagaacgcgctgcgctcggcgctggcctacgacccgggcgccgacgcgtgggcggggctcccggacatggcggaggagcgcgacgagccgcgcgggctctgcgtcgccggacgcttcgtcgtcgtcggcgggtactcgacgcgggcgcagggccgcttcgtcgcctccgcggagtccttcgacc

SEQ ID NO: 29186 - DNA, 378 bp, Zea mays
  Clone ID: LIB83-014-C2_FLI
aggagctgaacgacaagaagaggctggccaccagtggcgccaactttgcgcgcgcctacaccgtggagttcggcagctgccagttcccctacaacttcactgggtgccaggacctcgccaagcagaagaaagtccccttcatcagcgacgacctcgagattgagtgcgaggggaaggagaagttcaacgtgcggctccaacgttttctggaagtggtgaagcagctagcagcagcgtctgatgggaatggaggagatcatcacctgtcttgtctgaccctagatatgtccaaacctgcatgggaaattaaatcttcatgtgtaattgtgctcattctgtttcaatcatctcaacatccgatcatgaacctcttgcatt

SEQ ID NO: 29187 - DNA, 1697 bp, Zea mays
  Clone ID: LIB83-014-D6_FLI
gtctctactcctcttcctcctctctctactctccaagttctcttctccgtcgaccgctctacacgtctcttgtcgacctggacaccgaggtggaagaaggaagcagtcagcagatggatccatggatcagcagccagccttctctgagccttgacctgcgcgtcggcctgccgccgctcagcctccaccaccaggcgccggtggccgtcgccttgcccaggcccaagctgctcgtcgaggagaacttcctcctgccgcctccaaagaaagaaccagaggtacgcatatatacactacactccgatcctatgtgcgacgcaagcatgcacccaccccacctggactggacggagacggcgggcgtgacgacgagcaaagactctaacggactgtccccttgatttgatcccaggtcgcggctctcgagacggagctgcagcggatgggcgaggagaaccggcgcctggcggaggcgctggccgaggtggcctccaagtacgaggcgctgcgggggcagtacacggagatggtggccgcggcggccacggcctgcgggaaccacccgtcgtccacgtcggagggcgggtccgtgtcgccgtcgcggaagcgcaagagcgagagcacggacaccgcgccgcccgcgcagcagctactgcaccagcactacccggcggtggcgccggaccagacggagtgcacctcgggcgagccgtgcaagcgcatccgggaggcggagtgcaagcccagggtgtcgaagctgcacgtgcacgccgacccggccgacctcagcctggtggtcaaggacgggtaccagtggcgcaagtacgggcagaaggttaccaaggacaacccctgcccgcgggcctacttccgctgctccttcgccccggcctgcccagtcaagaagaaggtgcagcgcagcgccgacgaccccaccatcctggtcgccacgtacgagggcgaccacaaccacggccagcccccgccacaggcgcaggcgccgcacgacggctccagccctggcgccagcaagaagccgccgtcgccgccgaggccggtcgccgccgctccggcgccgctccaccaccagcaggtccagcagcaccagcagcagcaggcggttggcgcggtgaaatgcgagccgcccgtggccgcggcggcgtcggagctcatccggcggaacctcgcggagcagatggccatgacgctgacgcgggaccccagcttcaaggcggcgttcgtcaccgcgctgtccggccggctcttcgagatgtcgccgaccaaggactgacggaacggatcggatggattgggagattggcatcgcaggagattctggatcagattgtcttcgagcgcacgccgcaatggtcaactgcgcagcgctggcttggctgtcagagcgaaacagcggtaacagagcaagacacgaggggtctgcactctgcagttgtgcaggaggaggaacagacacaaggggaggacggcgcgcggccggacatggcgtggaacagagatcgtcgtcaccgccggcgggggtgtggtcgacgacgcgacatgcgaaacactacgtgctagctagcataggaaaaaacaacatgaaatcgtacaaccaaccaatccctcgcactgttttagttgttagctgtaggcgaaactgttcatccaattgatcaaatgaaacttattttttccct

SEQ ID NO: 29188 - DNA, 488 bp, Zea mays
  Clone ID: LIB83-014-E11_FLI
cgtccatccatcctccgaagctcctcggcagacaagcagcagcgagagaaagcaagcaaggcagaggcagttgtgttgctggtcggtccgtccatggcgcccaagagaccagtgtcggcggcggcggcggcggagcagccgaggctgcgcggcgtgcggaagcggccgtggggccggtacgcggcggagatccgcgacccggtgcggaaggcgcgcgtgtggctgggcaccttcgacacgccggagcaggcggcgcgggcgtacgacgccgccgcgcgcaagctccgcgggcccggcgccgccaccaactaccccgccccggagccgacggcggaggcgttggcggaggctccagcggcgagcgggagcgggagcgccgtggtgtacgagtcgtcgtcggcgtcggcgtcggcgtcgtcgtgctccctgccgctggcggccccgtcgctggacctcagcctggcgctgccggctgcggcggcggccgc

SEQ ID NO: 29189 - DNA, 1740 bp, Zea mays
  Clone ID: LIB83-014-E5_FLI
ctcggaagtctggttcgccgaacagtcccgaacccccgattcactgccgctgccccgtctcgtcctcttcgccagcgaaaaccctagtctaggggacgggagcgcaatccacgcacggcaacatggacgccatccgcaagcagctcgaccagctcatgggggccaaccgcaacggcgatgtacgggaggtcagccgcaagtactatgatcgcgacgtctgccgcctctacctcgccggcctctgcccccacgacctcttccagcttaccaagatggacatgggcccgtgcccgaagctgcactcgctgcaactgcgcaaagaatatgaagaagccaaagccaaaggtactgataactatgaccgtgaattggaagaaaccattgaaagactaattgttgagtgtgaaaggaagattcagagagcccttaagcggttggaggaagaggatgctaaggcagctattgctatttctgttactgaggttacacagactaaagaagtaatggagttatccaaacaaattaggcagaagatgaaggatattgatgcttttgatcttgagggtaacaccgaggggaaaattcgggccactgaagaacttgacaagctaaaagaacaaagggcagaagagcaggcaaagatgttacttgaagctttcaacaaagaccgtgcttctttaataaactctcttcaaaatgccactcaaacaactacacctgtcccccctgctgctccggatgcacggacacaagaaatgataaacgagaaactgaaaaaggcagaagaactaggtgagaatgggatggttgatgaagcccaaaaattgttggatgaggcggaagctctgaagaagctggccacccgaccacaggctgttccagactctacaaaaatgagcgctcatgtccagataactgaccaaaagctgcgcctgtgtgacatatgtggagcattcttgagcgtatatgacagtgaccgtcgcttggcagatcattttggagggaaacttcatatgggttatatgcttatacgtgagagattgtctgaactgcaggaagagaagaacaaaaaacggaagctagaccgagctgagtatgacagaaggtccagggaaaggagcggggaacgtgccagggattcgagcagggatcgctacatagaccgcagcagcagccgtgacagggagtatgaccgcagaagaagccatgatcgctaccatgacagggaaagagagagagattccaggcagtctcgtagttatgattccagaagccaccgcaggtcatattcaccaaggggaagttctagggattatgatcgatctgggcgtcatgaacgccgtgatcggtactaggagcaaggaagcctccttgaaatttagggtactagattgcgttgcctcagggctagtttggccacctcatttttccaaggattgacaaccttatttttttaagggatttctattttcctaagaaaaattagttcattttcccctgggagggaataccttggggaaatggaggtgccaaactagcctaagtgttgttcgggaattctaagagggggcttaggtccaactggagaaaggcatcagctctttgcattataactaagggataggatctgacgtaatctatgcgtatcatattgttgtgttagctggtgttcatcgtgtaaacacaatgtggtggcgacgtgtcatgctttaatacgcttatatgcatttgaattaagtt

SEQ ID NO: 29190 - DNA, 1249 bp, Zea mays
  Clone ID: LIB83-014-G10_FLI
ccgccgataaaacggccagccgggcagcggagacgcggagtggggcgcgacggcgcgtaacctgtggggtttcaggttttgtccctgcgtggcagcgacccagccccatcgagcatcgaggcatggaaccgggagccaaatcggaagcaaagcaaggtgaggcgggatctggcgcgggggcaagcggcagcggcaaggtgtatcatgagaggcagaggctgcaattctgtctcctccatgctctcaacaaccttatgcaggaaaaggaatgtttcacccgtgttgagttggacgggattgctggaaatcttgttctcaatgatccagacaagggccaatggactcctctaccattcatttttaaacctcaccacaatgttataactgggaactatgatgtgaatgttctcatcacagcattagaagctagaaacaagaaggtggtttggcatgatcgtcgtaaaggggcatcatcggttgatctgaatgcagaaacattggtaggcctgatgatcaatgtacctatcaggaggttcagggggctttggactggcaggcattgggtggcaattcgacgcattgatggcatctggtttaatttggacagtgatctttctgaacccaagcagtttaaggaccaagaaaacgtgattgggttccttgacagtgtgctcagccaaggtggagaactcatggttgtgctgcaagaaatttcctaaaccttacggtttaatcgctgatcgtaatggacagattggtaaatcgaaggtccagtatgcaacatatacacttggtttattcatatactggtttattggtaaatcgaaggtccagtatgcagacacctgctaacccttggtttgatttattgctgtgcccgtctctatcatatactggattgccaagcaggtgtctgcagtaggtagaacattagcttgctaaatggtgaaaatagtgaacttcaatcctcagcaagaattaatgttgctgcggaattgtacagaactaatagggaggttgcttgtgttgcagttatatgctttggagaaacgaagttatcccatgctcctagaatctgtcagttcgtttgtaagtaccattggatatcaggaaacgtaacattatctgtagactgtagactgtactatgtaatcagagcgatgtcccatggtctttcaaatattacaaagcataaaatatatgtagctgtaagatcattgttgtttaatggcatcatattaagttaggg

SEQ ID NO: 29191 - DNA, 1827 bp, Zea mays
  Clone ID: LIB83-014-G8_FLI
ccaacttctcggtcgtcgacggccccgccagctccgccgcgggtaaccccgatgagatcgccaagctcttccccaacctgttcggccagccctcggcgtcgctggtgccttcggccgagcccgcggcgaccaggccgctaaaggtcggtgtcgtgctctctggtggacaggcgcccggcgggcacaatgtcatctgcggcatctttgattaccttcaggagcgtgcaaaaggtagcaccttgcttggattcaagggaggccctgctgggatcatgaagtgcaaatatgtggaactcacttcagactttgtgtatccctacagaaaccagggcggattcgatatgatctgcagtggaagggacaagattgaaacaccggagcagttcaagcaagctgaagacacagccaacaagcttgatttggatggacttgttgtcattggtggtgatgattcaaacaccaatgcctgccttcttggtgaatactttaggtcaaggaacctgaagactcgtgttattggttgcccaaagactatcgatggagatctgaaatgtaaggaggtaccaacaagctttggatttgatactgcttgcaagatatactccgaaatgattggcaatgttatgactgatgcaagatccacaggaaaatactaccactttgtgaggcttatgggtcgtgctgcttctcacattacattggaatgcgctttgcaaacacaccccaatgctgcactcattggggaagaggttgctgcgaagaaagaaacccttaagaatgtcacaaactacattactgatatcatctgcaagcgtgcagatcttggttacaactatggtgttatccttataccagaaggcctgattgatttcatcccagaggttcaaaaactcatcgcggaattgaatgaaattttagcacatgatgttgttgatgaggcaggggcctggaaaagcaagcttcaggctgaatcaagggagctgtttgagtttttgcccaaaactattcaggagcaacttatgcttgaaagagatccccatggcaatgttcaggttgcaaaaattgaaactgagaaaatgcttattagcatggtggaaactgaactggagaagagaaaagctgaggggagatactctgcacatttcagaggacaagctcatttctttgggtacgaaggaagatgcggccttcctactaattttgattctaactattgctatgcattaggctatggtgctggtgcccttctccaaagtgggaagacaggacttatttcgtcggttggcaaccttgcggctccagtagaagaatggactgttggtggaacagcattgacatcactgatggatgttgagaggaggcacggcaagttcaagccagtgatcaagaaggctatggtggaactcgatgctgcacctttcaagaaatatgcatcgttgagggatgagtgggccatcaagaacagatacatcagccctggccccatccagttcagcggccctggaagcgatgactcgaaccacaccttgatgctggaactcggtgctgagttatagagacgcgtccttcacttatttttgttcttacagttttgggagtggagacttggacactgggtctcctggagcagcctgcagtgcagtctccatattgtgaattgtctaataagaggttcgatgggagttttttgggtaccgactggatgtggtagaaaataagaactggttctagtttttttgggtatgatttatgcagcaactgacttgtcttgtagccctgattctgttcccatgtttgcaatctcgtgagaacgaacaaattgtacac

SEQ ID NO: 29192 - DNA, 1110 bp, Zea mays
  Clone ID: LIB83-014-H11_FLI
ggcaagaagcgcgccgtcctgatcggcatcacgtacggcggcgcgcgccggggctgcggcgagctgcggggccccatcaacgacgtcaagtgcatgaggcagctcctctgccagcgcttcgccttccccagcgacggcatcatcatgctcactgacgaccagaaggacccgttccgggtgcccaccaaggacaacatccggatggcgatgcagtggctggtgcaggggtgcagcagcggcgactccctggtgttccacttctctgggctgggcgcgcaggtcgccgacgcggactgcgacgagcaggacgggtacgacgaggccatctgcccggtggactcgttccagaagggccccatcctggacgacgagatcaacgagaccatcgtccggccgctggtgcccggcgccaagctccacgccgtcgtcgacgcgtgccacagcgattccgtcctcgacctccccttcctctgcaacatgtccaggaccgggaactggcagtgggaggatcaccgtccaccgtcgggcgtctgcaagggcacgagcggcggccaggcggtgcttatcagcggctacagcgacggcaaaagcaagttcagcatgacgccggaggcctgcgcggcggtgggggccatgacccacagcttcatcaaggcggtggaatgcgagccccagggggtcacctacggccgcctgctcacctccatgaaagccatcatgaccaacgccggcggctgcaaccagcagctgcagggcgcctgcgcacccgcccgcaaggtcgtcaacttcagcggcgtgcaggaacctaacctgtcttgctcggagatgttcgacgtctaccgcaagccctttgcgctgtgaacctcctctgcattgccattgcctttgcagactaccacagattcccgtctggactctatatataaattaccgtgacggaataataaaccagacggatttatattatatatgatgatatgtcataatgtgtgccttaattgtcttgcggccaataatgtgtgtccatgtgtcgatcggttaccggccctgagccaagcttatagcctgtggaccgacgactttgttgaccattataaatacaatgttgat

SEQ ID NO: 29193 - DNA, 1067 bp, Zea mays
  Clone ID: LIB83-015-D2_FLI
cgcttccctttccccgcacggcggagttcacaatccccaccggccggcgtagcggatattgcgagttacgacggggaaggagaggaagatccgtcgatccgcgcagattcgtttcgatcgtggtttggtgacttggtaagaggggaggggagaagcggcgatgtcgggcgtgttcggcagggtgttcgggaagtccaaggagcagagccaggcgaccgcgctggcctcgctcgacaagctcaacgagacacttgaaatgttggaaaagaaggaaaacttgctagtgaaaaaggccaatcttgaggtcgagaaggctaagaattttaccaaagccaagaataaaagagctgcaatacagtgcttgaagaggaaaagactatacgagcaacagattgagcagcttggaaatttccagcttaggatacatgatcagatgattatgctggaagcagcaaaagctacaacagagaccgtggatgcattgagaactggagcatcagcaatgaaagctatgcataagtcaacaaatattgatgatgttgataaaaccatggatgaaattaatgacaatatggagaacatgagacaaattcaggatctgttgtcagcgcctatgggagcagcagctgattttgatgaggatgaactagaagctgaacttgcggatcttgagggggaggagttggaggcagagctgcttgcacctaccacaacagctccgtccacagctccagtgcgtgtgcgtgtacctactgctcagcagtccactaggccatctggtcagagtagcaaagctgaagacgacgagctggcagcactacaggcagaaatggctatgtaaatataggcattggcatggtcatcttggatttcagattctgcggttatctcgcaactctggtatactcatgaggatcttcctaggaagacaagctttttcagaatcacaaacacaagctgcataccagcctaactgcttatgtatcatagcatgctatgttattgttttgtaatgaaatattttataggctaataaacatatttctattaataaattgtttcgtgtc

SEQ ID NO: 29194 - DNA, 1420 bp, Zea mays
  Clone ID: LIB83-015-G9_FLI
cgacgcgcagcgagagcgcagcctgctgcgggactggctgctgcccgtggagggcgcggtggcgctcagcatcgtgctggccttcgcgtggcagaaggccgtgcgcgcgtggccgcgcgctatggtgcgcgtcatcctctggtccagcttcggtgtgaccctggccgtgggcgcgctgctcatgtgcttctcgatgctggccactgtggggctgggcgtggcgatggtggtgttctccatcggcaccgggctgtacgcgtgctgggtgacgcggcgtgtgggcttcacggcgcgggtgttcgagcgcgcggtgcagccggtggataagttccacggtttgaatggccccgcgtacctgatggtggcggcgggcttcgcgtggatctccgtgtggtgcgtggcggtgatcggagctgtgaacttccgcttccccgggctcaccatcctggggctggtggtcagcctggcgtggaccgccgaggtgatgcggaacgtggcgaacctgacggcgagccgggtgatcgcgctctactacctgcgcggcatgcagtcgagcgtgcagttcagcttccaccgcgcgctgtcgcacaacctcggcagcgcctgcctgggctcgctcttcgtgcccaccatcgaggcgctccgcatcctggcgcgcgggctcaacctgctggagggcgaggacgagttcatgttctcctgcgcgcactgctgcctccacgtcatgaacgccatcttcagcttcggcaacagctgggccttcgtccacatcgcggcgtacgggcgcgggttcgtgcaggcgtcgcggagcacgtggagccagttcgaggcgctgccggggatggcggcgttggtggactcggacatcaccagctccgtgtgcttcctgacgggcgtgacgagcggcgcgctgtgcgtggcgctggcggggtcctgggcgttcgcgacgcaccggcactacacggccaccgtgtcgctgctggccttctacgtcgggtacctgatgacccgcatcggcatggcgctgccccaggcgtgcgtcggctgctactacgtctgctacgccgagaaccccacgtcgcggctcttcgacggtaacataccgaaccagctgagcaagatgcaggaaagccgcggcccgtccgtgccgacgccgcggttcccgcaccgccagcacgtcggcgcgtgagtgagacgacggagtttctttttcctcgtgtgccaccgccgctcgtcggtgtggcttgatccggatgagggcggcggctcgtacggcggtctggagatcaaattttctttttctagttttgtaaatttatttatccattttttagctgacagaaatggtgaatccccaatattttgggtgtatgtagacagagtactattcttgcataggatttatgtgaatattttaact

SEQ ID NO: 29195 - DNA, 1064 bp, Zea mays
  Clone ID: LIB83-015-H10_FLI
ggaaagcgtagagctagtcagagagagagagagagagagagagagagagagagagagagacggggggcgggaggatggctttgctgcagagccagagcctgccaggcattggctgctgcagcagcagcatcgtcttggcacgagcgagggtgcagcagtgtctggcagcggcgtcgcactcacaggcgcccctcctgcaggccaatggcggcagggcgggcctcccctcctcctcctcgatccttaaggctggcaatgcgatcagcttcagccggcggagaaggagagacctgcgcgtcgtcgcggaggcggccacggcggggacggccaaggtcacgccggcctcgtctggcggcgtcagcctcagcgacgtgctctggccttctgccggagcattcctggccatggcggtactggggaaaatggaccagatggtggcgttcaagggagtatccttgacgattgcgccccttggagcagtctgctgcgtgcttttcagcgctccagactcgcctgcggccaagaaatacaatatgttcgtcgcgcagattgcttgcgcggcctttggcgtattagccctctcgttgtttgggcctggctggttagcgagaggcgccgctctttcagcctgcatagcattcatgaccatcacgggtacctcgcatcctccagctgcgagcttgcccctcttgtttatcgatggccccaagtttcacagtttgcagctttggtacgcgcttttccctggagctgcaggctgcatcgtcctttgcttgattcaagaggtggtggtttacctgaagaagaacttcaagttttgactcaagcagcttgacgctatggatttttgtggaagtggtccgattaattattcaatcatgtaacataaattacattgcctgcatttgcgataaagttgtgaaaatgaaggtttactgtctcctgtcttggttaaagaagaaagaagactttccttgataccttgtgctcatcaaaatgcagttgatacaaatgtgtacataccattctcccatcgaataaagtctgacaatttattccttttt

SEQ ID NO: 29196 - DNA, 1081 bp, Zea mays
  Clone ID: LIB83-016-D6_FLI
gtggtgatggaggagacgatagacgacagtgagatgagtttgtcgaacatggtgctgggcttcctggaagatttcgagagggacgagcgacggccggagaacgacgacgacaacaacgaggaagagggctccagcggcggcgacaccgccgagagcaaggccttctggcagacccaacacttgcagctgcgcgaggcactggccaagggcagcccagccgagagcaggatccgcgcggacacggaggaggccgtcaagagcatgcgcgccgcggcctgctcctgctcctgcacggggcggcccgccgcccgggactgccggccgtgcatgctccggcacgtcgccgaccggctgcgcgacgccggctacgacagcgcgctctgcaaatccaagtggacgcgctcgccggatatcccttcaggcgagcacagctacgtggaggtggcggtgcagacgaggagcggcaagtccgtgcgcgtggtggtggagctcagcttccgcgccgagttcgaggtggcgcgcgccagcgccggctaccgcgcgctggtgaccgcgctgcccgaggtgttcgtcggccgggccgaccggctgcgcggcgtcgtcaaggtcatgtgcgccgcggccaagcagtgcatgaaggataacaacatgcacatgggaccctggaggaagcacaagtacatgcaggccaagtggctcggcacgcccgagcggggagcggcggcggtggcggcggcggagacgccggtggtggcggttccgtcggtgacggtcggctcgccagagaagcagaccaagttcagggcgtccatgctgaccttcgactttggccggaccgcgctggaggtcgcgtgatgaacgcacatacgctgccggtcgagcggcattagtagttctctaaatatagacagaggaggtaactttcgagaagaaaaaaaagttatatagagtgtacctgggttttaggtttttgtcaggattcagaaagctgaatctgtaatatcaatcgagctaggtgtaaacagataaggcgagcttgtcacgcgtactccgatcgcgtcactgtaatggaaatgaagct

SEQ ID NO: 29197 - DNA, 1667 bp, Zea mays
  Clone ID: LIB83-016-E12_FLI
ctgatctcaagcctggtcaactaacagatctgaaatcattagctgtcaataacaattcatttgcttatgtcgccgttaagaaatctatccataggtatctcataaaggattctaactatcttacgacagcggtaaataaattcgcgaattatgttaacctttccagttcagagaaagacttgttagaagaaccaacatgtccaaaggttcttggtgatattgttgaatcttgtgttggtgctgtgcttttagattctggcttcaacctgaaccatgtttggaagctaatgctaatgcttcttaaaccaatattgagcttttgtggcatgcacatcgatcctatgagagaactccgagaaacttgtcaatataatggttttgacttgggacttcccgaacctacgaagtacaatggagagttccatgtcaaagtagaagttaacataaacggcaagatgataagctgtactgcagcaaaccggaattcaaaagatgctagaaaagtagctgcacaagaaacactttcgaaactgaagaattatgggtacaagcataaaagaaagtcgctggaggaaattttgcgttctaccacgaaaaaagaatcggaactgataggctatgatgaagaaccaatcaatgttgaggatgacattgacatgcaaatgaataatctactgataaatggagaaagaacctccattcagagtacagcgggagataacaaggttgacaagaatgatgctaatagtggaaggaataataagtccaatgtggtcatgcagaatggttgcctacctagaggggcaactgataaaataaaccaaaaagaatatcatggtgatatggtccgcaaaacagcaaggtcattcctttatgaattatgtgctgcaaactattggaaacctcctgaatttgagttatgcaacgatgaaggaccaagtcaccttcgaaagttcacatgtaaggtccttattgagatcacgggaacttcggtgagccttttggagtgctatagtgatcctaagctacaaaagagagccgcgcaggagcatgcggcagagggagctctgtggtacctcaagcaccttggatacctaccaagagatgaaaatcgtttctagcgacattttaggttttgtagccttcagtcacataaataaacctcggatgggaagagttctgttattgtaagcatgcagtctattcagaggtatatagcatcctggaatctcaatccaacagtcaacagtgcaaaaaaatcataaaagatgcaaaaatgatgacgtgcttctcatcaggctgacatcggaggacatctgcattgtacaacatccaaattgtatgggaagattttcgtcggtatgggtacatatttgggagaaaatcttctcattagctatggtgggtatgtgtatgggaatgcagaattcgaacctgattataactagcaaaattagttgtgtaacccaatagataataaacccaataactaacccacttgtcctaacccttttaagcatccatctacccaacttagacgatcaaccacccgttgtcccatccactagttcacgtgtcatttatttttgttgttttatatagttaaacaatttttttcttgttaaatatcagtatatttgtgttatgttgttgactgtgaaccatac

SEQ ID NO: 29198 - DNA, 1685 bp, Zea mays
  Clone ID: LIB83-016-E5_FLI
ctgatatggtgacctgcgaaaatgtcatggctgcctgtggtcacggtggcctccatggggatgccagagaagttcttgaatatatgaccagagaaggaatggtgcctactgcagatgcctacactggcctggttgaggcccttggccacgcagctatgtatgaggaagcctatgttgctttcaacatgatgactgaaatcggtagcttgccaactcttgagacctacaatgctcttgcatttgcatatgctaggggtgggctcttccaggaggctgaggccatcttttctcggatgagtaacaatgctggcattcagaaaagcaaagactcatttgacgccctcatcgaagcatattgccagggctcccgattggatgatgcagtgaaggcgtacatggagatgcgtaaatccaggtttaatccagatgagcggtcccttgagggagtacttaatgcctactgcatagcaggggtcatagatgagagtaaagaacagtttgaagaacttcaatctagtgtgactatgcccagcgttattgcctattgcatgatgctgtcactatatgccaggaatgacaggtggagtgacgcctacgatctgttggaagaaatgaaaacaaatcgtgctagtagtacacatcaagtaattgcttccctaatcaaaggggaatatgatgatagctccaactggcaaatggttgaatatgtcctcgaaaacagtaccatggaaggctgtgactatagtttccgattctttaatgctctccttggtgtgctttggtggtttggtcagaagggccgagctgctagagttctggatcaagcagtaaaatttgggctgttccctgagttatatcgtgacaccaaactggtttggtcactagatgtacataggatgtcgatgggtggagcactggtggctgtgtcagtatggctcaataagctttatgacagactagtagaagatgaagatcttccacagttagcatctgttgttgtattgagaggagaaatggagaaaagcacagttacaagaggactgccaatcgccaaagtcgtctactcctttctaaacgatacactatcagcgtccttccattttccaaaatggaacaagggacgaatcatatgcttgaagtcccaactaaaaaggctgcagtcggccgtagactcctcaaatgggtctcttgcagctggttttgtcgacatgacaaactcccgtctgccggctcccggttccaagatatacacaagcgaggaccaattggataatggttcacgccatttgcctgacgaaccgttggcggaggaaaaggagtcggagcttctcgcactgtgagctgctgcccttcgcatctacagttgtgatgccattggtctgaacaaggggagacgagatgcaggataccaagcgtattttcggagttcgtccattcagatctccgtctcggtctcagttatccagggtgggtgctacatactgcagattcacatcttgcctggaatttatttggctggggcttgacagtcaatgctgaacttgagttgcatttcaggcaggattttagctcgttgtagggagaacgagcttatggatgttgttgactgtgtatggcatccttgtgcgtccagctcaagtgctcaactctgtaaaacatgatagcctgataagtctgttgatacg

SEQ ID NO: 29199 - DNA, 768 bp, Zea mays
  Clone ID: LIB83-016-H9_FLI
ttttagtttgggctgccttattttctattgtatcactaaaggcaagcatccgtttggtgagtactatgaaagggatgtgaacattgcaaacaatcgctttgatctctttatggtggactacataccagaagcagtccatcttatatctcatttgttacaaccaaacccagaggcaagaccgacagcagtatatgtcatgcaccatccactcttttggagccctgaattgcgtctttcgtttctaagggataccagtgacagaattgagaaaaccagtgaaactgacctcataaacacactggaaagcataggatctttggcgtttggtggaaaatggggagagaaattggatgctgctttggttacagacatgggtcgttatagaaaatataactttgagtctattcgtgatcttctgaggtatatcagaaataaatcgggtcattacagagaactttcagatgatctcaagggcatacttgggtcactaccagaggggtttgatcgctattttgctagccgatttccaaagttgctaattgaggtgtacaaggtcttgtgggtgcactgcaaggacgaggaagctttcagtaaatatttcaaaggaagttagttatagctggagaggattgtcctttcctactgtacatactaaccctgatgtagaacaagtacatgtgtaccatatgactcgtattataggataaaaaagagctcaatctgtacattatgcaccggtatggtaggaccgtgtcatttgcacagcct

SEQ ID NO: 29200 - DNA, 1552 bp, Zea mays
  Clone ID: LIB84-001-H7_FLI
ttcgcacacaagaatagtaatattctatgaccaagtgactgtagtatgaagaagcatgtgtcattttcctgattaatttagctggttcaactctgttggggtcccaagtcttggccagaacttgatgtaattaaactcctttagacaattgagtacctttctatgtggatttacatatccttttgcttatttaataacttctgcaaaatttgaatcctaggcaatgtcaacctcaacaccttgatgaacatgttcagtgtgcttggtgctggtggtggccttggtggtcgaaatgcttctaatggctctggaccgccatgcttgcgtctgccgcgggacgtccacgctgccatcgcccgtgagcagctccgacagcctcatcgccgtattgcacctgctcttgtgtcgcaggctcgggttaccgttggtgctcacgctgaggaaggcatgatccatgcggagcagcccaaggcgcgatgccacctccgctgtcacacatgatgagctgcttcgcctctggcaccgccttgttccttcgcgatctcacattgacatggatgcacccgattttccctgccctgttctatgcctgtgaaagagtcatcaggaaatttcatgagaacgactaccattcaggtattgtgagaaagaaggaaggtacaagggaaggaagttcagttcagtatgtcatttctttggatatcaggctcgatgatctacaccatcaaatttcgactgtgactatgcttatgctcttggacgtatctccctgcatatgattgcagttggattgactggctacatgacaactgtggctaatctgaaagaccctgttgacaaatggagatgtgctgctgctcctttaattgcgatgatgattgtgatgaggcatttacatggccctggagcaatccctatagggaggccttccattcacccttctccaattgatctgaaagggaaggcttatgagttgctgcgagagaaggcttcaagcttcctccttgatgacttctataggactccaggaggcattcagttcgaagggcctggttcagatgcaaagcccatcacgctgaccattgagaaccaggactacatgggtgacattgagatactgaaatagtaccttggcaaggttaggaccatggtgaagccagggtgctcccgggagatcctgaaggcggcgatcagttccatggtgtcggtgacggatgtgctgactgtgatgtcccaccccctcaacgccgagctgcccctctaccatttcaagctgcatatattcaacattatgaatgcatggtaactattttgcatgcctatgacgagaatcatcacttttggagcatgggtgttttgtgtacatataaccaaactgctaaaatatttgcagttatgtatatgtttaagcgatccctgaccaactcttcaattatgccactaatgtactaaataaatatgtacgaccatatcggttgactcaacagcttctgttagcgctagaattatcatctctgtacactatgagttttttaaacgctaaagttttgtt

SEQ ID NO: 29201 - DNA, 666 bp, Zea mays
  Clone ID: LIB84-002-C8_FLI
ggttcaccgtcaaggccatccagcccgagaaggcaacgtaccaggtggtgcagcccatcaacggcgaccccttcatcggcagcctggagacgccggtcacctccagcccgctcgtcgcgtggtacctctccaacctcccggcctaccgcaccgccgtgagcccgctgctgcggggcgtcgaggtcggcctcgcgcacggctacctcctcgtggggcccttcgcgctcacgggcccgctccgcagcacgcccgtgcacggccaggccggcgcgctcggcgccgccggcctcgtcgccatcctcagcgtctgcctcaccatgtacggcgtcgcctccttcaacgagggggacccgtccacggcgccctcgctcacgctcaccggcaggaagaaggaggccgacaagctgcagacctccgacggctgggccaagttcaccgggggattcttcttcggcggcatctccggcgtgctctgggcctactttctcctctacgtgctcgacctcccctacttcttcaagtagatatcatcgaagatgcgtatacatagctccggccgatcctcctctctagctgcatggtatgtaggtggtgtggttcttgtttcatttcactccagcggtgatcagcaccgtgtataaatgtaattcctctgctctgcacatg

SEQ ID NO: 29202 - DNA, 1066 bp, Zea mays
  Clone ID: LIB84-008-H2_FLI
atttcatccacgctgctcgtgctcgctgcctgcttctcgcgcgatcgtctcggcctctcgggattctagagtggcggccggctctccgcctgttcttgtcgtcgctgctcctttcccagtgagcttaaaatatacacaggatgtcggaacgttctgagagcgcaactgaaaagattatgagcagcatcatggataccattgctgacaaccttcctaagcagaagtctgggaaatttgatccaggttcagtctctgacaaagtgaagaataagctgtttggtcgtcagaagaccttgcatggagttctgggtggtggaaaacctgctgatgtgctgttatggaggaacaaaaagatatcatcgagtgttctggctcttgcaacagctatttgggttttctttgagtggctcgactaccacttactgacaattgtttcatttgcccttgttcttggaatggttgtccagtttgtttggtccaacttctcaaacatgctaagcagcggatcccgttctcaggtgccccgagttgaattgcctgatgagttatttgtgaacattgccgttgcaatcggtgcccaaataaacaagttcctgtgcttccttcaggatgtttcttgtgaaagaaacttgaagcattttgtagtggcgatcgcaggactgtgggctgctgcggtgattggaagttggtgcaatttcctgactgtcatatatgtcgggtttgtttgtgttcacacgcttccggtgctctatgagaagtacgaagaccaagtggacgatttcctctacagccttcttggtctgctgcgagatcaatatcagaagctcgaccaaggcgtcttgagcaagattcccaaggggaacatgaaggctaagaagaacgagtagtttagcaggtggtttctcgtgaatgagatcaatatcgttttgacttgtgtcgattattacctaaggcgtgtgtgccattctgaacctggctgctagttcatcgcccgccgggggtttaaactactaagctgcaatgcacaagtaatgaagtgtgctagttcattgcccacacgggtact

SEQ ID NO: 29203 - DNA, 979 bp, Zea mays
  Clone ID: LIB84-008-H4_FLI
agcaagagcaagcttcaacctttgcatgcagagacctagtggaatagagcgaggggaatggagcaaggagacgaggcgtcgtcggtgaccaaggagagcccggagcagcagcttacccgggaccgggagcagcagcacgacgccggcgtggcgtggctgaacctcacgcttcgcgcgggcgagtcgccctcgccggacgcggctgcgagctgctccgccgagtccgggtccgggtccgggtccgggtccgggcccgagcccaccgccaatccgtccgccgccccgcacaaggtgttctcctgcaacttctgcctgcgcaagttcttcagctcgcaggcgctgggcgggcaccagaacgcgcacaagcgggagcgcagcgccgccaagcgctcctaccacgcgcaccgcatgatcgtgggcctgccgctgcacgcgcacgccgcgctcatgcactcgctctgggtcagcccggcctcgtcgccgatccacaaggcggcgggcccggccagagcggcggcaaggttcctcgagggcggcggcgccgccgccgccgctgccgcctgggggacgacggtcgccgcctgcgaggaggcgcccggttcggcggcgtggcctgggagcttcaggctgagagcgcagcactcggagcacgaacgagcgttcgagactgaacagagcaagatcgacttggacctcaggctctaatggggggtatgtgcccgtgcatggtcagctcatctgctgaataaatctggtctggagatgtgatcaggttcagctcactgtcaggtgaaaccccatagagttttggacatattgagtcgcttagaattgttttgatggtactgcaattatgcatttctgtagctggaaactgtactttagatctattgacagacatcagttttcttgcatgtcttcgacaccgtcctctcaaagaacactcaaagcactgcatattgcaagagctattgtaggt

SEQ ID NO: 29204 - DNA, 1659 bp, Zea mays
  Clone ID: LIB84-008-H6_FLI
cacattttgaagcgaatcctgcctgctggagtggaggtaccctcttcgtttgagacaattggtcatgttgctcatctgaacatatctgatgacttgctagcatataaagatgtcatagcaaaggttatctatgacaaaaattatccaaggattcagaccgtggtgaataaagtggggacaataacaaatgaatttagagtcccgaagtttgagatcttagcagggaaaaatgatatggttactgaaattaaacaatatggtgcaacattcagacttgattatggtttggtctactggaattcaagactcgagcatgagcatatcagattagtttccctgttcaagaaaggagatgttatatgtgacatgtttgctggtataggtccattttcaatcccgtctgctcagaaaggttgtgttgtatatgcaaatgacttgaatccagatagtgttcattatctaagaactaatgcaaagattaacaaggtggaggactatatattcgcctacaacatggatgctagagtgttcatgcaaaaattgatgactgtgcctggcctggaaactagatcagactctcaagttgccactgatgaatcctattctaaagaaggggttccacctaatgaaatttcttcttcaaatggaaaccataatgatgttcgagaggacattaaaaatggtgctaatgaatcctctgcggcaagcactactactaaaaagcgacaacaaacttcagaagaaggtgatgaacctgattgccaagatgcagatgctaataaaacaaaaagacaaaacaaaaagagagtgagaggattagggccactgccatccaagccatgggaacactttgatcatgtactgatgaatctacctgcttccgctttgcagttcctcgattgttttgatggtctcatccaaaagaaatactggacgggatcactaccttggatacactgttattgtttcatccgttcttgtgaatctgaagaatcaattctctctgaagctcagaataaattaagtgctacaatagcagaaccaatattccatagggttcgtgatgttgcaccaaacaaggctatgttttgtttaagcttcaagctacccatggagtgtcttaagggggacagtgaaaatcacatcgaatcagttgccaagtagaccatgccatgctgatattgtgctcctgaagtttttactcatccacctgcagttttttttggagctttaccaaataaatagcaaatgtgctgatgattctggggtgtcatataaccattgaagatgttggtggatgaatcaagacgctggtaacatctgattcaaagcgtggtgccatcggtttagtttacaggaagttcactgtcatgtttttttttttgggtttagtttacaggaagttccctgtcatctaatgtattgactttttacatggttttgttattgatttgaagaaaatttggtcagaactcaggaccgtttgtagtacttgtcactcgagctctctgtacccaagtgaaagtgtcaggtgttcgaggaaatgttatgttaaaaacatcgaagtgtctcttagactgctactagtcggttgcccgtgcgttgcgacggtttacaacaatacccacgtaaactatccataaatttttttaagatttt

SEQ ID NO: 29205 - DNA, 1059 bp, Zea mays
  Clone ID: LIB84-010-C4_FLI
ctctgtaagactagactatcagaatttgatttggcaaatcgttcgttgtaccaactagctagacgctagttagtgccactagtgcagtgcgctctgacgtgacgatttcagttcacgtgcagaagtcgggttccgccggccatggccatccccggattcggcagctgcgcggacggccggactgcagccggcaggcggaagtgatgggcagcaccgtcgacgacgacgaggcgtgcgagctggtgagcggctcggacctcgtcatcggcgagggagacgacagcgtcagcgcgtaccttttcaaggccgtcaagaacaacaatggcaccggcatcctcctgctctccgacatcttcggcttccaggactccgccacgcgggacttcgcctaccgcgtcgcctgcaatggctacaatgtcctagttccggacttgttccgtgggaacccgtggaagctgaacgtcccgttcgacggcgacagcttcgagcggtggcgggcggggcaggccccgggccgggtgttcggcgacatcgacgcgtgcacgaggtggctggtggacgagttcaaggccgcgggggtgtccaagaagctgggcgtgatcgggttctgctacggcggcgggcgcctcgtggagacgctggcgcgcgacgccgagagctgcttcagcgcgggggtctgcttctacgggtcccggatggacgcgtccctgggcgaccgcgtcgcggcgcccgtcctgttcgtgtgcggcgacggcgacccgctgtgccccgtggagacggtgcgggagctggaggggcgcgcgagaggcgcccgggcggcggtgtacgccggcaggggccacgggttcgcgcaccggccgcagtcggtggaggaggacggcgacgccgaggacgcgttcaacgcgatgcgggggtggctgcacgaccacctgctcgcctgatcggacgatcagacgctgtacacgggtttgggtgttttgtacatacgtactaatatgttatttgaccaagtctcctggtcatcctataataaagagcaaaatccaccattaaaaaaat

SEQ ID NO: 29206 - DNA, 955 bp, Zea mays
  Clone ID: LIB84-011-F9_FLI
tgcttttaatggcccagtccttacccaagaggtcaacaataccatgtttacatatagtccaactcaaaaggttttagaacctaatattgtagttggcgcaccatcgtctgctaggttacctgaagctggtagtcagttaaattgtgttgttttaccagatggtcaggctaagagtagtactattggaaagggatttgtaaggattttggattcgatctctgctcccccagcttttgcaggagagttcccatctaaccaccgcaaatccttggctcgtatttctggagcgcgccccaacacactccatgtttctgctgaagtgatccatataggaagtttagctgttccttctggcgcagataagtgggcgctgcaaaaggatcaaggcatggagctgctcttctctgcagattttgaacctgatgcccgtatacattgtggctgcaacaccattaccgcggtgctgcgtggtggcttctgccttttcttcgtttcagcaataatgctcttagtgagctacgaggtgggcatgtgcatctatggcaagtagcaacctggtactggtctaagataaatctcacagcatttaggttaatcctatgttttgaggcagactcaactggggtctggggcctcctgctagcttttaagtgtgccgcattgcatggcatggacctgtggggtgtttagcactagcagtaccattttgcagctcgagagctaatggtgtatgtatgaattcagtgctatttagaaatactatgagaattgcctcattggcgtgtgatgatgccatttgccatgcttgtggtcgcagtggtcaatgttagtgcaaaatattgtatatatatttgagatccaccataggaatcatgatgcttgtgcagtacagttgtgttggtgttttgagtgtttgcaggtttcaaaatgaatgttaatcgtgttgcaagccatg

SEQ ID NO: 29207 - DNA, 595 bp, Zea mays
  Clone ID: LIB84-012-E5_FLI
cgccgttgccaagatccttcgcgccgtcgcgctccaggagaagcccggcctcgtcatcctcggcaagcaggcaattgatgatgattgcaaccaaactggacaaatgttagctggattgctcaagtggccacaaggaacctttgcctccaaggttacattggacacagaaaaacaaaaagctactgttgagcgagaagttgatggtggaattgaaaccatctgccttgatctgccagcagtgatcaccacggatttaagacttaaccagccaagatatgcaactttgcccaacataatgaaggcaaaatccaaagttattaagaaagtcgccgctgaagaccttggcgtagatattagatcagacatggaggtgattgaggtcaatgaaccaccaaaacgaaaagcaggggtgattctttcatgtgtcgacgagctccttgacaagttgaaaaatgaagcacgtgtcctttaaccatttgtatattattcctcgctgaatatggtctgacgttcatttatttaagttctctctccaaatgttcagacttcagaccatttacaaataaaataagtgttaacatgaaccaattaagat

SEQ ID NO: 29208 - DNA, 1039 bp, Zea mays
  Clone ID: LIB84-013-A11_FLI
gcaagtcgcatcgcacgtacggtctcaggcgcatcggcctcgccgctgcacaacgccggagacgagacgacggcggctgcgggatgacggtcttccacttcctcaactgcgccttcctcaccttcggccctcacgtcgtctactactccgccacgcccctgtcagagtatgatacaatcggcacttctataaaagcagctgctgtttatcttggaactgcgcttgtaaagcttgtttgcttggcaacattgctcaaagtacctgagaatgatagctttgacccctatcaggagttaatgaaagtttttattggattcatagatgtagctggactgtattttgctttgacccagctgacccacagaaacatctctcagaatcataagttccaggctgttggtcttggttgggcttttgctgattcagttttgcaccgactggcacctctctggattggggcaagagggcttgaatttacatgggagtacatatttcaaggacttgaagcgaatgctaatcttgtgatgaccctctcccttgctgcattggggtccttgatgtggcttaggaagaacaagcctaggactttggttccaataatttatgcatgtgctctgctcttggcaacaatgccatctatcaccagctacttgaggaggtcattggagtggcagacaccaaaggtggttggcttcgagctcttctcctcccttgttatggctttcatcagctggcagctgttctcggcttgtcagagaccgatgtaacaagacatccataccactgccaattttacgtgcaatttgaagctcctgcagatgctcctgagtacgtcagaagaattaggaagatcctttgaactttgagctacaactcttcttcttggcgttcggttacagaacattttacttagaacatctgttgtaacttgtgagctgtagagcagaaacacatgcctgaaatgagttattctataacagatgctcatgtaggcgtttgatctgaaacatttgtttattattattgcggtgtgcatttc

SEQ ID NO: 29209 - DNA, 635 bp, Zea mays; identical to SEQ ID NO: 22855
  Clone ID: LIB84-013-C12_FLI

SEQ ID NO: 29210 - DNA, 1510 bp, Zea mays
  Clone ID: LIB84-013-F8_FLI
agcaagcgcactactcctcggatagccacggcagcagcagcagccatggcttgctccgcgcaccttgtgtcccagagcctctactcgtcccaccgcgccagcccgggcgggcctaggaatctccgttcccagggccgaccgccggcgcgggcgtctccctctgcgaggcctggctcaagggtcagtggctgccggggtgtcagcctgagagtcgccgcgtcgttcgagcagggaaggaggcaagtggaggtctcttatgacccacaagcgaggtttaaccagatagcagaccaaattgacaaggatgctgggatgacacggcttaacctattctcaccttgcaaaattaatgtgttcttgaggataacgggcaagagaccagatgggttccatgacctggcttctctatttcatgtcataagtttgggtgatactatcaaattctcattgtcaccaagtaaaagtagagatcgcctgtcaaccaatgttccaggtgtcccagttgatgaaagcaatttgatcatcaaggcactcaacctttaccgacagaaaactgggactaataacttcttctggatacatcttgataagaaggtcccaactggtgctggtcttggtggtggaagcagtaatgctgcaactgcactatgggccgctaaccagtttgctggctgcatagcttcagagaaggatcttcaagagtggtctggtgagattggatcagatatcccctttttcttttcacgaggagcagcatattgtacaggtagaggagagattgtccaagatatcccaaatcccttgccggaaaatttaccaatggttcttataaagccacctgaagcatgctcaactgctgaagtttacaagcgattcaggttggaacaaacaagtcaagctgatcccatgaccctgctcgaggaaataactcagaatgggatatcacaagatgtttgtgttaatgacctagagcctccagcttttgaggtgttgccctcacttaagaggttgaagaaacgaattattgcagctggccgggatgattatagtgctgtttttatgtcaggaagtggaagcacaattgttggtattggttcaccggatcctcctgcattcgtgtatgacgatgaagactacaaggatgtttttgtgtcagaggcttgcttgctcactcgcgacgagaacgagtggtacagggaaccaatctcggccaatgccacgtctggcaaagaaggtttgcaagcctcggttgctgactgatttaagtcaggttctgtatcagttttgtgactattatacagatacaggatttgatcaacgcctcgacatggtaggaaagaacactacggtataggcggggattgttcacaagacaatctggttctggaatggaccattttcagtatagcaactattgatttgagcaacagtcagactaatggttccaggagaaatttatcccgtagatgtataaggatcaaatgaacaagggaaaatgactttctccgtg

SEQ ID NO: 29211 - DNA, 734 bp, Zea mays
  Clone ID: LIB84-013-H1_FLI
tcgacgaacaactgagaagagctgcgcctgcgcctgcgcctgcgggaaagggagaacatggtggggaagaagaggggtgttatctccccgctggaccatctcgctgggctgctggaggtgcgcgtggtgaggggagtggacctcgccatccgcgacctccgatccagcgacccctacgtcgtccttcgcatcggcaaggcgcagaaagtgaagacgcgagtggtcaagaagagcatcaatccggaatggaacgaaaaactcaccctctctattgaagaccctgccgttcctattagactggaagtatttgacaaggacactttcgttgatgatgcaatgggtaacgcggagctggacatccgcccgttagtcgagattgtgaagatgaagctccagggtgtcgctgacaaaacggtggtaaagaagctggtgcccaacagacagaactgcctagccgaggagagctccatatacatatcggaggggaaggtgaagcaagacctggtcgtacggctaaggaacgtagagtgtggcgaaatcgagctccaacttcagtgggtccacctccctggctctaagggtgtatgagaagagttatgagcgctgcctagcttgcactgctcaggttcttcgcttcacattaaagtaatctatttgaactgtagttgtaatctatagagataaaagcagtgtaaaaatagtagaaatcgttatggattaaagacagtcgaccc

SEQ ID NO: 29212 - DNA, 1067 bp, Zea mays
  Clone ID: LIB84-028-G12_FLI
ggcttcggcgcctccgtcgcgcactggcgcaggaacattggggtgttgtctgaatcctataccgtctacgcgatcgatttgctggggtttggcgcgtcggacaagcctcctgggttttcttacacgatggagacatgggccgagctgatactggatttcttggaggaggtggtcaggaggcccacggtgcttgtcgggaactcggttggaagcctcgcgtgcgtcattgctgcatcagagtccagcagagaagccgtccgggggcttgtcctgctgaactgcgccggtggcatgaacaacaaggcgatcgtcgatgactggcggatcaagctgctcctgccactgctctggctgatcgacttcctgctgaaacagcggccgatagcatcagcgctctttaaccgcgtgaaaaacagggacaatctgaaggacatcttgctctctgtttatgggaacaaagatgctgtggacgatgaattggttgagatcatacgcggaccggctgacacggagggcgccctggacgcgttcgtgtcgacggtgaccggcccgccggggccaagcccgatagccctgatgccgcggctggccgacctgcccgtgctggtgctgtggggtgaccgggaccccttcaccccgatcgacgggcccgtggggaagttcttctcgaagctgccgtcggagctcccgaacgtgacgctctacatgctggagggcgtggggcactgcccgcacgacgaccggccggacctcgtccacgacaggctgctgccgtggcttgaagcgctcctgccgcccgccgccggcgcggtgactacgacgacgacgacggttgtctaaggctaataataatacgccttattgctgactggatctttgaagtctagttggactcttcatttttaactctctagttatctctttataaaaaataaattctataaatcttatagattttgtttagaaccaactcagtttttaaaaaattggcttttattttttagctagcagtggccaacttcttagtttctaagagcatctctaatctaacatagttcctatttcac

SEQ ID NO: 29213 - DNA, 1244 bp, Zea mays
  Clone ID: LIB84-028-G3_FLI
aacgccgtagcaactagcaacgctaccacagtgcgcgcttgaagataggttaacaccgcttcttatcctcagttccaaccccagctcctcagttctcgtcatcgtcctcgcgctcagtgtcatttgcagttcccggtagcagccatggcgtcggtgcagctgtctgggccgcgggtggtggcggctgcgaaaccggctgcgttgggcgggctcctcctgacgccgtcccttgcggtgccaaaggggcggagggccaggggcctcgtggtgagggccgccacggtcgtgtcacctaagtatacatccataaaaccattgggagacagagtacttgtgaagatcaagacctctgaggctaaatctgatggagggattttacttccagtatcagttcagacaagaccacaaggaggggaaattgttgcggttggagaagggagaagttttggaagtaaccgcattgagatcagtgttccggttggtgcacaagttgtctactcgaaatatgcaggcacagaattgaaattcaatgacgccgaccatctcattttgaaagaagatgacataattggtattcttgacagtgatgatgtgaaggatatgaaaccactgaatgatcgcattctgattaaggttgctgaagctgaagaacgaactgctggtggtttgctattgacgcaggcaactaaggagaaaccttctgttggatcagtggtagccgttggcccagggccgttgggcgaggacggcagcaggaatcccctgtcgatcactcctggaagcaacgtgatgtattccaagtatgcggggagtgagttcaagggcgaggacggtgagtacatcgtgctcagggcgtctgacgtgatggctgttctttcctgatccccaaaccatacagcgccaggtgcgcgataggaagttttgatgttgaggccgaaccttatcttttatttgctcttgtttggaattggtggaggcttttgaactgtaatctggtgcgaattataaggaaaataagccgagttgtgtagacttgagacaggactgtgctgtgctgtttggctggtaggtgagctaaccagtgttcagctggtgggtgagctgaccagcacgtcgggttcggctgttcttcctgatgtcagcgttgtacgccaaggttggccaacggcatcaatattactaatagcatctaggctaccgtttgagtttttcatggattaatgacaacacaagatgtgactatt

SEQ ID NO: 29214 - DNA, 241 bp, Zea mays
  Clone ID: LIB84-028-G5_FLI
ccttggccgagtgctgcttttgcgcggacgcccggacgacggccatcctggtcctggccgaccgacgacggggcgcgcccgcgacggcccggagcgacggcgcgttgctgccggcgcagaggggcttcccgagcccttgcgccacgggcagtgacgctgcgacggtggcggcggccatggccatgggtcttgggctcaggcgcttgcagtcgggcctcgggcgtgtggtggtctgattctg

SEQ ID NO: 29215 - DNA, 1309 bp, Zea mays
  Clone ID: LIB84-028-H3_FLI
ggaccaaatacacgctcccgtctcatccgatggctcctctcctttccccgccgctgctcgcggacagcgtcaccaagttccatgcggcctcaacgccagtctcgtgctccggtagcccacaacgctacgtcatcacagggttggctggggccggaaggggagagcacgactggcgtcggaggacgtggggaagaacgaacctgagggtgaaagcggtggcggcagagtcccgcagctcggaggggggaatcgctgaagattattacgctgttcttggcgttatgccagatgcaacgccgaagcagatcaagaaagcatactacaactgcatgaaatcgtgccatcctgatctcagtgggaatgaccctgacgtgacaaatttctgcatgttcatcaatgaagtttacacggtgcttaccgatcccatccagcgagcagtgtatgatgagatacatgggtatgccgcgacggcaaccaatcctttcttggatggcagcgcaccccgggatcacgtgtttgttgatgagttcagctgcataggatgcaagaactgtgctaacgtgtgttctaaggtcttcgaaatcgaggaagatttcgggcgggcaagagtttatgaccaatcaggcagcacagaactgattcaagaagctattgatagttgcccagttgactgcattcactggacttcagctgcgcaactgtcgctccttgaggatgaaatgcgcagagtggagagagtaaatgttggattaatgcttgctgggatgggaggctcaattgatgtgtttcggatggcaagttcacgctgggagaaaagacaagccaaagtcctggagaaggtcagaaggcggatgagccaagatgattccagaaagggtggctcatggagtgacatctggggggcaccaacaagatacgagaagaacgaagaggaggtgaaggagagagcaaagcgagccgcggctgcagcaaggaggtggcgggagtactcacggaaaggcgccgacaagcctccaacattcaagcttccggaggcagtgcccagcaaggagtgagaacccaacacagtcagagatcgtatggaacactgcagagatacttagcccccccattcacttcgtgtatagcctgatcatttacagagagccgtaagcctgtatagtatctgctctctgactccacatggtatacctgtaaatcctctgttagtgatagctcgggtcgattacccatagagtttctcagattgcagacgcaaaacaagtgtacacagaaagccttaatccatagaacacgggcacatactttt

SEQ ID NO: 29216 - DNA, 888 bp, Zea mays
  Clone ID: LIB84-028-H8_FLI
ggatattgctctggaggaattggcccccacccatcctattaggctttggctggtgctgaacttctcaactcgcctgaccatgcgtccatgcttgcagtctcgccaaataggtttgatttttgcacccattacatggactgtgtagtgttattttcttctttttttgcaatccttatgatccgaatgtgagctctgtgaaaaatatgaactaaggttattatgcatttcacagttcagacagctgttatgaaataacctggctttagctataacttgtgactagtgcaacatattagtattttttatagactagtgtaagcaactaaaggtctgtttggttgggctgtggctgtggaaaaagttgctggggctgtgagctgtggaaaaagctgctgtaggctgtatgctgttaaaaagctaaaaaacaattggtggaaaccactaaaagtcgttaaaagttcttcgatatacgttttcacagttccatccaaaagccactaaaagcaggtccaggggtgctttcagttttgcactacgagaaagtcggcttttagaaaaagctgcttcttggatccaaccctttggttggcttttggcttttagggggcaaaagccaaagccaaaagccaaaccaaacacaccctaaaggtgagttgaatctaaactgcagatgaagaactgaagatagtggtaagttattatgatcaacctgggattgccctcaccaacgggcgtgaatcgctcaggagccatcgatcccgtgtatcttttaactagaagtaatttatgctgggacaaagtctaacaacatttttgagcaagttactaataacatcagtaacttggatggttctatcgctataaatgttgattgtgcttcaaaagttg

SEQ ID NO: 29217 - DNA, 1495 bp, Glycine max
  Clone ID: UC-GMFLMINSOY014D11_FLI
gtagatgccaatgaggagaagaacaaagaccttgcatcacaatatgatgttaagggattcccaacaattaatattctgagaaatgggggaaagaatgttcaggaatacaaaggtccccgtgaagcagatggcatcgttgactatttgaagaaacaaagtggtcctgcttcaactgaaattaaatctgctgatgaagctactgcttttattggtgaaaataaagttgctattgttggagttttcccgaaattttctggagaggagtttgacaacttttctgccttagcagagaagttgcgttctgattatgactttggtcacactctgaatgccaaactccttccaagaggagagtcatcagtttctgggcccgtagttaggctgttcaagccattcgatgaactttttgttgacttccaggatttcaatgtggaagctctagagaagtttgttgaggaatctagtacccctgttgttactgtctttaacaatgaaccgagcaatcaccctttcgttgtcaaattcttcaacagtcccaacgcaaaggcaatgttgttcatcaacttcactgccgaaggtgctgaagctatcaaatcaaaataccgtgaagctgctgagcaatataaacaacagggtgtcagctttttggtgggagatgttgagtctagtcaaggtgctttccagtattttggactgaaagaagagcaagtacctctaattatcattcaacataatgatgggaaaaagttttttaaacccaatttggaagctgatcacattccaacctggttgaaggcatacaaggatggtcatgttgcaccatttgttaagtctgaacccattcccgagactaacgatgaacctgttaaagtggtagttggggccagtcttgaggacattgttttcaaatctgggaagaatgttctgctggagttttatgctccctggtgtggtcattgcaaacagttggctccaatattggatgaagttgctatctcatatcaaaatgaagctgatgttgttattgcaaaactggatgcaactgccaacgatatcccaagtgaaacctttgatgtccaaggttatcctaccgtgtacttcaggtcagcaagtggaaagttatcacaatacgacggcggtaggaccaaggaagacatcatagaattcatcgaaaagaaccgggataaacctgctcagcaagaacaaggaaaagatgagcaagaacaaggaaaagatgagctttgaaaggagcttttcgtctcatgggatatatagacacaaagttacatgtgggttgcacacccttttgtatctcgttatcagaatttagtgaaccataggtgcatctatcttcctttgatctttttatctttttggttttctttatgtatggttttccttaataaaaacgggagcttttatttggcggattagagtttagtgctggaaaagttgtagctggtatccgagttaaattaatggatgtttttagatc

SEQ ID NO: 29218 - DNA, 197 bp, Glycine max
  Clone ID: UC-GMFLMINSOY014E07_FLI
tgttactatatatacaagagattctgcaaactgaaaaagggattcttactaaagcaaactcaaacaagaacaacttccactcatttggcatctaccgtagtaacacaagatcaaaagcagcttctcttgtatttattgtgttactatatattgtactaggtctcgtgggaaataaaatttttataaattttaatttt

SEQ ID NO: 29219 - DNA, 1841 bp, Glycine max
  Clone ID: UC-GMFLMINSOY014G08_FLI
ctctttctctttccctgccactgaactctcacaactcaatactcttctccccaaaacttaaataaattaacaaacaatcgatctcacttaacataacgccattttcgtgcttttatggacttgcctcgccaagagcttttgtgattgtcaagttgcgaagcgcgttgcggatctgtaatcggaaatactggatcgttccaatggctgggagtaacgagcttaaccccaacgattctaagatggtggttccgctgaatatgtgggttctgatctcaaatttcaagttggcatacaatcttcttcgtcgcccggacggtactttcaaccgggacttagcagagttccttgatcggaaggttcccgcaaatgccaaccctgtggacagagtgttctcctttgatgttgttgttgaccgtgaaacgaatcttctgactcgaatctatcgtcctactgagggagaagaacgttcggtgaacattcttgaccttgagaagcctgtgagctctgaggttgttcctgtcatcatatttttccatggtggaagttttgcgcattcttcagccaatagtgctatatatgacaccctttgtcgtcgcctagtgggtatctgtaaggctgttgtggtgtctgtgaactataggcgtgcacctgagaataggtatccctgtgcatatgatgatgggtggacagctcttaagtgggttagttctagatcttggctccagagtaagaaggataagaaagttcatatctacttggctggggatagctcaggtgggaacattgtgcaccatgttgccctcaaggccgtggagtcgggaattgaagtgtttgggaatattctgctcaacccattgtttggtgggcaagaaagaaccgagtctgagaagcgcttagatgggaggtattttgttagagttaaggatcgagactggtattggagggcttttcttcctgaaggggaagatagagaccaccatgcatgcaacccgtttggccccaaggggaagagtcttgaagggatcacctttcccaagagccttgtggtggttgctggtttagaccttgttcaggactggcaattgggttatgccaaagggcttgagaaggctggccaagaagtgaaattgattttcctggagcaagcaaccattgggttttatttgctgccaaacaatgagcacttctctcctgttatggatgagataaaatattttgtcagctctgactgttgataggcttaacttttgctataatacacaacaagtggacgttagaagattgtgtaggaaataggtatgctactaaacctttttttccttttttctttttgggttctttgctgtaggactctgctcccgctattaggtacttgtatgctactaaatgtgtctgagattggtgtaatcagcatatagctgtatgatgcttttccggagcacataatgaggaaattgggtgctgcggataggtgaaagctttttaggacaaaaaggagaggaaggtgttattctatttctgggcgtgaccttgatgccaatcaggtggggcttgtcgttgtctgacaagtgttatatatatatatatatataactaattttggaactcggataggaaaatatcaataatatgttggtgctgttaggttatatacgtctgtgctatctccatgagtgtttgttttaagactgtttactttttttctctatatagctaatttgacattcctatgtcttgggttgggtttgtccttgttggatgatggacactccttgcaaatgtaaatggatggatgtcttttccgcagcaatgtttaaggcttgtattatgtttgcttctgt

SEQ ID NO: 29220 - DNA, 564 bp, Glycine max
  Clone ID: UC-GMFLMINSOY016D10_FLI
ggtttggctgatgtggatagtaatggagctgcttccagcaaagcaacgagctcaaaaaatgctgctgggagcagcaaggggagaggtggaagaggaaaagcgactattcgaactatatccagcagaatgactgatgataatcattggtcttgtgagcactgtacctatgccaatgttaagtctgccaccacatgtcaaatgtgcaatcaacagcgtcgatgaaacttggatccttcattagaaatacatgtcttctgcctaaggccaatgcaccaaaagctgaaatggagtccttactttggttatatcatatgctggctcctttttgtaatgctatttactgtgaaaggggcttaagtcgcttaagaagggttatcctgcttgcactcctattgaatacatcccaatttaatgtatataatgttttatcattaaaattttcgtatggggtttctgcaacaggcttctgtaaccgaatatcttatacagcacatgccggagatgaacacaaatgtgcttgtttgtatcctgatttcttctagtaaatctctatgcagcttcttt

SEQ ID NO: 29221 - DNA, 2821 bp, Glycine max
  Clone ID: UC-GMFLMINSOY016G08_FLI
caaagatgacaggtgggatgtttggaaggaaggggcaaaagataaaggggacagtggtgttgatgccaaagaatgtgttggacttcaacgccataacctccgtcggaaaaggcagtgctaaggacaccgccaccgatttcttgggcaaaggcttggacgcattaggtcatgcagttgatgctctcactgccttcgctggccatagcatctccttgcagcttatcagtgctactcagactgatggtagtggaaaaggaaaagttggaaacgaagcctatttggaaaaacatcttccgaccttgccaacgttgggagcaaggcaggaagcattcgatattaactttgaatgggatgctagttttggaattccaggagcattttacatcaaaaactttatgactgatgagtttttcctcgtcagtgttaaactcgaggacattccaaaccatggaaccattaacttcgtttgtaactcatgggtttataacttcaaaagttacaaaaagaatcgcattttctttgtcaatgatacatatcttccgagtgctacaccaggtccactagttaagtacagacaagaagaattggaggttttaagaggagatggaacagggaagcgcagagactttgacagaatctatgattatgatatctataatgatttgggcaatccagatggtggtgatcctcgcccaatcattggaggctctagcaactatccttaccctcgcagggttagaaccggtagagaaaagaccaggaaagatcccaacagtgagaaaccaggcgagatatatgttccaagagatgaaaacttcggtcacttgaagtcatctgatttccttacatatggaatcaaatccttatctcagaacgtgatacctttgttcaaatctataatatttgacttaagggtcacatcgagtgagttcgatagcttcgacgaagtgcgtggtctctttgaaggtggaatcaagctgccaacaaatatactgagccaaattagccccttaccagtcctcaaggaaatcttccgcactgatggtgaaaatacccttcaatttccaccacctcatgtaatcagagttagtaaatctggatggatgactgatgatgagtttgcaagagagatgattgctggtgtaaatccaaatgtaattcgtcgtcttcaagagttcccaccaaaaagcactcttgatcccgcaacctatggtgatcaaactagtaccataacaaaacaacagttggagattaacttgggtggggtcacagtagaagaggcaattagtgctcacagattattcatattagattaccatgatgcattcttcccgtatttgacgaagataaacagcctacctattgcaaaagcttatgccacaaggacaatcctgttcttgaaagacgatggatctttaaagccacttgctatcgaattaagcaagcctgcaacagtgagtaaagtggtgttgcctgcaacagaaggtgttgagagtacaatttggttgttggccaaggctcatgtcattgtgaatgactctggttatcatcagctcataagccattggttaaatactcatgcagtgatggagccatttgccatagcaacaaacaggcatctcagtgtgcttcaccccatttataaacttctttatcctcactacaaggacacaataaatatcaatggccttgctaggcagtccctgattaacgcaggtggcattattgagcaaacatttttgcctggaaagtactccattgaaatgtcatcagttgtttacaagaattgggttttcactgaccaagcattaccagctgatcttgtcaagagaggattggcagttgaggatccctctgccccacatggtcttcgccttgtgatagaggactacccttatgctgttgatggacttgaaatatgggatgctattaagacatgggtccatgagtatgtctctgtgtattacccaacaaatgcagcaattcaacaagacactgaacttcaagcatggtggaaggaagttgtggagaagggtcatggtgacttaaaagataagccttggtggcctaaactgcagactgtggaggatctcattcaatcctgctctattatcatatggacagcttcggctctccatgcagctgttaattttgggcaatacccttatggaggttatatcgtgaaccgtccaactctagccagaaggtttatcccagaagaaggaaccaaagaatatgatgagatggtgaaggatcctcaaaaggcatatctgagaacaatcacacccaagttcgagacccttattgacatttcagtgatagagatattgtcaaggcatgcttctgatgaggtctaccttggccaaagggataatccaaattggactacggattcaaaggcattggaagctttcaaaaagtttggaaacaaactggcagaaattgagggaaaaatcacacagaggaacaatgatccaagtctgaaaagccgacatgggccagttcagcttccatacacattgctccatcgttcaagtgaggaagggatgagtttcaaaggaattcccaacagtatctccatctaaaatgtgtgtgtggtttgcttatctattgtgcttttgaataaaatagacaatacttgtctatggttattattggctgtatgtctgtatttggatgctctcgatcggtttgcaagtaataagagtgttttcactgtcactttgtatttcgatcatcttaattatgtttactagtaataatgtggaagctgtacgtttgttaattctaggttaaataatagagcaattgtttttgaact

SEQ ID NO: 29222 - DNA, 1842 bp, Glycine max
  Clone ID: uC-gmflminsoy022a10_FLI
ggaggattcaggttttaagcctctgctcaagccgtatcagttggttggcgtcaattttttgctcctactgtatcggaaggggattggaggagccatattggcagatgaaatgggtcttggcaaaacagttcaggccatcacatatttaactttgttgaaacacttgcacaatgattctggtccacatcttatagtatgtcctgcttctgttctggaaaactgggaacgggaattaaaaaggtggtgtccatccttctctgttcttcaataccatggggctggacgggcagcatactgcaaggagttgaactccctgtccaaggcaggattgcctcctccatttaatgttcttcttgtgtgttattcactttttgaacgacacagtgcacagcagaaagatgatcgcaaaatcctgaagcggtggaggtggagctgtgtgctgatggatgaggcacatgctttgaaggacaaaaatagctttaggtggaaaaatctaatgtctgttgcaagaaatgcgaaccaacgcttgatgctgacagggacaccacttcagaatgatctacatgagttatggtcattgttggagtttatgctgcctgatatttttgctactgaagatgttgacctaaaaaagttactaaatgcagaagatggagatttaattggtcgtatgaagtccatcttagggccatttattttgcggcgactgaaatctgatgtgatgcaacaacttgttccaaaaatacagcaggttgaatatgttataatggaaaagcagcaggaaactgcttacaaggaagccattgaagagtatcgtgctgtttcacaagctcggatggaaaaatgttccaatcttaattcaaagagtgttcttgaagttcttcctcgacgacagataaacaactattttgttcagttccgcaagatagcaaaccatcccttgttaataaggcgaatctacaatgatgaggatgtcattcgctttgctagaaagctacatccgataggtgcttttggttttgaatgtactttggacagagttatagaggagcttaaaaattacaatgacttctgtattcaccggcttttacttcattatggtgtcaatgatagaaaggggatccttccagataagcatgttatgctttctgcaaaatgtcgggccttagcagaacttcttccttcactaaaggagggtggtcatcgagccttgatctttagtcaatggacttcaatgcttgacatattggagtggactttggatgtcattggattgacctataaacggcttgatggaagtacacaggtggcggagaggcaaacaatagttgatacgttcaataatgatacttcaatatttgcatgcttactttccacgagagctggtggacagggcttaaacttaacaggagccgatacagttgtaattcatgacatggattttaacccacagattgatagacaagccgaagatcggtgccatcgaattggtcagacaaagcctgtaaccatatatcggctggtgacaaagggaacagttgatgaaaatgtgtacgagattgcaaaaagaaagctagtattagatgctgccgttctcgagtccatggaggagattaatgaaggtgacatgcccgagaagaccatgggagaaatattgtctgcaattttattgagttaaaatattgatctaagaaaaacagtttaatttatcgtcactcctttcctatagttccaatcttgaattaatctgttgatttgggatagaagagaactggcagcctacaaattagtgagattcttctctcctaattatgtttttttctttaactcgagattttgttt

SEQ ID NO: 29223 - DNA, 1313 bp, Glycine max
  Clone ID: UC-GMFLMINSOY022C08_FLI
aagagagagaagcgattcggtccaaaatcaagcaaattgatgatgcactgaaagccatagacaaggatatccagtctctacaggaggaactgacagctgtttctcagaagagggacaaggcttttgagagcatgcagcagctaagaaaacagcgcgaggaggggaacacctatttctaccaaagtcgtacagttctgaacaaagcacgggagctggctgcaaagaaagatattaatgctcttgatgaagtttcacagacagaggttgagaaatttatggcactctggaacaaggacaaagcatttaggaatgattatgaaaaaagaattttggcctcattggatatgcgacagttgagtcgggacggacggatgaggaacccggatgaaaagccaatcctggaagaaccaaaacctgctgaagctgaagcattaccaaaaactttcacaaaacagccaaaggaggagcctaagccttctccacaagaaactttgcctgctcagaaagaatccaaaaacaaggggagggatttgaaatccaaaccggagagtaaggatgtagcagaaactgatgaatatgaatttaaaaatccccaaaaggaggcccctgccaaagagtgtgaaatcgatccagcaaagctaaaagagatgaaaagagaggaggagattgcaaaggcaaagcaggccttggaaagaaagaagaagttagcagagaaagctgcagccaaagcagccatcagagcacaaaaggaagctgagaagaagcttaaggaccgtgagaagaaagcaaagaagaaatcaggtgctgcagctgtggccaaccctgaggatgaaccaaaagatgaagttgtcgaggctacagagccagaaaaggttaacgatgatgtccaagtcctggctccagtgaaggaaaaggtccaaaaggagagtggcatcaggtccaggggccgagcaagaggcccagactcgattccaaaagctattattaaacggaagaagtctaacaattacctgatatgggctgcagctgcggctttgctagtcctcctgttggcagtgcttggatacatctatcttttctgaaaagcttagatgtagaaggagctgtgaaaccaattttctgagtgggtggctaggtttgtgaggtagcataagttatgttcatgtttctatacatcctcttgggagaatagatgaaacacactttgttgtgcttagctcctgctttggggagaaaactgcatgcatacatttagctttgactatgtactttcaaaattttgttcagatttcatttactgaatttgcttctat

SEQ ID NO: 29224 - DNA, 769 bp, Glycine max
  Clone ID: UC-GMFLMINSOY022E04_FLI
actggtctgggtttacaaattagtgcacaactgactagacaagatggtcaaatattttatagtttgttgtttgagaacaactctcaggttccacttgatggcttcatgattcaatttaacaagaacacatttggtcttgcagctgctggaccccttcaggtttcacagttgcaacccagaatgtcagctaggacactcctccctatggttatgttccagaatatgtcgcaaggtcctcctagctcagctttacaggtcgctgtgaaaaacaatcaacaacctgtgtggtatttcagtgataaaatctcattacttgtattcttcaccgaggatggtagaatggaacgttccagttttctagagacatggaggtcccttccagattcaaacgaggtttccaaggacttcccagccattgtgattggcaatgcggacgcaacactggaacgactggctgcgtcaaacatgttctttattgcaaagcgcaagaatgcaaaccaggacgtgttttacttctcagccaaactccctagagggataccattcttaattgaacttaccacattgattggaaaccctggcgtcaaatgtgcaatcaagactccaagccctgaaatgtcagcacttttcttcgaagccattgagactcttctcatgggttaatgggttttaaatttagttttttcttttaatttttgtttatatattgtttttgttagaatatgtgattaatatcctggacaggtgtgtaatatcttatttggaaaag

SEQ ID NO: 29225 - DNA, 1003 bp, Glycine max
  Clone ID: UC-GMFLMINSOY022H04_FLI
cagaagtaaactttttaggaaggctttctcaccccaacctggttaatctattgggatactgttgggacgaggataagcttcttctagtgtatgagttcatgccaaagggaagcttagactatcatctattcagaggaaacataacaccactttcttggaacacacggcttaaaatagctattggtgcagcttggggattagctttcttgcacgcctctgaaaataatgtcatattcagtgatttcaaggcctcaaatatacttcttgacgggaattacaatgcaaagatctcagattttggctttgctagatgggggccttttgaaggagaatcacatgtatctaccagggtcattggcacatatgattatgctcctccagaatacatagcaacaggccacttgtatgtgaagagtgatatctatggatttggtgtagtgctgcttgaaatacttacaggcatgcgggcacttgacacaaatcgacctcaaaccatgcagaacctagttgaatggactaagccttgtctttcttccaaaaaaaagttgaaagccataatggatgctaagatagagggtcaatattcacttgaggcagcatggcaagcagcaaaacttactctaaaatgcctaaaatctgtccctgaagaacgtccttctatgaaagatgtagttgaggcattggaagccattgaagctatccaaaacccacaattcgcagcgtacatctcatccaccccctcggcagggtcgtaagagtataaacaaatttataagaaaaaaaaaactagaaattgagattgattatatatagcaatatggtccattgaatgggttgtatcagtcatttaataaatgtgattttctttttcttttgctggttggaggggggaatttcacaagcatgttaacatatatgatttccttttgaattattcacattctttagtgggaaaacattttgtactagaacagaattttgatgctaacatgtcacttttttc

SEQ ID NO: 29226 - DNA, 1539 bp, Glycine max
  Clone ID: UC-GMFLMINSOY023B06_FLI
ctgagatcaaggaagatggtaaactccatgtcactgtgaggaaatccaatgcttcaagatcagacatcttctctagaaggtctcagggtctctcttccaccactccacgcccttccaaccttaccaatgctgagatatactctttgcaatcctctaggaaccctacgccgagaggctctagtttcaaccacactgatttctactccatgatggctgctggtggcaggaactcaaactttggtgcctctgatgtttatggcctttcagcttcaagagggccaactccaaggccttctaactatgatgaagatggtgggaagccaaagtttcattaccatgctgctggtggaactgggcactaccctgcacctaaccctggcatgttctctccctctaatgggtccaaaagtgttgctgctaatgctaatgccaagaggcctaatgggcaggctcagctgaagcctgaggatgggaatagggaccttcatatgtttgtttggagttcaagtgcttcaccagtttctgatgtgtttggtgcccatgagtatggaggaggtcatgatcagaaagaagtcaaattgaatgtatctccaggaaaagtggagaataatcatagagacactcaagaagactacctagagaaagatgagttcagctttggtaatagagaaatggacagggagatgaatcagcttgaaggtgagaaggttggagatgggaaaccaaaaaccatgcctccagcaagtgtgatgacaaggcttatattgattatggtgtggagaaaactcatcagaaaccccaacacctactctagcctaattggtctcacttggtctcttgtttcattcaagtggaatgttgagatgcctgccataatagcaaagtctatctccatattgtcagacgcagggcttggcatggccatgttcagtcttggtctcttcatggctttgcaaccgagggtcatagcatgtggaaattccacagcagcttttgccatggctgtgagattccttacaggtccagctgtcatggcagctgcttccattgctgttggactcaaaggtgttctcctacacgttgccattgttcaggcagctcttccccaaggaattgtcccatttgtctttgctaaggaatataatgtacatcctgatattctcagcacagctgttatttttgggatgctgattgctttgcccataactctagtgtactacatcttgttggggttgtgaatgaaagaaatgatggatgatacagaagattcacgtgtggcatccatgcaaagcttggttgaggttgttgagaatgagagaaaaaaaaggtcataaagcaacaatagaaaagaagcatcacgagaatttggataggaagaagaaccccaggatcagttttttttatttatttgttttctttttcttttttgaatgaattgccctttcttagtgaaaattaatgtaaaatcatgatgtagctaatttacaaaatgattatctcgttaaaattttatattataatgacctcggattccatgtc

SEQ ID NO: 29227 - DNA, 1341 bp, Glycine max
  Clone ID: UC-GMFLMINSOY024E10_FLI
gagaatatcacacattctctgtgtacacttgaatttgagacacgtcgtgcatcatactattggttgttgcatgcgttaagcatttaccaaccttatgtatgggagtattcaaggttgaatgtctctaacacagttatgtcaaagcgtaagctaaatcgtctagttacagagaagtgggttgatgggtgggatgatcctcgtttgatgacactagctggtttgcggcgtagaggcatgactccaactgcaatcaatgcttttgtacgaggaattggaataactagaagtgatggcactttgatttctgtggaacgccttgaatatcatgttagggaagaattgaacaaaacagcttctcgtgcaatggttgtcctacatccactcaaggttgttattactaatcttgaagccaactcagtaattgaggttgatgcaaagaaatggcctgatgctcaagctgatgatgcttctgctttctacaagatttcattttccaatgttgtatatattgaacattcggacttccggatgcaagattcaaaagattattatggccttgctcctgggaaatctgtgatactcagatatgcatttcctataaagtgcactgaagttattctagctgatgataatgagactattcttgagattcgagcagagtatgatccttcaaagaagaccaagcctaagggggttctccattgggttgctcaaccttctcctggagttgatccattaaaggtggaagtcagattgtttgagaggctgttcctatcagagaatcccgctgaacttgacaactggcttggcgatttaaacccaaattccaaagtgataattcccaatgcatatggtgtgtcttccatacagaatgcaaaagttggggacaatttccaatttgaaagattaggactcgacatcagaaaaacttgtttttaataggactgtcaccttaaaggacagctatagcaaaggtggaaaatagggttcctgaatattgcttagaaataacaaggtgggggacaggcaggtctggggttaatacttgtttaaatggctacttataatgcatagttttttctttgagggggtgggggggttatgtacaaacacatttactggccacttagccatgtacattttctcaagggattactcaatagttccccagttatttgattaacttttgtttggttggttttgtagtttgaaggttatatttgtatactctcaatgaagtagtagcaacattgctgttattttcctacgatttttgtgagtgtaaaattagtattgaagaatctttccctttacataataaattaagtgaaaatctagtct

SEQ ID NO: 29228 - DNA, 1645 bp, Glycine max
  Clone ID: UC-GMFLMINSOY028A10_FLI
cgcgatcgtcgaatgaaaatgaaaaagaaacgaaaggaaagcgaggccagtggacggtcgaacttgccggatgagatttcgaagtcgcattactcccttgagcggcgttcgcggttgatcaaacggtgcagggaagacggcgtcgtggcgacggtgccgccgtcacgcggcgcgtcgttattcctaacgccgtcgcggggcttgaagcggaagataggttgcatcgacaaggccacgcagatggggcgcagcgtgaggatcgaggacgactacgtgaccgggggcagcgcgatcgggcaggggaagttcgggtcggtgacggtgtgccgcgcacgtgcgaacggcgcggagcacgcgtgcaagacgctgaggaagggggaggagacggtgcaccgcgaggtggagataatgcagcacctgtcggggcaccctggggtggtgacgctggaggcggtgtatgaggatgaggagtgttggcatcttgtgatggagttgtgttctggagggaggttggttgataggatgaaggaggggccgtgttcggaacacgtggcggcggggatactgaaggaggtgatgttggtggttaagtattgccatgatatgggtgtcgtgcatagagatattaagcctgagaatatcttgctcaccgcggccgggaagatcaagcttgcggatttcgggctcgccatcaggatttctgagggtcagaatttgacaggtgtggctgggagccctgcatatgttgcgccagaagtgttgttgggtagatattctgagaaggtggatatatggagttctggggtgctcctgcatgctttgttggttggtggtcttccatttaaaggagattcaccggaagcagtttttgaggaaattaagaatgtcaaactagattttcaaacaggggtgtgggaatcaatatctaaacctgcacgagatcttgttgggagaatgctgacaagggatgtttcagcaaggataacagctgatgaagtactaaggcatccatggatattgttctatactgaacgcacattaaagatgctgcctgttaaatcaaaattgaaactccaaaatgcagctgcttgccaaaatgaatctgggttagtaggaggaaacaagatagttgatgatggctcccttgatgaggattattcaagcccgttttcatcctctgagagttgcaattcagagtatcatgaggactgtgcgtggattgatgcactttccactgcagtttcacgtgtgaggatatccgaaacaaagaggaccaagttgtggggttctactagtccacttgatcaacaaggttcatctaacatgaagactaacctctgtaaagcattctgacctactgacatgctgacaccgacagtatacaccacaatatcgactgctttagtgaggttctataaaaaaacttagctcaacacattctacagttggcaaaagtggatttcatgctaacatccattattagggtgacctgggtgccagtttctttttagtgtgagatctaattacagtatgtttctttggttcctttgtccatatagcctaataatgattagctgagaaaactcagttgtacagaacttgtacatcttaatgttaatgtgtggccgcatgtttttactcttgc

SEQ ID NO: 29229 - DNA, 1507 bp, Glycine max
  Clone ID: UC-GMFLMINSOY035E10_FLI
ccagttgttggtgtcagagggtcctttgatgcaggaagtatactcttatccaaggacagcttgggagaaatcccccatttctcatagcacccgaatatatagtggagagagtacagtccaagggtttgccattgaaaaggaatatcatgttgagcttcttggccatgatttcaatgatagggaattgatagttagatataaaacagatattgataacaagaagattttttactcagatttaaatggatttcagatgagtcgaagagaaacttacgataagattcctctgcaaggtaattactatcccatgccctatctagcattcatacaaggatcaaatggtcggcggttttctgtccattcccggcaatcattaggtgtgactagccttaaaaatggatggctagaaataatggttgaccgccggttggtaagagatgacggtcgtggtttgggacaaggagtgatggataatcgtgtaatgaacgttgtcttccacctaaccgtggaagccaatgtttctgccacatcaaatctggttcccaccccttttccttacagcccttctcttttgtctcaccgagttggttctcacttgaactatccaatacatgcatttgtttctaagaaaccgcaggatatgtctatgaagccaccgcctagatccttttctcctcttgcagcccccttgccgtgtgatttgcacatagtgaacttcaaggttcccaagcccttaaaatttttgcagcaaccacctgaaggtcctagatttgggctaattttgcacaggcgacattgggattcttcgtactgccagaagggaagatcgcaatgcactaatctggccaatggcaccatgaatctgttcagcatgttcaagaatcttacagtctcgaaggccaaagcaacttccctgaatctcttgcatgaagaccctgaagtaatgggattctcagagcagtttggagatcttgcacaagaggggcatgtagccatatctccaatggaaatgcaagcttacaagttggaattgaggccacaaccacaatagaatactcattactgagttgctcctgctgatttaagctgaaccacacgggattcttggaccgattcaaagacgaattgttagcaaatttttttggctgctccattgatggtagggatgagttattcttggactgcttgctcggtggagcaggtaagagaatgtccaagcaaagaggagttacattggttgatgaagtgtgagaatgaacttttgtagattgctgttatgaagacatgacatgaatgagattgtagcatctgcggcttcttgtctgtttttgtgctttgctgtagcatttgtttacgttttcagacttaaaaagatgaattttgctttgtccatgttattgtataacatgtctcttagagactagatacatgtacagatttaatacctccatgcaggggagagagtataatcttttttggaagtgggctcaacaatttacaaaacaat

SEQ ID NO: 29230 - DNA, 1112 bp, Zea mays
  Clone ID: LIB84-003-A8_FLI
ccccgcgccactaccgcctctcacgacctcctctctttcgcgaccacagcaacaaggaggcggctgctcctctccaccgccaccaccaccattgccgccgccatggccgcttcttcctcctgcaaggtcatcgactcccacctgcacgtctgggccacgccacagcaggccaaggaggagtacccgtacttcccaggccaggaacccacgctgcgtggcgacgccgacttcttactcgagtgtatgagtgaagctggagtggacggggctgttattgttcaacctattaatcatatgtttgatcattcgttggtaactagtgtgttgaagaaatacccatccaagttcgttggttgctgtcttgcgaatcctgcagacgatgggactgggattaaacagcttgaacatctgattgtacaagaaaaataccgtgctgtgaggttcaacccaaacttatggccatctggtcaaaagatgaccaatgaggttggaaggtcattattttcgaaggcaggggaacttggagtaccacttggaataatgacgatgaagggagttggtccatatattcaagaaatagaggaactgtgtagggattatcctgcaactaccgttattcttgaccatatggctttctgcaagccaccaacgaacgatgaagaagagaaggcattctcttcatttctaagcttatccagattcccacaggtttatgtcaaatacagtgctcttttccgcataacaagagaagcatatccatatgaagacactgctcagcttctttccagtgtgatatctcactatggagccagtcgagtaatgtggggaagtgacttcccctatgttgttcctgaatgtggttacaaaggaggaagggaggcgatttctcatgtcgccagcaagataccagtttcccagtcagatttggaatggatcttgggaaaaacagtgagccaattattccaaggtgcatgggttactccatgatcactgtagtgtattccagagcaactatatcaacaggaatatatgtcctattttccagtgtttacatgtattctctctgtttcaaataatgtttttatctagatacatatatctaggtgtgtagc

SEQ ID NO: 29231 - DNA, 1176 bp, Zea mays
  Clone ID: LIB84-003-E6_FLI
cgaaaccgaagcacgaattaatcatcccggttcagccctctcctggcgcggcgtcgtcgtcggcctcggcctcggtgctcaacggcgccgtggactggtggcgcgacgtcaacgagtcgccgctgtggcaggaccgcatcttccacgcgctcgccgtgctctacggcatcgtctccgccgtcgcgctggtccaattgatcagaatcgagtgcagggtgccagagtatgggtggacgacgcagaaagtgttccatttcctaaacttcctcgtgaacggcgtgaggtctgccgtgttcgtgctgcggcggaatgtgcaactcgtagagcctgagataatacagcatgtgcttctagatatgcctgggcttgcattcttcacaacatatgcacttctagtgctcttctgggcagagatttattatcaggcacgtgcaatgtccactgatgggcttagaccaactttctattggatcaatagcgtggtttatgcaattcagataatcctatggttggttttgtggtggaaaccagttcgaattatggtcatcttgtcaaagatgttctttgcaggtgtatcactatttgcagccctcgggtttgttctctatggaggaaggttgttcatgatgttgcagcgttttcctgtagaatcaaaaggaagacgaaagaaattgcaggaggttgggtatgtgactaccatatgcttttcttgtttcttgatcagatgcgtcatgatgtgccttaatgcgtttgataaagcagcagatcttgatgttctgaaccatccaatcctgaacttcttctattacctgctggttgagatagtgccttcagctctggtgctcttcattctacggaaactgcctccaaagcgtgggatcacacaataccacccgatccattagagagcaggccttgggaacaggcaaaggttttctggtggatagtgttacacaacgtggtaaatacagaagggagagtgaaaagtaccactcgagctttgcccagctttttatacggaagtctttagaatcccaggttgaaattgtgtgtaaaaatgcgatctctttcactaagatttagaaaatgtaacttatataactttgttattctcagtgcgtatcatctgttcacattgcattaattgtttgcatgtttcttttgggtctctgcctc

SEQ ID NO: 29232 - DNA, 965 bp, Zea mays
  Clone ID: LIB84-003-F6_FLI
aggaggtagcaagagtagcctgtacgcggcgctgggcgtggccagcgactgctccgacgccgagctgcgcagcgcctaccgcaagctcgccatgaaatggcacccggacaagtgcgccggcgcagggagctccggcggcggcgcggacgccgccaaggccaggttccagaagatccagggagcgtacgccggtaactaatccgctttccattttgaatcatactcgactctacgcgttacttttgcttgtaggttgggtagctctttttaagagaattgtcatgtatgtacgtacacgtagtcgtcggccaagtatattttgcagcttgcacttatttggtgatgtggtttttaactgacctggccagtcctgtcggaccccaacaagcggatcctgtatgacgtcggggcctacgacggcgaaggcgacgatgacggcgccggggagatcctcggagacattctcgaggccatgagccaggcaggccctgccgccgacaacggcaagggggagagcctggaggacctgcagcggcagttcgaggagctgttcctgaggccgtcgccgtcgtccttctcgccgcagaacgacgcagctgggaagtcggcttccaagagtaggcctgctgggaggaaatagacaggacactgcggcgaataggtcggtccagctactcctgttccagataagctacgacctacgaggtaccgatacctggccaggagcccaggacagcgacctgcgacggcgacgaggctgccagtgctgcacgctcaagtacatgctccgagttgtagctactactgtagatcggcacggcagtcgccagaatggtaccataaggcggccgtacgcacacacgcatgaacgctgtttttaccatctcaggttcgctgcaaaatttccagcgtgttctctgtaaaatccctgcatgattgctataaagaaattcttcgtgggtact

SEQ ID NO: 29233 - DNA, 1533 bp, Zea mays
  Clone ID: LIB84-003-F8_FLI
gcgaaaaaaaaagatgaacagggagggagagaggaaaaagatgaacatgacaggacctcgtcgctaaaaccctagcgcagcggcgcgggagcggatgcaccttgccctgatcatctcccgcattcgcctcttgccgaccgccatgcccagcacccgctccgcctccgcctccaggctgctggtccgcgctgacaacagcccagttgcacgagaaatcaaacgtgaatccagtgtttcttttgacactccgaagcccgaagcaactgtctctgttaagcggagaagggtgaatcgagaacttgaagtaaatgggcagcatcataagaagcaggtccctgacattgaggattttatatatgaaaaggccaaaacattgacatcgtcaagtaaggcaacaacatctttggtcaaggtggagaaaaaggtcggagtttcttcagttataaaagttggagctccagataactgggaggcagttcttggaggcattaaaagcatgaggttatctggtgaagcccccgtagatacgaagggctgtgaaaaagctggttctctccttccacccaaggaaagaagatttgcagttctgatatcaactatgatgtcaagccagacaaaagatgaagttacacatgctgctgtggaacgcctctctgaaaacggtttacttgatccggatgctatagtgaggactgatgagaccacgcttgcgaatcttatcaaacctgtcggattctatcagcgaaaggcgcagttcataaaagaagcttctaaaatttgccttgagcgctttggaggggatattccggattctctgaatgaactgcttgctctgaggggagttggccctaaaatggctcatttggtgatgagcattgcttggaagaatactcaaggaatctgtgttgacactcatgtgcatcgcatttctaaccgacttgggtgggtttttcgggaagggacaagacagaaaactacgacaccagaacagacaagaatttctctagagaaatggctacccaaggatgagtgggaacctataaatccattactggttggatttgggcaaactatctgtactccactgaggcccaaatgcgataagtgtggcatcaacaacctttgcccttctgcttttaaggaatcatcaagcccaattccaaagcaaaagaaaacaaggtctccatagaactctgactgtgacttgtctggcaccgacgtgagatgatattttgggttgtccgtcggtggtaaatattatggggtttccttttggtcagttattgttggatcaccttggtgccgtaccattggcatttggcaagtcatgtatatcattttgtataccggtaaattgttcaagacggtatgaagacacgcttatctaccagttactgtaaaaagtactggtaacaagcgaaattttcatgtgccaaatgacacatgattcgtgaaaggtgggtgccatagagaaaattctgttgcgtgcaccaaagtctatcaccggttcctataagacctaacaagagatat

SEQ ID NO: 29234 - DNA, 1097 bp, Zea mays
  Clone ID: LIB84-004-C11_FLI
gtgtttacttaactgccgttctgtcaaagatacaagaaggggggtggttgccgctggctttctcatcactgtttctctgcataatgtacacatggaactacggaagtgtactgaagtaccagagcgagatgcgcggcaagatatccctggacttcattcttgatctgggagccacacttggcaccgtaagagttccaggcattggactcgtgtacaacgagctggtccagggaatcccatcgatctttggccagctattagtcacacttccagcgatgcactctacaattgtctttgtttgcataaagtatgttcctgtcccttatgtccctcttgaagaaaggttcttgttccgaagggttgggcagaaggactaccacatgttccgcagtgttgcacgctatggttacaaggacgttaggaaagaagaccatggcttctttgagcaacttctggttgagagcctggaaaaatttctcaggagggaagcccaggaaattgcgctggaggcgagcacaatggaggcagagcgtgatgacatatctgttgtatccgaggtgcctcagactcctgcaggtgacggggacctgcaaactccactgctttctgaccagagatcaggcgataacaacaggatggccgccacagatggaagcgaccctgtcctcccctccagctccatgtctttagaagaagatcctggcttagagtacgagctgtctgctctgagagaagccatggcctctgggtttacgtatctcctagcacacggagatgtgagggcgaggaaggaatcagtcttcacgaagaagttcgtcatcaactatttctatgcgttcctcaggaggaactgcagggccggcactgcaaccctgaaggtcccccattcgaacatcatgcgtgttggtatgacgtacatggtctgactgggactctgctactgttgcgtcacaggactgtaccacgaatcttgtatggactggtgctgcaccagctcgtagtttaggggctgtactgtggtaccgattacattcattgctgcctctggccatctgcccggaatttgtcacagaaatgactgtatttgttcgatgtgt

SEQ ID NO: 29235 - DNA, 619 bp, Zea mays
  Clone ID: LIB84-004-C2_FLI
tctggttcgtgggcgagagggaagagatggcggcgtcggacgttgagtaccgttgcttcgttggcggcctcgcctgggccaccgacgaccactccctcaacaacgccttcagcacctacggcgaggtcctcgagtcgaagatcatcctggatcgggagacgcagaggtcccgcggcttcggcttcgtcaccttctccacggaggacgcgatgcgcagcgccatcgagggcatgaacggcaaggagctcgacggccgcaacatcaccgttaacgaggcccagtcccgcggcggccgtggaggcggcggtggcggatacggtggcgggcgccgtgatggaggcggctacggcggtggcggtggaggctacggcggtggtcgtggaggctacggcggcggtgggggatacggtggtgcaaaccgcggcggcggctacggcaacaacgacgggaactggaggaactgagcggtggggtccgctgaggcctagttatcttgttcgcttctgctaccgtgttcaccctagtctagagggggtttatcttcgtctgtggtcgtctcgtgtccgtatgtttcgtttcgtgttcgttgttgttgttgcccatctgtgtttttgaccgc

SEQ ID NO: 29236 - DNA, 555 bp, Zea mays
  Clone ID: LIB84-004-D12_FLI
cgtcgagcaggagcacttcaagagggaggagaaggagcataagcacaaggagcgcctcggcgaggtgggcgccctcgcgggcggcgcctttgctctgtacgaggggcaccgtgcgaagaaggacccggcgaacgcgcagaggcacaagatcgaggccggcgtggcaacggcggcggcgctgggcgccggcggctacgcgtaccacgagcaccgcgagcagaaggaggcccactacgagagcaggcagcaggagcacagggtgccgcacgggcacgggcacgggcacggctactcctactactgcgactgaaacgactgatcatcccatcgatcgagatatgcatgcagaactcgatatatatacggcccctagcgccgtacacgtgcgtgcgtgtaagtaaataagagcaaacgtcgtcacgtgtgtgttgctcgatcactactccatcgatctacttattatcgtctgcaaataacgactaagcgcatgcttctgcagcgtgtaacgatccatcactgttactatatctaatgatgcatgcatgcaattaagct

SEQ ID NO: 29237 - DNA, 914 bp, Zea mays
  Clone ID: LIB84-004-D8_FLI
caaattttgaggcttgtcagttctgacctattggacataagcaagagaaatgcatgtgttgtgtgtttgacagtgtctttgaaaatcacacctccagaaatttgtgatttcgaagcgtcgaagggacaggtccagaaaaaaggggagattgttaaaattccattacttgggagtgaccgcacgaactatggtaatgttgccatgttgctccaactatgttctaaagattccatggcgtggctaagcaaaactgctgcacaaaaaggaaacagaatttgactggacgtctgaatatcttcccttcagtctgagctccagaccagagtgcaaaaagaaacattgaaccaatggaaaaatgaataaaagaacaatcagtaactacagtgcatgtctgaagattctcatgggcgtgggcatcttcctccaggattgttgggatcaaatgtgcagccagacgctccaggcatcgaggatgtcagggacaccgagcttcctcgttgtggctgtgatttctctctcaggacacggaatgcagcgatggtagtggcttgtgccgccagggccaggcagataatgagaaccagaggtagaacttggtttctttggaacatcgtggtatcttgtgaacttcagtatcgagtgagatgcgaagctaggatttgaggctattatatattaagtttatggtctgcgtgtttgtttccttggcgatcacggtttttacgcgttctcccatgtggacgagtattcacaaggttgaccgcatgtatacagagtcgctcaactcgtcgtgaacaagttcacagaaggatctctgttgcacaagcaaaatgtatttcagaagtagaaataagatcattggttactgtgtcgcaatttcttccttaggaaaaaataatccacagcaataccac

SEQ ID NO: 29238 - DNA, 829 bp, Zea mays
  Clone ID: LIB84-004-H3_FLI
tcggtgctgggcggtagtgccaatttgatgttgtcaatcaccctccgcattgtctcaggtgcggctgaggttgttaatttcctgtcacaactgatggtgttcttgtgggtgctgtattaccttattactgtggagggaggtggagctacagagcaaatcattgatcttttgccagtgtcaaaacaagtaaaggaccgctgtgttgaggtcatggatcatgccatcagtagtgtattgttggccactgccaagattgccatattccagggggggctgacatggctattgttcaagttcttcaaagtgcattttgtgtacacatcaactgtgcttggattcataagtgcacttgtgccaatacttccattttggctgtcctcgatatttgccacagggcagcttctcatggaagggagatatgttcttgcactggtggtaactgtgatacacctcatgctcatggattatggcacaactaccattctggaggatatacctgggtacaatgggtatctcaccggcctcagcataattggtggcatgacactgtttcccaatgcactggagggtgcaatattaggtccccttataatgacggttgttatagcgttgaagaacctgtacacagagtttgtacttgctgatggagaggagacgagcagctagcatcagatgcaaggctaaaatgcttgtgttgccaaagaaatacttgtgtagggcttctacatgcaatgttgcatgatggttttgctcttgtaccatgccttatatgcacagctattgcagcagttgtgagctttccttgttaatatctattggatcgttccat

SEQ ID NO: 29239 - DNA, 1072 bp, Zea mays
  Clone ID: LIB84-005-C1_FLI
aaaccgaaagcacccgcaccaatctctgcgtctcttcgtcttcggctgcgcggcggcggcagcagcggaggaggttgaggagatgctgtccggcgacatccccccgagccagaccatctacctcaacaacctcaacgagaaggtcaagaaagaagaattgaagagatcgctttatgccttgtgctcacagtatggaaggatactggatgtggtggccctgaaaacacaaaaactgagagggcaagcatgggtggcgtttagcgaaattacagctgctaccaatgctttccgtggattgcaagattttgatttctacggcaaaaaaatgcgagtacaatatgcaaaaacaaaatcagactgtattgcaaaagaagatggtacttatgcacctaaggagaaaaggaagaagcaagaggagaaagctgctgagaaaaaacgacgaacagaagaggcacaacaagctggcctcaatgctgctgctgcccaaagcaatggaactggctatcaagcgtctcgtctgggcaaggcttcacaggagccacctgcgcctccgaacaacatcctcttcatccagaatctgccagaccagaccacgagcatgatgctccagatcctgttccagcagtaccctggcttccgggaagtacggatgatcgaagctaaaccaggcatcgcttttgtggagttcgaggacgatggccagtccatggtcgcgatgcaggctctccaaggcttcaagatcaccccggagaaccccatggctatatcctatgccaaaaaatgagaaccctaggggactctgtaccggctttgtttcggtactctagtattgatcccaaatccacatgtgctgaggtggattgtggtgtaaattagtttaagttacaccctaatctacctcaatacatgtagattgagctcaatactagagtatcaaactagacctaagatctttccgctccgcctttagaaatcgagccacggtacccactttccagtcatgtgtttttggaaagcactcgcttgatttcgaagttaaactcttaacacttttaaatcaggtttggtcctc

SEQ ID NO: 29240 - DNA, 751 bp, Zea mays
  Clone ID: LIB84-005-D11_FLI
cgaagcactacactacactacaccacacccacccgacgacgatcacacacgcagaagatcgagttcgttcgatcgtgaccgtgacgcaggaagctataagctagccaagacaggaataataatggcggcgtcgacggtggcgagcctctctgtcccggtgacgacgacgaccttcgcggcggcgggcggcggcgacgtgctgatcgtcgtcccgaggagggcgggcgccaagcgcgtcgtctggttccccgcggcggcgcgccgcggcggcgggcggttggtcgccgtgcggtccagcgggccggccacgccgccggagatctccgacaaggtgtcggagagcatcaagcaggcggaggagacgtgcgcggacgaccagaagggcgacgccgagtgcgcggcggcgtgggacgaggtggaggagctcagcgccacggccagccacgcccgcgacagcctcaaggagaccaacgccaacgacccgctcgagaagtactgcaaggacaacccggactccgaggagtgccgcatctacgacaactagctagtcgtatagctatataggccatcgacatgaaggacgaaggttgtagcacactacgaaagaatgatactctcgatcggcgcgtcatacgtggaatgaacttgtttgtatcaagctatctatacctcaatgcttctctacctgccgccgccgcaccccgtatgatatgtgatacacagctgggatggtatactgatattttgggtt

SEQ ID NO: 29241 - DNA, 1412 bp, Zea mays
  Clone ID: LIB84-005-F12_FLI
ccctcctcctgcatcctacctccctggtgcccgtcacgttcaccacgttcgcccgctcattcaccggcggcgtcgcccagctcggcctcccgccgcccacggaggccaggtccccgggccgcccgctcggtccgccacggaggcaaggaattggttcttttagtacttgacagaaataaatatattccaggcatggtggcgtctttagacaatgtgaggggcttgactttagccatgtcatctagtgcattcattggttctagctttgtgatcaagaaagttggattgaagaaggctggggataatggggtgcgtgcagcttctggaggcttctcatatctatatgagccgttatggtggttgggaatgataactatgattctaggcgaggtagccaattttgcagcatatgcatttgcccctgccgtacttgttactcctctaggagctctaagcatcatatttagtgcagtgctcgcacacttcattctgaaagaaaatttgcacatgtttggcgttgttggttgcatactatgtgttgttggttctgttggtatagttttgcatgccccaaaggagagaaaaattgattctatgaaggaaatatggcatcttgcaacacagccaggttttattgtttattcatgcgtggcagtggcctgcgttctttttttgatatttcgggttgttgagcgctctgggcacagattgatgcttgtttacatagcaatctgttcattaatgggatctcttacggttatcagtgtaaaagcagttgctattgctttaaagctatcatttggtggatcaaatcaattcatctacgtccagacatggttcttcatagtagtagtcactatttgctgcttggtgcaattaaactacttaaacaaggctctggactcgttcaacacggctgtggtttctcctgtatactacgtgatgttcaccattcttaccattgttgcaaacatgatcatgtacaaggactgggcctcgcagactgcaacgcagatcgcaacacagctatgtgggtttgtgaccattgtcgcggggacttttctgcttcacaagactagggatatgggaaatccaccaccaccaccacctgaccaaatgtgcctgcaagaagccggggaatgtgctccacggtcaatgaccagttctagctgaacacactaagatgtcaaaatctcacagcctctatggactgaattggaattttgagctatatggtgacctttgtagatatattaggaaggagtaaagattggagtgcccagcagttggacataccgatgaagttttacgtttctgcaaaagaaagaatgaactgtatgaaggcatcggaatcttgtgaagacatgagattcaaactagctacctaactttggtaaatagcttgttatgcc

SEQ ID NO: 29242 - DNA, 666 bp, Zea mays
  Clone ID: LIB84-006-B1_FLI
gcgcggggctgaccccgtgcaaggagtccaaggcgttcgcgaagcgcgagaagaactcgatcaagaagctcaccgcgtcgctgaagaagtacgcgcccgacagcgcccccgcgctcgccatcaacgccaccatcgagaagaccaagcgccggttcgagaactacggcaagttcgggctgctgtgcggcgccgacggcctgccgcacctcatcgtcagcggcgaccagcggcactggggcgagttcgtcaccccgggcctgctcttcctctacatcgccggctggatcgggtgggtcggcaggagctacctcatcgccatcagcggcgagaagaagcccgccatgagggagatcatcatcgacgtcgagctcgccacccgcctcctccccagggggttcatctggcccgtcgccgcctaccgcgagctcatcaacggggacctcgtcgtcgacgacaaggacatcggctactactagctgcgcttgttcacctgcttgcactgtgcatatatattgctgctgccgagctgggcgcttggatagtacgtggggaaacatggatggcttttggtgtaggagctgcatgctttgctagggctatctggtcatgtaggaaatggaagctctgctgtactttaagaaacttgatgaaacctttgtataactc

SEQ ID NO: 29243 - DNA, 1374 bp, Zea mays
  Clone ID: LIB84-006-B11_FLI
ggagatatgattggtgttggtgcgctttcaacaaaagaaactgagataaagtgtataaaaggtacaaaaactctttggtcggatcgtgtctctggaaaggttactgtcttggcaggcaatgcaaatttctgggctgttggttgcgaagatggtttcctgcaggtttacacaagatgtggagtgcgagcaatgccagcaatgatgatgggatctgcagctgtttttattgattgtgacgactcctggaaattgcttcttgtcacaaggagaggtctaatgtacatatggaacctttatgataggacctgcattttgcaggactccttagctgctttggttgcatctccagatgagtcatctgcaaaagatgctggtacagtaaaggttatatctgccacattctcaagatgtggatcacccttagttgtccttgccagccgtcatgcttttctttatgacatgagcctgaagtgctggttaaggattgctgatgattgttttccagcatcaaattttgctagctcgtttagtttcccacaaggtggggagctaggcaagttgcagattgacataggcaagttcatggcgagaaagcctatttggagcagggttacagatgatgggttgcagacacgtgcccatctggagaaccaacttgcctcttctttggctttgaagtctgcacaggagtaccgtcaatgcctcctatcttatgtacgatttttagcaagagaagcagatgaatctcgtttacgtgaagtttgtgagagcttcctaggtcctccgatgggcatggttggttcggcatcacctactgatcccaaaaatctagcgtgggaccctgatgttcttggaatgaagaagcacaaacttcttaaagaagatatacttccttcgatggcgtcgaaccggaaagtgcagcggctgctcaacgagttcatggacctcctgttagaatatgaaacggatgtcacactgataccgcaacctggaacagaaggcaatggcaatggcaatgacaaggtgatgacctcgtagctacccttgacatgctcagtacagttgctggagagtggagactcaccccctgggtaggtgtgtaggattagtttggcgcggattctgattggccaatctgagaggtgcttatgtgaatcagttagttgtgcatgtagctggtagactatttattaaggtgaccccggcaaaaagagaaaggggaaaaactgtaacgctgagtgtaacagtagaaatggaagcgaggttcgcctggtgattattgtgtcagcagtctgtaaaaggacggatgaactcgtgtcctttttcattccaaggcagtattggccttgatagttttttagttgaggctgtgtt

SEQ ID NO: 29244 - DNA, 1181 bp, Zea mays
  Clone ID: LIB84-006-D4_FLI
ggggcgcccatccagcgccagggctccttcacgctgccccgcacactcagccagaagacggtcgacgaggtctggcgcgagatcgtgagcctcaccagcggcgaggacgcgcagcaggttgcggctcccgctcccgctcccgcgcccgagcccgagcccgcgcccgcgcccgcgccgctgccggcgcaggcgcaggcgcagcagacgctggggtccatgactctggaggagttcctggtacgcgccggcgtggttcgtgaggacatgggggggcaccagaccctcctgctgcagccgcacgcgcaggggcttttctcccaggggaatgcggtcgcgccgcagaccctgcagctgggaaacgggatggtggccggggtcgtcgggcagggcctcggaggaggggtgacggtggcggctccgacgacgccggtcgtgttcaacgggttgggaaaggtggaggcgggtgatctgtcgtcgctgtcgccggtgccgtatccgttcgacactgcgctgaggatgcggaagggacccaccgtcgagaaggtggtggagaggaggcagcgccgcatgatcaagaacagggagtcggccgccaggtcgcgtgcgaggaagcaggcgtacataatggagctggaagctgaggtggcaaaactcaaggaccagaatgaggagttgcagaaaaagcaggttgaaatgctaaagaagcaaaaggatgaggtcctggagcgaatcaacagccaacatggaccaaaggcaaagaagctttgcctgcgccgcaccctgactggcccatggtagcctgctgaagcttgcacaaaattgaccgaagtcaagatcgtcgggccagatgtgcccgtgtgtatatatcagatgaagtcaagagtactgagtaccccgttacccctgtagaccgccgctacttcagagctgccgttcttgttctgtgacgtgggtagtctgcgcctgacagttcgctgtttaggttcggttgcgcgatcctcacatgaacaatgaggcgtgccatctaatttgtttattaactcactcctatctatggtgagataatgcaagtaacctggagtatgtttggttgatttgccgttttgaaaaatatgctgtgagctgtgtggaaaaacagcggtggcccgtgtggaaaatagaagccgtttgattttacagct

SEQ ID NO: 29245 - DNA, 919 bp, Zea mays
  Clone ID: LIB84-006-D9_FLI
gtggcgaggaaggaagataaactcaaaatcaaggatgagtacaacaattatagggataggacagcctataagtttctgttatttccatctatcctcctcctactgagatggtggatatgggatggatgccttccagcattggctgttcaaatttaccaggcttggttactatacctgtacacaagctttgctttgcgtgagaatgtattaattgcgaatggaagtgacattcgtccatggtggatatatcatcactatctagcaatgctgatggctcttattagccttacatgggagataaagggacagcctgattgttctagcaagcagaggggggtgcaacttttcttgcgctgggcaatcatgcaaggcattgcaatgcatctacagaatagataccagcggcaaagattgcgtactcgaatagctctaggaaaggctaaaagaatggatgtcgttgctggcgaaacagctggtgtggaggggcagctcttgctgctatatcctgtccttttcatattacagggtttcgaagcatatgttggagttttgcttcttcagacggctttgcatgggcttgcttccgaatggcaggtcttagtctgcgggatcttgctggtggttatggcagtcggcaactttgtccacactatggagacactggtactgaaactgaggtttaaagcaaagatgaagaaagcgaagagcagacaggatcgcccgcatcaaaattgacaggcatcatcgtccttggaaaacaaggatgctgacaccgcctcttttgtaaatcctttgacccacattaacattttttgcctgcttgtcattctctctctctttttttttggtaattggccctgtaacattgaagttgatattccacacaacacggtggatagaaaccatatttgttcgctct

SEQ ID NO: 29246 - DNA, 604 bp, Zea mays
  Clone ID: LIB84-006-F11_FLI
gataggtgtaaacacagctatatactcgccctcgggagcatcatctggtgttgggttttccattccggtcgatacagttgggggcattgtggaccaacttataaggtttggcaaggtgacaaggcctattttgggagtaaaatttgcccccgatcaatctgtggagcagcttggattaagtggagtgcttgtcctggatgctcctccaaacggaccagccggcaaagcgggtctgcagccaaccaaacgagatccctatggtcggcttatcctgggtgacataattacctctgtgaatggcacaaaggtgacaaacggaagcgacctgtaccggatactggatcagtgtaaagtcggggaaacggtgaccgtggaagtcctgcgtggcgatcataaggagaagatccccgtggtcctcgagccgaaggccgacgaatcatagcgaacccaggttcttctgtaccatagcctgatcagtttgtcactttgggacaagacaagaggcgggcgtcttaagcattttcgcctggtgtattttctgcagcagacgcgcaaatacacaagggcgcgtgtcctagcattttcgccttcgttcgctgtacat

SEQ ID NO: 29247 - DNA, 1165 bp, Zea mays
  Clone ID: LIB84-007-D12_FLI
caatcacaggccgcctgtggattcacgcagcatccaaggttcctgaccccgacactatcaaagccatggaggattctacagggagatttatgccgtcgatggcatcactggcatcaagttccctgatcattaccctgtctcacgcctccttggctgtgttgaggtggtaggctgcctcaggtctgaagagcttgtttgctgggaacatgtgcctgagtctgtcaggcttgaagggctgactgacttttgttggctctgtgaaaatccacagaagttggtggttccattcgagatgcgtggttaccagggtgtctacaatttagaaagaaggatctatgatggggctgtgaggggccttttacctgttcaaggtccactgcctgtcaagttccctcttccagatcccagagaccccttctccttgaagccaggatctcttacatttgctgcttccaaacccactctgcaaaaatctgaaagtgttgctgcagcaatagccggggctcgagctgcagccactcaattctcaaagaaggatcgcaaagctgctgctagtagtgaaattggtacagaagagcaatcctggggaagccatggcggtagcagttcagttgattgcaatggtctgtcaattgtccatggcagctatgcgcatctacagaaccagaatcggccttcaattttcccgagcactcaagcgaattcccaaaatccaaattctgagcctcggagaagccctagactagaatttggagcttccaataggcttgttgcagtggcactgagtgaactgaagcagttaagcttgagcaagaaaggaacaggacaagcagttcccagaagctgaccaatgcaagctaacaagtagtaatgcttgtcatagcccatagggcgagagagtgtgtttgtagaaagatgggtgatgtttgcagaattcatggtagcttgtaattaagtatatgctccagtgctggaagtgttgccattgtgtgaattattaatgcttgtcgtcacacgtacgtacgctagcagtgtcatcgctgaggcgggctcttttggcatttggttgtcataggacctacccggctctgacctatatgctcttaggaattttcttaggagtttgtttgtaacgacagaatgggatggaatatgacgattcttt

SEQ ID NO: 29248 - DNA, 1125 bp, Zea mays
  Clone ID: LIB84-008-A8_FLI
ctaattttggtttgagttttgtttgaattatttcaagtaaattctttttacccttttctggttaatttatttcaaagcaaacattcttagtttagttttttttgtttctgacagatctctttcgaaacacgttttaactacaatgcctatgtgaatatgcacccgtttcctattccgtttctagaattttcgcaggccgagaaggacttgcagccttggattgctagagacgacgaacaaggccagaagatgtggagagtcaaccaacgtatagtgaagcttatagcggagctcatgaggaaccatgacagccctgaagccttggtgatactcgctagtgcctctgaccttctacttcgtgctactgatggaatgcttgttgacggtgaagcttgtactttgccacagcttgagcttctcgaagtaaccgctcgagcagtccatcttattattgaatggggagatccaggtttatcagttgctgatggcctttctaatctgctaaagtgccgtctttcaaccaccatccgctgcctttctcacccaagcgcgcacgtgcgcgcgctcagcatgtccgtcctccgtgacatcctgaaccacggatccgtgagccccaacaagatcagccgaggggaacagcagcggaatggcatccagagcccatcgtaccggtgcgtggccgcaggcatcctcaactggcaagcggacgtggagaggtgcatagagtgggaagcccacagccgccgcgccaccgggctgacgctcgccttcctcagtacggcggcgaaggagctcggctgccctctcccgtgctgacgaggccgctcccggatctgatctgacatcggcggccacttgacggccagtgctggcagcttgctgcggggccggcgagtaggacgctaatctctcgaccaaggacgactcgccggtttgttcacgtgatatgtgatcaaactgatattagatggtgtttccaaagtatatatctactgggggcttgctcccatgatgcgattttattccaatctgacgtcagatgctttacgagcatatttaactgcttgagctgtacgtagcttgtattacttgtaactttgtgtaatatggttattattaccgaag

SEQ ID NO: 29249 - DNA, 1079 bp, Zea mays
  Clone ID: LIB84-008-B1_FLI
ctgacacacctcagaagcaagttcggttcttaacactgtcaggtgataaaaagctgttgactccgcaacctcggctaaggacaggatttttctcagttatggactctcaaatgatacctgttgggtgcatccctgaagcatgcacttctgttggtgcagctaaatatgggaggccaattggtttagatgagagccttaaggtggatttgattgtgattgggtcagtggcagttgatccaagttcaggagcacggttagggaagggagagggatttgcagagcttgaatatggaatgcttcgctatatgggagctatagatgattcaaccatgatagtaactactggttgccatgggctgagccagcccacaggtgatgacagcagcaacggcggcttctgctgccatgcctgccttgtgccttgtggacacgccaggaggcaccgtagggctgttggaaccggacaaccaacacacggcgcgcccaccggatcgcccgcacacatggcacacccacacacacacccaggccgtcgggtcgcgacatacgtgcccgaacacacaacaacaggttttagtgcatgacaagcagttagttgatgacattccagtggagaagctgctagttcatgatgtgccagttgacattatctgcacccctactcaggtcatcttcacgaagactacaatcccaaagccacaagggatttactgggaaaagttatctccagaaaaattgggccaaatccgaattctaagagagcttaagcaacgtatagagcaagagacaggaactatgcttccttgtggaccttcggagaagctaccgccaacagcacagagaaagcagaggtggcggcggcgacgacgagacttttgtatgcttctcttaactgtttcttttactcaataaagagctatgtgcacccttttctttcttagggcaaatcaaggtcacggttcaaaactgctagcattagactatagaaacattttgataccagatgtaatagaaatgccaaaaaaactttgtttgcacttaagaggcaatgaggatagatagtatagctttttccacac

SEQ ID NO: 29250 - DNA, 1202 bp, Zea mays
  Clone ID: LIB84-008-B8_FLI
gcaggaggccctactcttgccttgaatgagtgccagattttggtacagcagaaaccccagggagattcacgactgctggcctctaatctgtgcaggaagaagcgacctcgcagatcacgagatgggcctacgtcagtggcagctgtcatccagcggtgggctgagcgcaacaagcatttggagtatgaggaatctgaggaggcaaagcgaccaagaaaagcacctgcaaagggttcaaagaagggctgtatgaagggaaaaggggggcctgacaatactcaatgtggataccgtggagtgaggcagcgtacttgggggaagtgggttgctgaaataagagagccaaatcgtgtcgacagactctggctgggtaccttcccaaccgcggaggatgcagctagggcctatgatgaggcagccagagcgatgtatggagacttggcacggactaacttccccggacaggatgcaacaacctctgcccaagctgctctatcatcgacctctgcccaggctgctccaacagctgttgaagctcttcagactggcacgtcatgcgagtcgacaacgacatcaaatcactcggacatcgcatccacctcacacaagcttgaagccgacatctcgagctacctaaaggaaaaatgtccagctggatcatgtggtatccaagacggcacacccattgtagctgacaaggaggtctttgggccgttggagcctatcacaaatcttccagatggtggtgatggttttgatatcggtgagatgctgaggatgatggaaagtgatccacataatgcaggtggagccgacgctggcatgggacagccctggtatcttgatgagctggattcgagtgtcttagagagcatgctccagccggagccggagccagagccagagccattcctgatgtctgaagaaccggacatgtttcttgctggcttcgaaagcgctggtttcgtcgagggtctggagcggctaaactgaatttctgatgtttgaccgttgatcctcatcccacttcatgtctgagcttgtgaattcggaggcaaacattggcagaacttataagctctagcaattctaggctttacattcctctgtgatagttctctatgcatgggaactgggtttgcttcacaatttttgtaagaccagaagtgatgtaaatagttcccaccttgtggaaggacaag

SEQ ID NO: 29251 - DNA, 1479 bp, Zea mays
  Clone ID: LIB84-008-C5_FLI
gttgcccagactcggagggagttggtgcctctgtgtctctgtgtgtgtggagatggaccccaagttccccccacccccaccgctaaacaaaacggagcccaccaccgcgacgaccaccaccacctcgaccgcgcagcagcagcagcagcagctggatcctaaggactaccagcagcagcagcagcagccggcgcagcacctgcaaatccaaatccaccagtcgtagcaggacggaggcggcggagggaaggagcagcagcagctgcaggtggtggcgcagcccggggagaggaggcagcaggcgctcgcgcccaagcggagctccaacaaggaccgacacaccaaggtcgacggcaggggccggcggatccggatgcccgcgctctgcgccgcgcggatcttccagctcacgcgggaactcggccacaagtccgacggcgagaccgtccagtggctgctgcagcaggccgagccggccatcgtcgccgccaccggcacgggcaccataccggcgtccgcgctcgcctccgtcgcgccctcgctcccgtcgcccacctccgggctcgccaggccgcaccaccacatgtgggcgccgtccgccggcttctcctcgccctccttcctgaactctgccgccgcgggcacgggcgatgccgccggtatcatgcagcggatggggatccccgcgggcttcgagctgccgggagcctccgccgccggagccaccctcggcgccggcggccacatcggctttgcgcccatgttcgctggacacgccgccgccatgccggggctcgagctcgggctatcgcaggacggccacatcggcgtgctcgccgcgcagtcgatcagccagttctaccaccaggtgggtgctgccgccggcggcggcggccagatgcatcacgcgcacgggcaccatcatcaccatcaccagcagcaggaggacggggaggacgaccgcgaggacggcgagtccgatgacgagtctgggcagtagtagtgtaaccgttcaaccttttgcgttgctgaatcttccctcaagttggaaggagagaaaagtgtatgcgtgcagccacgggatgcttctgctactcttggactgttgttggtcgagttctgatggatttttgtgttcatttttttctcgtgtggtatccaaactcaacggaggcctctcttgctgtgaggacttgcggattcgagatcatcctcagttcttcctacaatctcatggagtggatgatcgccacagccttctctccgacttccaggtgtatactagctgagaaaatgatggattggatcgatcacccttgagtgagtgccttatttgttattgcagtgtgtagatattcaggtaattttgcagttagagaggtgttctttttattgtagtagtgatccacgttttaaaacaatcaaggtattctcctccacaggctgtctatgcaatgcaagtatagtacaattctagtt

SEQ ID NO: 29252 - DNA, 610 bp, Zea mays
  Clone ID: LIB84-008-D7_FLI
gaaagcgtcaagtttatggcccgggaaatactgatcctaaggagactcgaccaccccaacatcatcaaattagagggcttggtcacctccaggatgtcatgcagcctttaccttgtcttcgagtacatggagcatgatcttgctggtcttgcggcaagttgtgatgtcaagttcacgttgcctcagataaaatgttacatacagcagctgttgtcagggcttgagcattgtcatgacaataatgtattgcaccgggatatcaaggggtcaaacttgttgttggataataatgggattcttaagattgcggattttgggctggcaacattctttgatccacgacataaacgaccaatgacgagccgagtggtcacgctatggtaccgtccaccagaattgttacttggtgccactgagtatagtgtaggtgttgatttgtggagtgctggatgcattcttgcagagctcctgtatggaaagcccataatgcctgggcgcactgaggtgagtcttgaacatggggttgctctgtactctaccatattattttttcagtaatccttggggctatgctgttaatatcagaactatggttaaatcttcccttctc

SEQ ID NO: 29253 - DNA, 780 bp, Zea mays
  Clone ID: LIB84-008-E3_FLI
gtctcctcgtttaaacgggcgaactcaagattgcaacagggtcgtccgccgccaccaattgctagcgcaatcctagccctagcccagcgccccctccggccctccctgcttcgtgcttggtagcgatggcgtcgttttctgaagcgcccccggggaacccaactgctggcgagaagatcttcaagaccaagtgcgcgcagtgccacaccgtcgacaagggcgccggccacaagcaaggtcctaatttgaatggtctgtttgggaggcagtctggtacaacacctggctactcttactcttcggctaacaagaacatggctgtgatttgggaggagaacactttgtatgactacttgcttaatcccaagaagtacattcctggaaccaagatggtattccctggactgaaaaagccacaggaacgtgctgatctcattgcatacctgaagaatgccactgtctgacgaggatgctgctgtggctctaaagatgaagagcagcgattctcttttttgcagttaaaataatgacacgaatttactttaatttgacagactggataatcaagaaagctaagaactccaggtagttctgtaacggttttgtctattgctgggggtaaacaccacccttgaagagcttttgattagtggttgaaatgtgacatcaccataatacgtttgacctgacgagcatttaaacacacgtttgggaagcttttgattagtgttttaatgttcgtttttcatgctgtctttgaaaagctacctgatttctctt

SEQ ID NO: 29254 - DNA, 713 bp, Zea mays
  Clone ID: LIB84-008-G2_FLI
tgctgaacgacggggcccccgtggactcctacgtggtggacgacgccggcgtgctgagccgcgtcaccaagtccgacgtcaagcggcttgcccgcgacctcgaggcccgcaagaacatccgcctcaacttcatcaccgtccgcaagctcacgagcaaggctgacgcgttcgagtacgcggaccaagtcctggagaagtggtaccccacgattgaggagggcaacaacaagggcatcgtggtgctcgtcacaagccagaaggagggcgccgtcaccggggggcccgccttcatccaggccgtcggcgaccagattctcgacgccaccgtgtctgagaacctcccagtcctcgcgaccgacgagaagtacaacgaggcgatcttgagcacggcgaagcggctggcggcggcgatcgacgggctgccggacactggtggcccgtcgttcaaggagaacaagcgggagtccaacttcaagaccaaggaggagacggaggagaagcgcgggcagttcacgctcgtcgtcgtgcccatggcgcagtactacgcctacgtgtccaagaagtgagcgaaccatgaatatggcgtgctgtgtacagtaaatcagtaatgttataccgaagagggttttttttttttttaatctcccaggttgaagttcttcgatctgttggaattcatagaaatggacggaaaaaaatgattattatgcttt

SEQ ID NO: 29255 - DNA, 649 bp, Zea mays
  Clone ID: LIB84-008-G9_FLI
aaaaaagaattctccacttccccactctccctctcccgctcgtggctcgtcagtgggtgggagtgtgcggggctagccgctagggtttccgcgagcccatcgccggccggccacggacgatccgggactccatccggcgcccgccctgaatcggcttcgcggggcgcaaggagcgagagaatgaagtcgtcgctgcggaagctgcggggcttcgcgctgcagcgccaggagcagcgggtggaccgggaccgcggccggggccacgccgccgccgccgccacggcggcggacgagctcctcgcggctgctcaggatatggcagatatgagaagctgttacgataacttgctttctgttgctgcagcaattgcaaatagtgcatatgagttctctgaagcacttcaagaaatgggaacttgtctgcttaaaagagttacgccaaataaggatggaataaatgataaagttttgctgttgcttgggaaatcacaatttgaacttcggaaacttttagatagttatcgtgtgcatgttcttaacaccatcaccactccatcgctgtcgcttcttaatgaacttcaaactgtggaggaaatgaagcaccaatgcgatgaaaaaaaagaattgtatgaattcatggtaaacgcgc

SEQ ID NO: 29256 - DNA, 947 bp, Zea mays
  Clone ID: LIB84-014-A1_FLI
tcgaggtacaaggtggtgaagttcgaccttagcaagacgattcagtccgagaagttcgaagataggcgtacctggggcatcttcgttgaaggtcggaacgcggtttcgattttggtggccattaacaatgtatccacattcattcatggccgtaatttagattggcgatgtgtggatacatttgatgagcaatacatgaaagataagatccgtagtttgatcacagataggcagcgactatcacagatacacaaggaagtacaaagtatccctggagatgacatgaaagcattttttgatgtgattagtaacattcgcaaattcacactctgtccacgtttggctggcccatcagcttttgaagtgaatcaaccatatatgctactttgtcatctttttacccctgtgtttcatggttgggttgtaagccctgaattgagcagctatgatgcaattaaagggttcactcgtgatgagttgatacactattgcaacgctctgatagccttagagggtgagtcagacaatgtgagagtgattcgagacttattgaatgattcagatcagctgctgactgcttatggctttgattgcctggttcaggagatgagagatgacaagtttggattaattttttggcgtagcagatatgatgtagttcataagcatgacggagatctttttttactggtttctgatgagagggttcgcaatgaaatgccccaggccacttggatgttatttgaacaatctccagaaagcagcatctacttcacatcagaatatctacctgttgaaaaccaacacagcattgacagagccagagaatggcaccagcaaaagcttcagcaaaagacttcgagctcgttagagacagtgaagaaagctaaaaagaaaaggaacaacattcatcatcaatcgactataaactcttggttttagatttt

SEQ ID NO: 29257 - DNA, 474 bp, Zea mays
  Clone ID: LIB84-014-C6_FLI
cttttgacagtcatgaggcggaggtgtttcaggttgaatggaatccaaatttggccactgtattagcttcatctgccgcagacaagagagtgatgatatgggatattaataggattggcgatgagcagtcagaggaagacgcagacgacggaccaccggagctgctgttcgttcatggaggccacacagacaagatatcagagctgtcgtggaatcctagcgagaaatgggccattgccagcgtgtctgaagacaacatcctgcagatatgggagatggcagaaagcatatactgtgatgacctctccatgcaggttaactgactcgtgcctcgaagcataaaggtgagttacctgaccaatgatgcaagcgtatctggaggggttatatacctgtatgatttgagagatttcaatttcgctatttttgttcactgcagagtgggcatctataagaactctttaaattcgtgac

SEQ ID NO: 29258 - DNA, 783 bp, Zea mays
  Clone ID: LIB84-014-D11_FLI
gcggccgcggcggcccttggcgcagcagctcccgcggctgctggcgacggcggcggcggcggtagcagccgcgccgctcccggcgctggcggagcagatggagaaggccgcactgtttgacttcaacctgacgctcccggcgatcgcgaccgagttcctgctgctcatggtggcgctggacaagctctacttcacgccgctaggcaagttcatggatgagcgggacgccaagatccgcggtgagctcggcgatgtcaagggcgcctccgaggaggtgaagcagctggaggaccaggcggcggccatcatgaaggcggcgcgcgccgagatcgcggcggcgcttaacaagatgaagaaggagaccaccgcggagctggaggccaagctggacgagggacgcagccgtgtggaggccgagctcgtagaggcgctcgccaacctcgaggcgcagaaggaggaggctgtcaaggcgctcgacgcccagatcgcctcgctcagtgatgagatcgtcaagaaggtgctcccatccgcgtgatgaaaccaaaccggccctgccttatcctacgactatagttacatgaacatcataaattaatgataattttgaagaaattggccgatgactccgacactgtactcatgaaagattattggatgggttgtgtccaccgcctgtgttgggcgtggattgttgtagacttgcagtgatcttgctcgataagcttgtacagttcagtacagacacacattgaaaccatatagatacaggatacattttgtcct

SEQ ID NO: 29259 - DNA, 1706 bp, Zea mays
  Clone ID: LIB84-014-E1_FLI
gtttcatgatgatatcatcaaaggatttgtatacaatacaaattactcaagtccagaatgtccgtgctggtgacgttgtcacatttacacttctgagcaggtcaagaaattcgctcactccttccatcaaaagctcctccagtgaaagttctacaacagatgaagagcattataatgttttctcaaagtttattttgacatctgatgtggagttgtctgttcgagatgcaaaattggatcttagtaattggttgcatatggctgacttaggccttgttgatgacttggagaaacttccatttgtttctgctgctttggagcaactggaagagaagacgaaatattggattgattacagaaattatggtggtagtcctccatcaaaagatagcttctctcctggatctagtttcaagtctaggaactcttttgatgtgaatacttctcagcagatgagtgagcacaagatctctctttcagatagagatatggtcaatggtatttcagaactctccatgtctcccgagttgagtaaaacctctggtaaaggaacaatatctaaagtaaatgagaaatgtaccacaaccattgattcaaatgaacatgacccatacacattttaccaggtgtcagatggccaacacctaattctccatccactaaacatgagatgtcttctaaaccattttggaggttctgatatgcttccacctagaataactgccaaaatattggagctggaaactgtaacacagtctgaggctataaggaagcgctatcggtttttgagtcacttctcattaacaactacatttcagttctgtgaaattgacttgagtgatgtagtgtctcctaactcactggctccattcttggatgaaatcaagaagcgtgagaaacaaagaaaacgagccgccaagaaggaagaaagtgagagagtgaaggcggaagttgctgctgctgttcaggcatcagctatgcgatttgagtatacaaattcctctcaaagtcacaacgatgtcatgttctctctggatgactttgaagccctgggaaacaacgctgggccgtccaccagtccaccagcgagtgaaaggaagcttttctctgatgtaacacgcttgggttttgcatctgctcaagactcacctcccttaagactcggaactggggatgcaaatggccaaagtgaaacctcgagagaccaagggccgttagcgacacccgcattatcatttgccagcatcatatcttccagtagagccgtgactgcagctgacaactcggagatgcagaaagcaaatggcgctgggaagaagggtaagaaagcaactagagtgcttttgtcgactggtggtggccgtcgatactgaaggactatagatgcattggaacgaacagtttggttgtttccatataatgccgtagctcaatgcaatgtgcatagtacataacctggctgggatacgcttgtaagttgtaacactgagcggcagtcgtgtgtgttttgcctttcttgtgggtgtgcttgcgttgtgcccacatcctgtcccttgcatgatctggaaacgagcgcagagaagcgtgtaccataactaataaaggtggcgcaacactttagttgtggaacgccgctagtctgcccggagtgtcaaaatctccaaaaatgtgtacttttgatcattgaacatagttcatcagggttc

SEQ ID NO: 29260 - DNA, 1073 bp, Zea mays
  Clone ID: LIB84-014-E12_FLI
tgaagccttctgaattgacagaggaacagcggcaacttctttcatctaatgttctctgtcaggaccagctgaaaaagattttacatgacactgatcttgaaagcattgaacagtgctatatggagatgaacacagtagagttcaaccttgagcaagctctgaatacggttctgatgcaaggcattcctttgggcaaggaaaaacggatttcaattgaacgtaattggcctgtggaagtatcatgcatgtacctttacggggacaatttaaggcttcagcaggtcctagcagactatctagcatgcgcccttcaattcacacaaactgctgaaggacctatcgtgctccaggtcatgtctaagaaggaaaacattggatctggcatgcagattgctcatttggagttcaggattgtccatccagctccaggcgttccagaggccctgatacaggagatgttccagcacaacccaggggtgtccagggagggcctcggcctgtacataagccagaagctggtgaaaacgatgagcggcacggtacagtaccttcgagaagccaacacgtcgtcgttcatcatcctgatggagttcccagtcgcccagctcagcagcaagcggtccaagccttcgacgagtaaattctgaccctcatgctcctggaactgcagcgagtgttcggccgtgtcgaagtctcggttgtagctagccaagtggctgctactgaaacatcggttggtcggttctggtatctagcacggcctgtgtagtgcggatagatttggttgtttggctttggagagataagctagctggctaggtgtaacgtaacgtcgaccgataactgtatgtgaatgatgatgagctgtgaggacgaataaaggcttcacttgtgttctctattgctcttcttagagtatgatggccaacagctgtacaggaaagcatccacctaaatctgggctcgctgaatgacggctaaaagttgtttggtggctttgtaatcccttacagtcgaatgttggtctttaaactgtcagttaaatgctagtacggcggtaggtctgttttctt

SEQ ID NO: 29261 - DNA, 550 bp, Zea mays
  Clone ID: LIB84-015-C6_FLI
taaagatgagaatggtgatgaggcgccatcgaaaaaggcccaaatggttgtccaagttgaggctgtccgggtgcaaaaggagcttgcagcgactgagattgatggttattgtgaaggcgaactaatcaaggttacactttctggaaaccagcaacctattagagttgaaatcacagaagctgcgatggagttgggtgctgaaaaactttccgggttggtcaacgatgcttacaaggatgcacaccaacggagcgtccaggccatgaaagagaggatggctgacttggcgcagagcctgggaatgcctgcgggcctcggcgatggtctcaagtgatgccgcaattcgggaaagctttccaataatcctttttcctcaattttgtatgctagccgtgtgagtagtaagcataacccctccgcgacctctcataagaagtgtacttgtgagcacttgttttctttcagctttagctgccatttgctgttctgcgcacgcagatatttgcacattaacttcacgtctggtctacaaagttgcaagatgcgggcc

SEQ ID NO: 29262 - DNA, 514 bp, Zea mays
  Clone ID: LIB84-015-D3_FLI
ccctacccacgcggctactacaagtgcagcacggtgcgcggctgccccgcccggaagcatgtggagcgcgaccccgccgacccgtcgatgctgatcgtcacctacgagggcgagcaccgccacagccccgcctccggccaggacccgccgccgccgtcgctcgcgccgctgccggagctgcccagccattgatttggcttcctgcctgctctgtcctgtcaattactagtagctgttgtcataagttataaaatcaaaatcgccagttcagttttagcagctccgttttccgatttttttctcttctgtcgttcgcgttagcagctttgtgaaaggattaggaaagtgttagcatcagacttggagaagggaaaagaaaacaaaaggtaatgctcttgttattagtattatttttttgtatacagcaaacaaaagcatccgcagagaaagttgtggatggtgtagtcggtcggaattttgaccgggcttggggtgttccagagccggattgaat

SEQ ID NO: 29263 - DNA, 577 bp, Zea mays
  Clone ID: LIB84-015-D7_FLI
gctcgccgcctcactccctctgaggtcgcagatccgtccggttagacgaagccgcccgcacccatggcctccggtgagctcgcctgcacctacgccgccctcatcctcagcgacgacggcatcgccatcaccgccgagaagatcgccaccatcgtgaaggcggccaacatcaaggtcgagtcctactggccggcgctcttcgctaagctcctggagaagcgcagcgttgaggatctaatcctctccgtgggatctggtggtggcgctgctccagttgctgcttccgccccagctgggggtgctgcagctgctgctgcccctgctgcagaggagaagaaggaagagcccaaggaggagtctgatgacgacatgggcttcagcctgttcgactgagaccctcgctacccagccattagcaaattcgcttatgctgtccaagacttatcttacgttatgtctgtaggcttttgttattacaagtactcaagttttgagtttttgagatgtggctatgacaatgtgatgaagaaccctaaaccatcgtattagagtgaaacttgtttctatatagagttcc

SEQ ID NO: 29264 - DNA, 698 bp, Zea mays
  Clone ID: LIB84-015-G3_FLI
cggagacgaagagagcagaagcgaagagcagcggcgcaaaggaaagggagccatgctcgcctcgccggcgctcgccggcgcccactccttcgcggcgtccgtgtatggaaacatcctcgtcccctcgcctcccgtccccgcgccggcacgtcgcgcggcgctgtccgtcgtcgccaaggtcaaggtggccactccccaggacgaccgcatcgcccgccacgtccgcctccgcaagaaggtaagtggcaccactgagaggccgaggttgagtgttttccgctcaaacaaacatctgtacgctcaagtcatcgacgacacaaagcaatgtactctggcttcagcttcaaccatgcacaaatctctctccaaggaatttgaatactcagctgggccaacgatcgaaatagcacaaaagatcggtgaggtgattgccaagtcttgcttggagaaagggatcaacaaggttgtcttcgaccgaggtggtttcctctaccatggccgcataaaggctctcgctgattctgccagggagcacgggcttgaattctgagtcgtccaggcgtttgttcatatctccaggatcacctgtaatcttcttttttttttctctccatatgccgaacagattgtagtcactcgccttgttctgcatggtgcaaagccatggccactcgttgaccatgtcacgttttttttcc

SEQ ID NO: 29265 - DNA, 512 bp, Zea mays
  Clone ID: LIB84-016-D4_FLI
gcgatcggcgtgccgcgtgcgtgaggtgatcggagcatcccgtcccgaggaggaagacaaccggcgacgcggggggaacatggggaagacgccggtgcggatgaaggcggtcgtgtacgcgctgtcgcccttccagcagaaggtaatgccggggctgtggaaggacatcaccaccaagatccaccacaaggtcaccgagaactggatctccgccacgctcctcctcacccccgtcgtcggcacctaccaatacgccatgtggtacaaggagcaggagaagctttcccacagatattaaatgcgctgcccttgacagacagcactcggagttttcatgatgggtttcataatcctcccatgatgatttaacatttgtttgatcaatttcagttcaacgccttttcatcgttccatatgcatatatggtatccgtgtctggcaaacttattttgaggcttgctaaatatgtaccttttgtctctgaagttgttaaataaagcaaattaacttcc

SEQ ID NO: 29266 - DNA, 1289 bp, Zea mays
  Clone ID: LIB84-017-A7_FLI
gctgttcgaagatcgagtttttatgtatgcctccacgaactcggccaaattcctagcattgctgatcgtggttccgtgggtgatagattttctagtgcacgactatgccatgatgccctttttagagaggtatgtccagaaggtgccgcttgcagctgagttacttgatgtgaggcgcagccagaagctgcagatggttaaggacctgaacatcgagaaggcaagataccgtcttgaagtagagatcggcaaatctcccccgctctctgatgaggaggtctggtttgagctgcgggaaaaagcgctcgagttgagggacgattggaggctagaaaaccgacaagcttttgcaaatgtatggtccgacatggtttatggggttgttctattcctgcttctctgcttcaaccagagcaaagttgcgatgctcaagttcacaggatataagttgctaaataacatttcagacactgggaaggccttcctaattattctagtatcagacatccttctagggtaccattcagagtcaggttggcatacaatggtagaagttattctcgagcattacgggcttgaatccgatgaagcggcggtcacattttttgtttgtctggttccagttgctttggatgtgtacataaagttttgggtatacaaataccttccaagattatcacccagtgtgggcaacgttctggatgaaataaagcgccactaaggaatcatttggataaattattgccttggaggtattcgatgggtgtatttgcttggcatattaagttttcatcaaatctgaagggactccttcgtctggaaaggccttgcctagaatgcctgcctggccacgccatcaatcagagtgtccggctgttcgggaggactgggaattggagaagtaatctgagctagtccttatgtatattctaaaacaatatcttgtggatagataaccatagaggaaactcgaggcttttggtctgagatttatcattggcggcaaagcatttttgccttagaaattcttttgcatgatggaggccacaggttggttggaatctgtcaggttattgtttcaggatgatgtccagagctgcaaccttcgttggtgctcctattttagaaccgaaacgtatcgacatcttgatgtccagagtttgcagggttcagaaaccgaaacataatatgcaagttttaaacttcgttactaagtcgtaaagttcaattgtaaactgtttcggttcgaacctttatctttcgacaaagcaagtttttttgattaattt

SEQ ID NO: 29267 - DNA, 1161 bp, Zea mays
  Clone ID: LIB84-017-A8_FLI
caaacatctgagtctagctcctgacagtcacagacctcaaaactgttctgcacatcctttcttttgcagttgcagacttgcagcccaggtgcatgttgtccagagataagcaggtgatggctgcgccgatggccgcggcggacggcgggctgaggcggctgttcgagaagtcgctgccggagaacccgacgctgctggaggcgctctcggcgtggaaccgcaacgtgcaccaccccagcagcaagccgcccattgacacggcgtccttcacggagatcttcggcgagctccatttccaggagaagcagcagcccgaccgaggcgccctcctgccgccgtcgccgtcgaccccgccgacgccgctccctccttcccgcacgctgtcgtggctcgacatcgcggccgaggccgagaagagcaaggacgactcgtcgctggacgcgctgctgaggcccaagccagcgaccaccgtggccacggtgaagaggagcgcgagcttctgcaccaagaagggctcctccgcgtcgctgctgctctgcaccgaggggctcggctccgagagcaccgtggacgctgacgacatgttcaaggacggcgacgccgaggccgaggccgaggccgaggccgccgccgccgcgctcaagggcacggacacggcgaacggcagcgacgccgaggaggcggtgaaggaggagaggcagccaaagacgttcccgccgccgataccgtccatcgggcgcggcggcaagccgtacgtgtgcttccggtcgttccgggaggacggccggttcgtgctgctggaggtggtgatccccgggaaggagctcctgcaggccacgcgcgagggcggccggctcaggctgcagttcgccaacgctgccgcagcagccgcaggtggtgtgggtgtcgtcgacgagtcggtgcacggaggtgacgacgatggcgacccccgtggcaagaacgcatgcatagacgacgacgacgaccacgatgacgagcgctaggtgatcgtcggggttcgttgatgtacttggcatactttatcacgatcgatatcacgatcgataattgtcctactactactgctacggatgatgatgatgatgcaatggtgaatcatgctgatgagaagcatcggctaactaattaattaatgtttct

SEQ ID NO: 29268 - DNA, 898 bp, Zea mays
  Clone ID: LIB84-017-B9_FLI
caaacatcttgatcatgtgaatatgcttggacttagcaagaccacacttagattacgatacctaatcaattggttggtgacctcattactgcagctccggttgcctgattcaggggatggcgagggggtaccccttgtttatatatatggtccaaagatcaaatatgaccgtggagcagcagttgcattcaatataaaggactgcaacactggaacctccctgataaatcctgaaactgtacagaaactggcagaaaaagaaggcctctccttgggcgtcgggttcctaagtcatatacgcctcatagacaaccagaaacatggtgcggttgatgtggggttaagttcttccttgccagcggcaaatggccgtcgtgaaaagaaaaatagcaagaatgctattattgggaccgaagtggtcactgcatctcttgggttccttacaaattttgaggatgtctacaggttgtgggcatttgctgcaaaatttcttgattcatcatttcttgagcaagagaggctatcatctattcctgaggatacagaaagatagtattagatggttccagtttatggctattgcagctacttcataatagaggagggtggcaccagtgtaattgaaacgaggatagtagaagagatgtcatgttgcttctgcgtattgttttttaacgtctcagcatggagtcaaggggcaatacttggtagtgcggcttttatatttcttcattcttatttccatccttttctaggcatgcaacgtttttgtttgtagattttttttggagatctatatgtaccagctaattattttgagcatcctttccatgtacttgcttgtaagttgtaaattggctccattggacatgaaatagatttgctcgcttgtatgatt

SEQ ID NO: 29269 - DNA, 163 bp, Zea mays
  Clone ID: LIB84-017-G4_FLI
gctgaagttcagtatttttctgtggtctgaatgtccaaattccggtggcatcttctatagctatgctttgctttgctttgaacacttgtgttttagggctttctagctgaacccgttgtccaatattgctgacgttgaaatttttggttaatcttaaaactgg

SEQ ID NO: 29270 - DNA, 855 bp, Zea mays
  Clone ID: LIB84-017-H10_FLI
gaaataagtgaatggtcgaatgctatgctggaaaagaatgttgaggagcttcgtgaatccaaggagagatgctttgagaaatccttggattgcgtaagaaaactaaaaaccagctttgccaaggtgggtgcgtattcttccaaagaaaagttcattcgaggtgaccccgagggaatcattgattggataggtgaagaagccgaagcttttgaagatatccttagtgatcatggtgatatttgtgccttcgccggtgcttggggggttgcagcaattctggagaaggctggttgtgaccatgttaaagctgtggctcagaccgaaaccgccttctccacagacgacacgaaggacccctcggccgaagccactttggtgggcgggaagttttattccgatgtctgggtgaacggtggccgagaaatgaccaacaagattataaagaaaaacgaaaaagaaactcatgatgctcaagaagaagctaagcgagccgaagaagctgccgagcgcgcaaggcgtatagctgaactctcactgctacccgagccatacgacccccaggccgatcccgttatgaaagaggcgctggatgtgatgagtgttaccaataccatcgtcgacgaagtcatcgatagactgctgaatgaggccactgagaaaattctcaaagaagactaggcttttgatgtaatgatacaatgtaacatttgtgtatgaaacaattatcaaacatgtatattgatgtaatatatttctttgcgatgcatgaaatttacgcacataccaattttgagccttcggcgaaaaaacaccttcccttcttttcatgcttcgcaaataaaaaagcccttttat

SEQ ID NO: 29271 - DNA, 1001 bp, Zea mays
  Clone ID: LIB84-021-B4_FLI
ataagaagcaaacaacaaaggccgtgctcattcagacccttcgtgtgtgtgtttcttgaaggtttatatcacatatgcagcacaaacggtaaatagtagtgcgaggacagtactacagctcatattgcatcgcaacgtggaaatttagttacagacgcgcccagatcgagaggtacagcacgaaaaagagaggcaagagagataggggaccggagggcggcgggccggggcccaagaccgaggggctcgtgcgcaggaagctgatgaggctcctgtcgctcgtccccttcggctgccgtgctggacccatcgacgacgcgccgccgcccgtggaccacgccgccgccgcgaggaggcgccggaggaggagggccaacagggccgcccagctgctgggggctgctgcgggtgcgccgcagcagtggcgcccctcgctcggcgacatctgcgaggagtacagcagcagcaccgacgccgtcaaggtcaggaaggcggcgtcctgggacctcgcccgggcgctgccccgcgcgcacggcggcaagcagtaccggcaccttgagggcgcgtcgtccctgccagcgttcgcgccgacggcgttcctgttctgatcatggcgtcggcgacggcggcgactcgtcgtcatccaccacgacgacgacggcggtgaagacaataagaaccaaccaaaaccactacacgaagcatatatacagattactgtcaacgtattgtagaaccaaggatctatgtatatatatgtgcctccatcatcatcggaccggaataaagctagcaatctctcttcttcacgatcgagagatagcgcgcgtgcgtgtaattaagtattatagattactacatactatatatatgtgcatgcatgatgcatgcgtatgtgtatctatatatcatgtgatggtttgtatatgagctagctatagctagagtcgtgtctaatagcatactacaaactaagctaatacaatatccaagtttgctat

SEQ ID NO: 29272 - DNA, 572 bp, Zea mays
  Clone ID: LIB84-022-D1_FLI
acccaatctcccctacaccagaaaaattcccagttctttggtccgcgtcagagaggcggcggcgatgtctgggcgcggcaagggcggcaagggtctgggcaagggcggcgcgaagcgccaccggaaggtgctccgcgacaacatccagggcatcaccaagccggcgatccggaggctggctaggaggggtggcgtgaagcgcatctcggggctcatctacgaggagacccgcggcgtgctcaagatctttctcgagaacgtcatccgcgacgccgtcacctacaccgagcacgcgcgccgcaagaccgtgaccgccatggacgtcgtctacgcgctcaagcgccagggacgcaccctctacggcttcggaggctaggctaggcgcctcttcatagtcggggactggttaggggacatgtctctgtgtgatgctttctgtggtattattgctgcaatagccgtgtaatccatcgcttctgcaatgaagcgctcggaagcatgctacgtatgttgtgtctgtgggtgattgtatttctggtagtaacagtgattgttcctgaattttggataat

SEQ ID NO: 29273 - DNA, 422 bp, Zea mays
  Clone ID: LIB84-023-A11_FLI
ccttggccgtggaaccggagataacaactttggattgccttctggaacctacgtgaggagcaactcaactggtacaattggcgagccattttctgcatcagccaatccatatgaatcgaacaatctaggtgcatatggcagcagttctatttatggtgactccacctggaggttcaactcatctgaggttgatatacctccttttggtcatgatcttggaaatgttgatccagatattaaatcagaaatatcagcaaactatatgggcaactatactgttaataataatcaaacaagcattagctacatacttttcttggaggacacttcaaaattcatagaaagtgcaactacttctatgcacatcacttatgttgtgaactctattagtttgtgttaactgaattttgtgttttatcacc

SEQ ID NO: 29274 - DNA, 1089 bp, Zea mays
  Clone ID: LIB84-023-B7_FLI
ctttactcaaagtctagagctagctttttgctttgctcaccagacaaaccgcagcagatggcgtcgacgatcatggccgccacctcccgcatcgtcgcggccaagacgccgtttcttggccagggtcgcgccgccgccgccgccgccaatgccagccccctccgcgacgtcgccgccgccgctgctggcggccggatcaccatgggcaacgacctgtggtacggcccggaccgcgtcaagtacctgggccccttctccgcccagacgccctcgtacctgaccggcgagttccccggcgactacggctgggacaccgccgggctgtccgcggacccggaggcgttcgcgcggaacagggcgctggaggtgatccacgggcggtgggcgatgctgggtgcgctgggctgcatcaccccggaggtgctggagaagtgggtgcgcgtggacttcaaggagcccgtgtggttcaaggccggcgcgcagatcttctcggagggcgggctggactacctgggcaaccccaacctggtgcacgcgcagagcatcctggccgtgctcggcttccaggtcatcctcatgggcctcgtcgagggcttccgcatcaacggcctcgacggcgtcggcgagggcaacaacctctaccccggcggccagtacttcgacccgctgggcctcgccgacgaccccgtcaccttcgccgagctcaaggtcaaggagatcaagaacggccgcctcgccatgttctccatgttcggcttcttcgtccaggccatcgtcaccggcaaggggcccctcgagaacctgctcgaccacctcgacgaccccgtcgccaacaacgcctgggtctacgccaccaagttcgcaccagggtcttaagctagctaccgggccgcggcgtgccaggacattgtgttgtacactactcgtttctgtcgtgatctgtaccatgaacgaatgcaaatattcttgtgctctcccagaaggaacgaactggactagttttgctcttccattccatgtatactctgcttcagcatatatgtagttgtgtctactggtttttgcagttgttaactgatttgcgtccat

SEQ ID NO: 29275 - DNA, 850 bp, Zea mays
  Clone ID: LIB84-024-B12_FLI
agcggagaagcgcccaacccaacccgccgttcctcctccaaagcgccctcctgccccgcaaaatggagacctctttcctgcccaccacactccccaacacaaggcctctccccgcgctccgaacctacgccccagccgcctcgatccgttcccaacagcgccctcgtcgctccaccatacgcgcagccatcacccggggccggaaggaggagacggtgaccaccgtccgggagcaactggaggggtgctacctcctggcgggtatcaagtacgagggcctgacggtgaagcagctgcagggaatccgcgacgcgctccccgacacctgcaggctgctggtggcgaagaacacgctggtggggaaagccatcgagggtaccccttgggaggcgctcaagccgtgcatgaagggtatgaatgcctggctcttcgtccacactgaggaggtacccgccgcgctcaagccctaccgcgccttccagaaggaggagcgtgtcgaggagaccaacgacttcgtcggcgccgtctttgagggcaagttttacgggcccggcgacttcaaggcgctcgagactatgcccagccgcgcagaggtgtacgccacgctgctcggcgcgctgcagggacccgctacgtccctcgtcgccacgctgcaggcgccagccagagatgttgttgcggtgctctccgcttacgtgcccaagctcgaggaggaggctggagccgcctagtggtgttgcgaaatggttgtcatttccctctcactccctatctgctgtttgtacaattctgtgtacctttactggcacccaatcacatttgaatgggtcaaatcacagctttccatttt

SEQ ID NO: 29276 - DNA, 957 bp, Zea mays
  Clone ID: LIB84-024-E8_FLI
cgtcacattataactgatgatcagttgtttagaccagttttggatccccaaggatgggaccatgatattgggttcgatgccatcaattttgaagcatctcaagagttgaaaaagaatgtctctgcggcaattacaggacagatgagaaaggacaaggaagacatgtatatccattcagaatgttcagtaagttacaatgctcagagaggctgctccttgatggggggtatggatatgcagacggcaagcaaagatttggtctgtactgttcatggggatgccaagttccacaatctgccttggaacagtattggaggtggcatttctgttactaagtttggcaacaagtactttgctggggctaagttagaagactccgttaccattgggagacgagttaaactggtagccaacgccggtaggatgtctggctgtgggcaggtggcacatggaggtggtgtggagattacagcaagggggaaagattaccctgtgagggaaggggtgtcactgccgcggtctctgctttgtcatttgaaaaggaaaccgtaattggggccaaccttcagtcagacttccgagtgggccgtggatcaaaaatatcagtcagcgctaacctaaatagtagaaatttgggcaatctcagcgtcagaactagcacatcagaccacgctgagatagctttgataacagttgtctccttgatccagttcattcttaggagaagatcagcagcagataataaagatgagcaacagattggcaccaatttggatgactaaataacaggtacaaggaaaagacaatgattgcatgctttagatgctcatcgtcatcaggatttgctgcaattatgttaacctaaggcgcctgtcaatctagagttccaatttgtacaaaattcttgtatatcaattatgagtataaataatgtatgaaggaggcattttccatgag

SEQ ID NO: 29277 - DNA, 466 bp, Zea mays
  Clone ID: LIB84-024-F5_FLI
cgcgccgccaccatcaccttcgcagccctagccgccgcctccattgctgctatacccgcaaccatgggtcccgtgctgaagcgcccgaccccgggcacggtgcagtgtttcgggcgcaagaagacggccgtggccgtggcctacacgaagccaggccgggggatgatcaaggtgaacggcgtcccgatcgagctgctccgtcccgagatgctgcggctcaaggccatggagcccgtgctgctggcggggcggtccaggttcaaggacatcgacatgcggatccgcgtgcgcggcggcgggaagacgtcgcagatctacgccatccgccaggccgtcgccaagggtctcgtggcatactaccagaagtacgtcgacgaggcggcgaaaaaggagatcaaggacatcttcatgcgctacgagcgcaccctcctcgtcgccgacccccgccgctgcgagcccaagaagt

SEQ ID NO: 29278 - DNA, 1151 bp, Zea mays
  Clone ID: LIB84-025-D10_FLI
cgcggcgcgtcgggttcgaggtcgtcatcggggacccgcccttcaacgtcgacgtcggggagttcgccaaggaggtgaacgccgtggacgtgctggtgggcgtgcacggcgccgggctcaccaactcgctgttcctccccacgggcgccgtcttcatccagatcaacccgtacggcaagatggagcacatcggggaggtggacttcggcatccccgccgtggacatggggctcaagtacatcgcctactccgccggcgtcgaggagaccaccctggtggacacgctggggcgcgaccacccggccgtcaaggacccggagtccatccaccggagtgggtgggggaaggtggccgagtactacctcggcaagcaggacgtccggctcgacctccagcggttcgagcccgtgctccgcaaggccatgcagctcctcagggacagggagtagcagcgtcgcagagagcagcagatgaaagtacagttttttttccaaatgacttttagagttttcttccctccctatacctccttaattatatatatttctcaattcttttccatttttggtgttcttttataaagtaaaaaaaggataaatcaaagactcacatgcttacttgttactgcttcatttgattgggtcggcgaacgattcgcaagttcgcattgcattcagccatttgccctcgcgtgcgtggattgtgaacatgtgtttcaacatcaacaagcagatgccgaaaagaaaaggctaaaaaggagcccagtacagatagcaatgaagcccaggacacaaacgaagatggaccaaatcgttgggccggtaggtgacgggtggttgtcagtcgccagcgttgacgaagatggtagatatagattacgttagttaggtatatagataggtgatcggcaatcaagggacaacaacaacggcgactcgggcggcagatacgtgcaagcaagcaatggaatggaaccgacgtgtactggacagcctagcccctggtagcgggcacatgacaatccacagcgaacgcccatagcaaccaaactgtagcgctcagtgtgatgcatgttacctaagttttatttttaaatctactttataatttctatactatgaaagccggttcaaaacggcgataaaggcgct

SEQ ID NO: 29279 - DNA, 668 bp, Zea mays
  Clone ID: LIB84-025-G12_FLI
gcatgttgtcatgggtcagttagacgttgcgtctgagaaacttcagagagaagggtcccggaggagcgcaacataaagcttttgatcgcacaaatgcatgttgtcatgggtcagttagacgttgcgtctgagaaactacaaagtcttataaatgaggatcctcgggattttcggtctcatctttgccagggcattgtgtatgcacttttagacagaaaagaagacgcagatatgcagtttgatgtatacagaagccttgtgccggatgaattcccagataagagttttatcagtgatgttatactggcggctaggacggagtcacatgatcggctacaaaaggaatttgactctgagtttcaagcgaagaaatgatacattaagttttgtatagatgaggcccaaatactcctggtaggctaaatggttgcatggtaccaatcttacaaatgaaacataacacattaaaagcatagtgaaaagaggcgtctcttatcaggctatcaccaattttcctcatttcctctccctcttagtctctgcagacatttctcagtgaaatataatatagcgaagacaaaattctgcttgaagttaaaagctgtagtatccaaccagatggattgatttgttgatgttcaaatgtagaatttgtgaagcttatgttc

SEQ ID NO: 29280 - DNA, 695 bp, Zea mays
  Clone ID: LIB84-026-A9_FLI
ctaatctcaggtttggggggaaaaggcctcgcgggtcgcaaaccgctctctgttgatttgggatttgggaggcgctcgagttttcaggtaaaccatagtttagtgacccatggctcgtactaagcaaactgctcgcaagtccactggagggaaggctcctaggaagcaacttgccaccaaggctgcccgtaagtctgcacccacaactgggggagtaaagaagcctcatcgttaccgccctggaactgttgctcttcgtgaaatccgcaagtatcagaagagcactgacctgctcataaggaagcttccgttccaaaggcttgtcagggagattgcccaggatttcaagactgatcttcgtttccagagccatgcggtgcttgcgctgcaggaggctgcggaggcgtacctggtgggtctattcgaggacactaatctgtgcgccatccatgccaagcgcgtgaccatcatgcccaaggacattcagctggctaggaggatccgtggtgaaagggcctagattctctgtttactgctactgggagtggctccgtagtatggtttgcatctgttcgatgcttgctttttgtggaagttacatttgtgggtgttcgaattcgtaatattcatccgtagtggacgagtggtaggaagttctgcaatctgactatgttttaaaatttataattgttgtc

SEQ ID NO: 29281 - DNA, 596 bp, Zea mays
  Clone ID: LIB84-026-B11_FLI
gctagaagcattggtacaggtctatggcgctgtagctggttccaccaagaatatcagaggctctgctccatgctgtgaagtcgttcgctatggctggatttgtaggagcagtgctggtgctggtgcttgagttcatgtaccagaggatctccgtcagggcacccagcctgctgtccagctccatcttctgggtctgcagaacagagttctgcgcttgcactgccacaaggttttggctggttatactcagtgccatgctgagctgcttgttctggtccttcagctgatttacctgtttcagtccgcaataatacaccgctcagatatatgaattcaatcctagcttgtttctgctatgtttagacaattttagtgaaaaagaaataattaacgatcagagcagatactgatggtagacttatttatttattagcactgttcagtgaattagctaggaagaaattggtggtttgtgggagcaccgttattgcgcttgtttgggtagatttttcaagttggactttgttgtcatatattttgctttttcacctgcatatgagtgcaagccttcatgaataaagaagtgaactaagagg

SEQ ID NO: 29282 - DNA, 341 bp, Zea mays
  Clone ID: LIB84-026-D11_FLI
cgaaaccgcagccgtgacggatccagccgaaccccctcgcagtcgcagccccctcacgccacgcgacatgggcaagatcaggatgcccgtgccgtccctgttccgccgccgctcctccaagccgccgccgccgcagccgcagcagcaggcgcctgccgcgggcgacggcgacggcagcgggtccccggagcgggcgacggcggaggaggagatggcgcgcgtgttccgcaagttcgacgcgaacggcgacgggcggatctcgcggtcggagctggcggcgctgttcgagagcctgggccacggcgcgtcggacgacgaggtggcgcgcatgatggccgagg

SEQ ID NO: 29283 - DNA, 755 bp, Zea mays
  Clone ID: LIB84-026-F9_FLI
gtggcttctctccccgctcccctcctgcccctttccttcgtcctcagatccgccgattccccgtccctgcgcctccgtctcatgatctctgcgcctctgcgggtgcggctgccggcgccgaaggctgccgccggggggtcgttcctgctcggcgcgtcctccgtcgagtccaatcccaatcccaagcccaagcccagcaggatccgctgcgccgccgccacgctgtacgaggtcctgggcctgcgcgccggcgcgacgggccgggagatcaaggccgcgtaccggcgcctggcgcgggagcggcacccggacgtggcgcccgcgcccggggccgccgccgagttcgcccgcctgcacgacgcctacgccacgctctccgacccggacagccgcgcgcgctacgacggcggcggcgccgcgcccgcggcggcggtggcgaggcgcccctggagcggcgccgtctacggccggccccgacgccgcacatgggagacggaccagtgctggtagtagagagtagagaggcacagccaagagccccacgcgcttcttgtctgtctgtaaaatagttagacctcctgccgccagccatgcggccatggcggctcaccttggactttttttttggtttcggtggccatccatgtagcgtgatttttcgttttccttcctccacttgcccttgtacctgtgtgctgtggtcttgacttcttgagatgtaaatactagtacttgatgagatggttggaggagta

SEQ ID NO: 29284 - DNA, 1106 bp, Zea mays
  Clone ID: LIB84-026-G10_FLI
ctttgaatatgttgggtctggcgaagcgaattggtgcaaggtttttgttgactagcacaagtgaagtttatggtgatccgcttgagcatccacagaaggagtcatactgggggcacgttaatcctataggtgttaggagctgttacgatgaggggaagagaacagcagagactttaactatggactatcatcgtggtggtggtgttgaggtgcgtattgcccgtattttcaatacatatggtcctcgtatgtgcctcgacgatggtcgtgtggtcagcaattttgttgcacaggcactgcgaaggcaaccgatgacagtctatggtgacggaaaacaaactcgaagtttccaatatgttgctgatctggttgctggactgatggctctaatggagagtgatcatattggtcctttcaacttgggaaacccaggagagtttaccatgttggagctagcacaggttgtgaaggaaacaattgacccaatggcaaccattgaattcaaacccaacacagctgatgatccccatatgagaaagccagatatcaccaaggctaagcaactgctacattgggagccaaaggtctctctcaaagaaggccttccgctaatggttcaagatttccgtcaaaggatctcggatgagtaatcaaagcaattcttttttccccgaatgtgccatgcacgtgtttgtaatcagagcaatcgtatgatactggtgaccggtttgattctgaacgatgctgcaactacagtcaggagctcttcaccaactggaggcctggagccctgcagtacgatgtactgtgtacacaacagactgtagaatcacgcaggccccatttggagtgtggggattccatagtatttctacgacatagtactatttctgtgaaatagctgaaaagttcatgggttcgtgtcgatgttttatatatatatcttggtgaggcagaacagaagcaatcaattgttttttgtgcatgtgtgaaattcctgaattgtgggtggtgagagataggatacaatgctgtatttcaggagcttttgtaacacgggaacattcatcatgtgaaaaatgtaactgaatgtgttggccagctcc

SEQ ID NO: 29285 - DNA, 1028 bp, Zea mays
  Clone ID: LIB84-027-D2_FLI
gcatctggtaggcttctagagtatgaggttgggggtccccgtgtttgcgtgcagactgcatacggagtagaagttgaggtggaaaataacccatatgatcctagcttaatggttttcatggactacagagattgtttcaaagaggaattctcacacattgaacaagaaaatcccactttcctgtatgctatgcccatgtcatccacacgagttttctttgaggaaacatgcttagcttctaaagatgctatgtcttttgatctacttaagaagaggctgatgtatcggttgaacgcgatgggaattcgtatcctgaaagtttatgaggaggaatggtcctacattcctgttggagggtccttaccaaacacagatcagaaaaaccttgcatttggtgctgcagcaagtatggtgcatcctgcaacagggtactcagtggtcagatctttgtctgaggctccaagatatgcttctgtgatatcggacatcttaggaaatcgagttcctgcagaatatatgctcggaaattcgcaaaattacagtccatcaatgcttgcatggagaacactgtggcctcaagagaggaaacgccaacgatccttcttccttttcggattagcgttgataatccaactgaataatgaaggcatacaaacattcttcgaagcctttttcagggtgccgagatggatgtggcgaggatttcttggctcgaccctttcatccgtcgatctcatactattctcattctacatgtttgcgatagccccaaatcaattgcgaatgaaccttgtcaggcatctcctctctgacccaactggctcatccatgatcaagacctacctgaccttataaaaccatttgcaccaggctgcaagcctgcaagaactcttagaaactgtacagttttgtagttgtacataagttagagaggatctggggggttacttggcggcggatctaggggttagcagcaatgctataatacactgtaaatcttttatggttgctatggtgattggatagag

SEQ ID NO: 29286 - DNA, 381 bp, Zea mays
  Clone ID: LIB84-027-F8_FLI
aatacaaattcataaagatgcatatatataatatagctccgcctccgatcctcctctctgcgtgcaaaggtatgccatttcagcagtgacgagcatcgtggatacatgcaattcctctgcacatggatggattgggatgtaacttggaactgttaatttttttttactttgatttggatgcatcatgacccccccttcaaaccagctagtgaaatgccattttaggtaaaagtcgacctcctagtatcatattgtcgttgtcttgatccgagtatctcaccaaccagtgaaatgatgttgcgtgccttggcccagatgagtgatgtaaggtcacacaagtcatttatcctagtttgggcgagagaaagccctacttccagc

SEQ ID NO: 29287 - DNA, 669 bp, Zea mays
  Clone ID: LIB84-027-G4_FLI
tgagggcccccaatttgaccaagcattccctgagaccggtgtgagctcgagtccaccagcaagggaaacatctgaaattgaagaagtcggagactgggacaacgagttgtatgaaagggttcaaagtcatctgggggcatcaacatcaagtgctttgttctggaacactccagggaaggactatggtacagaagaaaacactaacagcaattggtgggcacatgcccctgcatatccttctggtccccagggtagcttcatcgagcctccagattttggaaatcgatacatgacaaatcctcattccagtaatcacagtggcggtacatcggagggaagcacgtcggatctagagcagagcaatagcagaagcagaagttcctggaggagccctcaagcgttgtccaagacaagatatatggacgactctgatattgaggaagggctaagcctgcactttgctgatgtccatcagaaggatgaagacgatagacacccggtcagggatcatcaagatcccgcaccatctggtcttccagtaagaataatacctagaagcagtgaccctgtgtaagctggttaaactccacaggattatcacataaaaaaaaactccacaggattagttgatgcatgttaacggttgtattttgttgtttgaaccacatc

SEQ ID NO: 29288 - DNA, 1258 bp, Zea mays
  Clone ID: LIB84-028-C7_FLI
ggaaaaattaaccggccagccctggagctgcttctcggctcttccaacatcccctgcttgctaccgttcagttcagtcttcagttatccgagtgaccgtggatcagccatgcctgcgcttctagtgaacaccgtctcggtctcccccgccgcctcaaggctaggctcctcgcggcccgccacggcacggcgagcagcaagcgctcgccacggccacaggtgccgagccgaagcatccggcagctcgtgggtgtcggactacgacctgtacgagctgctgggcgtggagcggtcctcgccgcagtcggagatcaaggcggcgtaccggtcgctgcagaagcggtgccacccggacgtggccggcgccgccggcggccacgacatggccgtcgtcctcaacgaggtgtacgcgctgctctccgacccggacgcgcgcctggcctacgaccaggagcaggcgcgccgctccgagttcgccggctacacgggccgcccgctctactcctcctgggtcggcgccgagtccgagcgccgggcggtgttcgtcgacgaggtgcgctgcgtcggctgcctcaagtgcgcgctccacgcgtcccggaccttcgccgtcgagtccgtctacggccgcgcccgcgccgtcgcgcagtgggccgacgacgaggacaggatcgtcgacgccatcaacacctgccccgtcgactgcatctcgatggtggagaggtcggacctggcggctctcgagttcttgatgtccaagcaaccgcgcggcagagtccgcgtctccgaaggcaacgcggtgggagctcgcgcgcccaacatcttcaacgaagtcgccaagttcaagaaaaggttcgatgagatgaagcagaaatctgcggccagagaattccaggagtcggaggcggcacggcagtcgaggacttcagcagtccacgccatcagatccatgtcgaactggtggtactggcggccattcgggttcgggccatcggccccggtcaccattgtcctcgcttcgcgcctcctgccgccgccgccggcggcacccgctgaccccgtgacggagaggctccaagaagcagccgccgcccggcgcaagacgggaggcgcggccacggccacggcgcacgcagggcgcgaagactactggaccccgcagctgaacctgccgtcgtcagcttctccgccgagcattcaccagaggggaaggggcactcccgctcaccaaggccacggccgcaggcgaggagcagccggtg

SEQ ID NO: 29289 - DNA, 581 bp, Zea mays
  Clone ID: LIB84-028-F5_FLI
aacttcgccagcttcgtccggcagctcaacacctacgggttcaggaaggtggacacggaccggtgggagttcgcgcacgagtcgttcctgcggggccaggcgcgcctgctgccgctggtcgtgcgcaagaggaagaaggcgggcgccggcgccggcgccggcggccgggagctgtgcgaggccggggaggaggtgcgcgggaccatccgggccgtgcagcgcctgcgggagcagcagcgcggggtggaggacgagctgcgggccatggaccgccgcctgcgcgccgccgagagccggccggcccagatgatggcgttcctcgccaagctcgccgacgacccgggcctcgtgctgcgcgccatgctcgccaaggaggaggagctggccctgatcgacaaggggtcggaggcgcagccggccaagaggcggcggatcggggctgaagccgtggacctggcgcacagcaggggcgggggcgccgtgccgtttccgttctctgttctcggccaagtgttctactagggtagatacggactggtgtatatatgacttgcactgtattatagctttgcctcggtttc

SEQ ID NO: 29290 - DNA, 748 bp, Zea mays
  Clone ID: LIB84-028-G10_FLI
cgccgtctcgcacaggctcgttgttcctcttatccgcggaggaagaaccttggcccgacaccatgctcccaatggccgtccaccccaccaccacgccggccttgtccccgcgcgcccgcgtctcgccgcacaggcctcccatctcctccctggcggacccctcgtcctccccctgccatcgcatcgtcagtttcaaaagcaggaggctgccacttcgctctctccacatcgccgctgccgctgccgccggggcagaggaagaagaggcgcaactaggtggaagtgtgaacgcggtcgacgaggaggaagcggagaataaggtggtggtgcccgagagacaggacccgatgctggtactcaagttcatctggatggagaagaacatcggcatagcactcgaccagctggttcctggctatggcagcatcccgttgagcccgtactacttctggccgcggaaggacgcgtgggaggagcttagagccaagttggaagagaaagagtggatctcgcagaagcagatgatcatccttctcaaccaggccaccgatatcatcaacctctggcagcagggtggtgggaacctgtcgacatgagtccctccccgccctgttctttcaaccgtgcaaagcttgcgttttgttggtttcactacaggctctctctgttgttaatgttaaaagtatggtacatggccttgtagatcggttcaaactgttctcaggtatggccttttccatggaaatca

SEQ ID NO: 29291 - DNA, 524 bp, Zea mays
  Clone ID: LIB84-029-A2_FLI
ggccaagatccaggacaaggaaggtatcccgccggaccagcagcgactaatcttcgcggggaagcagctcgaagacggccgcaccttggccgactacaacatccagaaggagtccacccttcaccttgttcttcgccttcgcggtggcatcattgaaccttccctccaggcgctcgcccgcaagtacaaccaggacaagatgatctgccgcaagtgctatgcacggctgcaccccagggctgttaactgccgcaagaagaagtgtggccacagcaaccagatttgtatataagcaagatggtgcgagtcagctttagctgagggcaaagaagaagatcaagaactgaagcttgccaaatcggttccttgcatggtttgcgtcaacaagacgaagtttcaaagcttttgtagctgcataggctgctgcaacgtttttcagtcgtaactcgtgtgttcctgttcagggtcttcagcatgacataaatcgtttcagaagtctagtaatattattactatatggtgtc

SEQ ID NO: 29292 - DNA, 631 bp, Zea mays
  Clone ID: LIB84-029-E10_FLI
gaaaatgttgaacctgctgagatcgaggaagcagccagcaggagtaccttgattaatcagatagttgtgatcggccaggatcaacggcgtcttggtgccataattgttcccaacaatgatgaagttctggcagaagcaaaaaggaagtccatccttggtgaggatggcgagctagcgaaagataaggtcatgaacatgctatatgatgaattgagaacctggaccgcgcactgctccttccgtgtcgggccaattttggttgtcgacgaaccgttcacgattgacaatggtctgatgacacccaccatgaaaataagaagggacaaagtgacagacaagtacaggagggagatcgaagccttgttcaagtgacacgcggagcgcgtgcgcacccatcagagttcccttttccgagtacaagacggcaaccatacggcgtacatacagacacctgcaagctgcaatgcgtccatgtaccatgtatacgtacgtacttgcgtacggtcggaagatgactggttggaactggaagagatgatatggcggagcggccggtgggagaacaccatgagacttgttactagactcggatgttcgtaggttgcatgagcaaaatgacatgtgttcccct

SEQ ID NO: 29293 - DNA, 252 bp, Zea mays
  Clone ID: LIB84-029-E3_FLI
ggctactactagctgcgcttgttcacctgcttgcactgtgcatatatattgctgctgccgagctgggcgcttggatagtacgtggggaaacatggatggcttttggtgtaggagctgcatgctttgctagggctatctggtcatgtaggaaatggaagctctgctgtactttaagaaacttgatgaaacctttgtataactcaactgtacctctatctatcccttgtgtgtatttgagaacgatttcagagc

SEQ ID NO: 29294 - DNA, 422 bp, Zea mays
  Clone ID: LIB84-029-E9_FLI
gcgtcgtccctgccagcgttcgcgccgacggcgttcctgttctgatcatggcgtcggcgtcggcgactcgtcgtcatccacgaggacgacgacggcggtgaagacaataagaaccaaccaaaaccactacgcgaagcatatatacagattactgtcaacgtattgtagaaccaaggatctatgtatatatatatgtgtgcgtccatatcatcatcggaccggaataaagctagcaatctctcttcttcacgatcgagagatagcgcgcgtgcgtgtaattaagtattatagatgcatgcatgatgcatgcgtgtgtgtatctatatatcatgtgatggtttgtatatgagctagctatagctatagctagaatcgtgtaatagtatactacaaactaagctaatacaatatccaagtttgct

SEQ ID NO: 29295 - DNA, 448 bp, Zea mays
  Clone ID: LIB84-030-B12_FLI
gtggtcctggtattgtgaattggagtgaaggaggaacaaagatggtagctcatgttcctttttaccttttagcccagcaaaaaggtccaccgtctcataatttttcatttgccgacctcctcccaacagaatgaagaaaatatctgcatgagtgcattggtgcaggcatgatttctctagcagaaggccatataacgattttgttttgaagatccaagttcctttttaaaaaaggggctggtctgaacattcaggcttatttctctagcataatactcataaagagtcctgtacttttaggtcttgttcggttattcctataatacatggattgatggaattaaaaaaaatttagaagaactttgacttgcttaggaattcaacacatctaatcccactcaatccatatggattgagagctaatcgaacaagtcttacatggttgact

SEQ ID NO: 29296 - DNA, 647 bp, Zea mays
  Clone ID: LIB84-030-B3_FLI
aaggaggaggtggagaccaaggtcacggcctggcagacggccgaggtcgccaagatcaacaaccgcttcaagagggaggatgtggtcatcaacggctgggagaccgagcaggtggagaaggcctccgcgtggctcaagaagatcgagaggaagctggacgagcaacgcgccaaggcgctggagaagacgcagaacgacatcgccaaggcgcggcgcaaggcggaggagaagcgggcgtcggcggaggccaagcggggcctcaagctggccaaggtgctggagctcgccaacttcatgaaggccgtcggcagggtgcccaccaagcgctccttcttctagccagccgactaccgctaccacctccgtctctccctgcctgcgtgtgatcgatgtacgctcgctgctgcatccgagaacctaactgtaaagaaaaaaattgtaagctgtatacgtactactgcctgctatggtcccctgtgatgtctgtcatccatcacagggtgccagttgttctcttctctttctcttctcttctcttctcttggcttgtatatcggatccatatgctggtggtgcttgaacgaactgtcgttgtttgcttaaccgtgcaaacatatacagtggtatatagtatatacactacattc

SEQ ID NO: 29297 - DNA, 166 bp, Zea mays
  Clone ID: LIB84-030-C4_FLI
ccataatcgaagactacctatatgtgctggcgatttagtctcttctgtctattctcagatggaaacgaaaagatcttcatttgtgtaaataaatatctcactgcccatccatttggacacggttcggtggctcaaagaagaataatgtaatagtatagtggactct

SEQ ID NO: 29298 - DNA, 945 bp, Zea mays
  Clone ID: LIB84-030-D11_FLI
cagccttacctgatccttgacaattctgctccctcgccgccgccgccgccgccgccgcccgcccgtcgtcgctgcgcttcggtacccgcgaagcaaggccccgcctcccgtgtacccgccgccgaagaagggagaggagcagatgaaagcggggaggaagaacctgcggcgggcgtgcgacgagggcgccgccgtcacgctcgccgagggagagagcatcatgcaggtcctcacgctgcgcggctccaacgtcatcgaggtgatggacggcgtgggcgtcaggtccctggccttgttccccgccaagttccagaagagcttctggatcaagaacgggagtttcgtggtcgtggatgccagcgggagggaccaggcgctggaatcggggagcaagatcgcgtgcgttgtttcgcgagtcctcttccacgaacaagttcgggccctgcagaagtctggtaactggccggccattttcaactcagctccgactccgaatgaagcttcagaggcgggagcagaagcacaggctgcccaggttgacgaggaaccagattccgatgaagaagacgacgatcttccaccacttgaggcgaacacgaacaggaataggccgtatgaattgtattctgattcagacagtggttctgacgcttgaaaagtaccaaggccatccatcctgtgcgttttgtctccaaggtattcgtgatgtgtgaatggaatggctggacctggatggctggattcatatgtgccatgtcatgtatgttagttagcatgctgttattctgcaatggaatctgtgttttctgatactagtcattaagctagatcaaggaagctgggtttgtttccactgagggtccgttcggttcttgggggactggccacccggaactattcctagccagattggttatctaatttatataaggtttgattagatgg

SEQ ID NO: 29299 - DNA, 447 bp, Zea mays
  Clone ID: LIB84-030-D3_FLI
cccaaccaagcccgcacgacacgacaccaagtcgaggagctcgagagggcaccaataatggccggcgtgaactccagcgtcgtcgggctcaagcccgccgcggcagtgccgcaggccgccgccgcctcatcgccggcgaagcgggtgcagctggccgcgcccgagggccgccgcgccgctctgctcggcctggcggccgtcttcgccgtcacggccaccaccgggtcggccaaggccacgatcttcgatgagtacctcaagtgcggctccaacgttttctggaagtggtgaagcagctagcagcagcgtctgatgggaatggaggagatcatcacctgtcttgtcgaccctagatatgtccaaactgcagggaaattaaatcttcatgtgtaattgtgctcattctgtttcaatcatctcaacatccgatcatgaacctcttgcatt

SEQ ID NO: 29300 - DNA, 1041 bp, Arabidopsis thaliana
  Clone ID: LIB9-022-F1_FLI
ctttcttcttcttcttctagttccttgataccaacgcgtaatcctaacccttaatctacttcctccttaattaatcagaggtttctacttattatttccacttctcatctctttcaatcgcaatctgagttctggctaaagattttgtcttgaaggtgagattcattgttccgaatagagtgagaaaaagacttataagattgaaaaagcaagatgcggattttgtgcgatgcttgcgagaacgcagccgcaatcatcttttgcgccgccgatgaagctgccctttgtcgcccctgcgatgaaaaagttcatatgtgcaacaagctagctagtcggcatgtacgtgttggtttagctgaaccaagcaatgccccatgctgtgatatatgcgaaaatgcacctgccttcttttactgtgagatagacggtagttctctttgtctgcaatgtgacatggtagtacatgttggtggcaagagaacacacggtcggtttcttttgctgagacagagaatcgagtttccaggggataagcctaaagaaaacaatacgagggacaatttgcagaaccaaagagtctctacaaatggaaatggtgaagccaatgggaagattgatgacgaaatgattgatctaaatgctaatccacaaagagtacatgagccatcatcaaataacaacgggattgatgtaaataacgagaacaatcacgagcctgcaggccttgtaccagttggaccctttaaacgagagtctgagaagtgataaggtgagagagagagagagaaagagactctttactctgattcaaaaaatcagtttaagaagaagattgtaaaaagtttcaagaactggagatttcatgtccgttttttttccttccttctgattcttagatcgttgctggtgtaaccgagctttgttgttgaagagggaaggtttatgttgtttgtgcattatcttagttttaaggaattagcttaagtgctcacatgaatgtaagctaatctctgaaattctaaataattttatttgtttctg

SEQ ID NO: 29301 - DNA, 1325 bp, Arabidopsis thaliana
  Clone ID: LIB9-024-C9_FLI
gcttgtgagcagagagagagagcgagcgaggaggctagagaatcgagaatcgatcttcgccgaaccaccttgtcttctcttagctcatcgaatctctccgtcgccgtcgattcttcccgccggtgaatctctgccttattgttttcttcaatttgatcgtcctgaattcatcgtcctatttagggtttcgatcacaatctgaagaggaggtcatggacgtttctgctagaaagtcacaaaaagctgggcgcgaaaagttgaggagggaaaaactgaatgagcattttgttgaactgggaaatgtactcgatccagagagacccaagaatgacaaagccacgattctgactgatactgttcagttgttgaaagagctcacatctgaagtcaacaaactgaaatctgagtacaccgcattgacagatgagtcccgcgagttgacacaggagaaaaacgacctgagagaagaaaagacatcgctgaaatcagatatagagaatctcaatcttcaataccagcagagattaaggtcaatgtctccatggggagctgcgatggatcacacagtcatgatggctccaccaccctcctttccataccctatgcctattgctatgcctcccgggtcaatcccaatgcatccatcaatgccatcttacacatactttgggaaccagaaccctagcatgatcccagctccatgtcctacatacatgccctacatgcctcctaatacagtcgttgagcaacaatccgtgcacattccacagaaccccggtaaccgttctcgggaacctagagcaaaggtttcaagagagagcagatctgagaaagcagaggactccaacgaagttgcaacacaactcgaattaaaaacccctggatctacttctgataaggatacattgcaaaggccagagaagacaaagagatgtaagagaaacaacaacaacaactcaatagaagaaagctctcattctagcaagtgttcatcttctccgagcgtacgagaccacagttcttccagtagcgtagctggtggccaaaaacctgatgatgcaaaatgattcgaaagaatctgatgttgatcatctcaagtatccaagtatcgtttcgatgagtactgtatatagtgcgagtacaaaatgcacttagctgtttaaagcagtgttttgatgcaccgtggcattcgttttcctcggatagtcatttctcagatgattttcatccttaataggtctgctttagttctaaaactcggatgatttgtaatttccagtgtccaaatctactaattttattaatcctataaattaaacaaactt

SEQ ID NO: 29302 - DNA, 947 bp, Arabidopsis thaliana
  Clone ID: LIB9-027-D10_FLI
aaagatttagagaaaaaagtgagttattaagagattccaatcaaaatgagcggagacaacggcggtggtgagaggcgcaaaggctccgtcaagtggtttgatacccagaagggtttcggcttcatcactcctgacgacggtggcgacgatctcttcgttcaccagtcctccatcagatctgagggtttccgtagcctcgctgccgaagaagccgtagagttcgaggttgagatcgacaacaacaaccgtcccaaggccatcgatgtttctggacccgacggcgctcccgtccaaggaaacagcggtggtggttcatctggcggacgcggcggtttcggtggaggaagaggaggtggacgcggatctggaggtggatacggcggtggcggtggtggatacggaggaagaggaggtggtggtcgaggaggcagcgactgctacaagtgtggtgagcccggtcacatggcgagagactgttctgaaggcggtggaggttacggaggaggcggcggtggctacggaggtggaggcggatacggcggaggaggtggtggttacggaggtggtggccgtggaggtggtggcggcgggggaagctgctacagctgtggcgagtcgggacatttcgccagggattgcaccagcggtggacgttaaaaccaacgccggttacgcggtggagaagagtgagttggttatctcacaagtgatcggttctttctcccgccgccttctatctctctattatccactttttgcttattatgatggatctctatctttgttagttggttttttcttgatggtttcggattaggactcttcttttggttttgctacttatggttggttttatttatggtacttgtgatatgggtgaaatgctctacttgttgctctgtttcaagtgttcataatatgcgaacaaatattctgggttttgtttc

SEQ ID NO: 29303 - DNA, 784 bp, Arabidopsis thaliana
  Clone ID: LIB9-027-E5_FLI
gctcaaagagactttccatcatccatagaagatgaaaaaccaatcactggattattagatgggaatggagaatatactcttacatatgaagacaatgaaggagacaagatgcttgtaggagatgttccatggcagtaagaatcttttcttttctttttcgtttttttctgaatctgagtcagctttttgttctatctaaaggagaagtattagattcctagtcacatatttattatatcttaatcacagtttgattaataacaaacttagtttggttaagctattaaagattgtggactttttgatcactaaaattgattatttcttaaattgtcagaatgtttgtgtcttcggtgaagaggctgcgtgtgattaaaacttctgagatttcttcagcattaacatgtaagtgtaggattttaataacattttttagttgttttggtgactcttttaagtgaagttcttagaatgtttttttgttgttttgaaatttgcagatggaaatggtaagcaagagaaaatgagaagatgaagaaaaagatcttttacagcttttaaagaagtagagagatgttattaattgcattttgcctttaaactttgatgagtttttggtcttggaaaagtttctgatataagtctgatgtacattctggtttgttacatcttcttttggcttttgagatatcatagagttttgttggaactcaaagaccaaacagtgcaatgatgattttggggtcttgagtaaatttacaaacccttttaggcatattataat

SEQ ID NO: 29304 - DNA, 1417 bp, Arabidopsis thaliana
  Clone ID: LIB9-031-G6_FLI
gcttaagcatcatcattctctcacctaacaactccacacaagattcttcgcatggaaagttgttcttcgacttctcttctctaactcgctatcttttaactcacccagctccactgagtcgaaaatttcaaacctttactcgtttccttcatggctaataacaacaacatcccacatgatagcatctccgatccatctcctaccgacgatttcttcgagcagatcctcgggctttccaacttctccggttcttcaggttctggtctctctggaatcggcggcgtgggtccacctccgatgatgcttcagcttggttcaggcaacgaagggaatcataatcatatgggtgccattggaggaggtggacctgtagggtttcataatcagatgtttccgttgggattaagtctcgatcaagggaaaggacatggctttcttaaacctgatgaaactggtaaacgtttccaagacgatgttcttgataatcgatgttcctctatgaaacctattttccatgggcagccaatgtcacagccagctccaccaatgccgcatcaacagtctactattcggcctagagttagggctaggcgaggtcaagctaccgatccacatagcatcgctgagaggctccgaagggaaagaatagcagaacggatcaggtcgttgcaggaacttgtacctaccgttaacaagacagatagggctgctatgatcgacgagattgtcgattatgtaaagtttctcaggctccaagttaaggtcctgagcatgagccgtcttggtggagccggtgctgtcgcaccactagtcactgaaatgccattatcttcatcagttgaggatgagacgcaggccgtgtgggagaaatggtcaaacgatgggacagagaggcaagtggctaagctgatggaagaaaacgttggagcagcgatgcaacttttgcaatcaaaggctctttgcataatgccgatctcattggcaatggcgatttaccattctcagccaccagacacatcttcttcaatcgtcaaaccagagatgaatcctccaccgtagatttttgttcatccaacggtccccagctgatgattgacattttgctctgtttcccactactagacttttgtgactcatgaaaggtaagtaaaaaggcattggagatggaatctaagtaggatttgtgcagtaaagaagtaaaacgggatctgtcaaaagaaggaaaaagctctcgcttgcttggctagtatttatcattttgatgaaagtaactcttttttgttcaaagactttagtgtgattttcaggaccaagggctttgagggtagtgctagctgtagtaatagtaatgaaggtgtgggatcgtgtttctgaattatgtaaaaaaggaagaaaaaacaaatgttggtattatatt

SEQ ID NO: 29305 - DNA, 616 bp, Arabidopsis thaliana; identical to SEQ ID NO: 12857
  Clone ID: LIB9-033-F4_FLI

SEQ ID NO: 29306 - DNA, 1105 bp, Arabidopsis thaliana
  Clone ID: LIB9-036-B12_FLI
gtttttagggttttagcggttgctctctcggaagccagagagaagagggaagaggaagtctaattcctctgcgttttttgcaattagggttttctcaattggaatcgaaaatggtgacagacaagagcaagaaggcgaaaaccgaagaagaaaacgtcgagcaaatcgatgcagagcttgtcctctcaatcgaaaagcttcaagagatccaagacgacctcgagaagataaatgaaaaggctagtgatgaagtgttggaagtggagcagaaatataatgtgataaggaaacctgtttatgacaagcgtaacgagatcatcaaaaccatccctgatttctggttaactgctttcttgagtcaccctgctttaggtgaacttttgactgaagaagaccaaaagattttcaaatatcttagctctcttgatgttgaggatgccaaagatgtgaaatctggatactctatcactttttccttcaatcccaatccattttttgaagatggaaaactgacaaagacttttacctttctcgaagaagggacaaccaaaatcacagccacgcctatcaaatggaaagagggcaaaggcctggcgaatggagtgaatcatgagaagaatggaaacaaacgtgcactacctgaagagagcttctttacctggtttagtgatgctcaacacaaggaggatgttgaggatgagatgcaagacgagcaggttgcagatatcatcaaggaagatttgtggcccaaccctctcacctacttcaacaatgacgctgatgaagaggactttgatggagacgatgatggagatgaagaggagaaagaaggtgactctgatgaagatgatgacgaagaagacgaagttggtgaggaatgatggcagggatacccagaaaccacatttgcttacatgtcttctctataacagagtgtgtaaagttttgtgtgttgaaaggtttttaattttaagcaaaagtggattatgacgacaacagacaagcttttaattttattttaccgtaatagttatatcttgttgtaagaaaccattttcagccttttgttggaaaatcctgcttaaatggtttttgagtcttacat

SEQ ID NO: 29307 - DNA, 977 bp, Arabidopsis thaliana
  Clone ID: LIB9-038-G10_FLI
ggctcgagatttccctcctcctcttcatctcttttgcagatatggatggttattattctctgtctcccatctctgtcctccaccggattaaagattccttccatttcgccgtctctgcccttctcgccaacctcttctccgctctcttcaccttcttcttcgctttagtggggactttgctgggagcattgacaggggctttgatcggccaagaaacagagagcggtttcatcagaggagccgccgttggtgctatctcaggcgccgtcttctccatcgaagtctttgaatcttccctcctcctttggcaatccgatgagtctggaattggatgccttctctacttgattgatgtcattgctagccttttgagcgggaggcttgttcgtgagcgtatcggtcctgcaatgctaagtgccgtccagagtcaggtacaactaccatttcttttctttgatgcatcattcattatccttctcaacttttgtattaataataaacagatgggagctgtggagtcccagttccaagatcatacagacatctttgacactgccatttcaaagggtctcactggggactctctcaacaggatccctaaggtccgaatcacagacacctctccggagattgtctcttgctctgtctgccttcaggactttcaggtgggagagacagttagaagtttgccgcactgccatcatatgttccacctaccatgcatcgacaaatggcttcgcaggcatgcttcttgtcccttgtgcagaagacatctttgaattgattttgaactcttctttcttctcttctttgtacatgaggtataggcatacacacacacacatatatacacactagtagtcttccttgattttttttagattacacgttacacagattttgatgcaccaatcattgtaacttcactcatctcttggagatcctgtttatttatgctacttattcttggcttcatc

SEQ ID NO: 29308 - DNA, 1156 bp, Arabidopsis thaliana
  Clone ID: LIB9-042-C11_FLI
cctaaacgccgttgtctgatattgagagagagagagagattaaaaacttcttctggttccttttatcaacattttttctctctcttaaaacttcgaagcgatttttgatttacagactatggaaatggaatcattcatggacgaccttttgaacttctctgtaccggaagaggaagaagacgacgacgaacatacgcaaccaccgaggaatattactcgccggaaaactggattacggccaacagactccttcggtctctttaataccgacgaccttggagtggttgaagaagaggatttggaatggatttcaaacaaaaatgcttttccggtgattgaaacattcgtcggtgtattaccgtcggagcattttcctataacgtctcttctggaaagagaagcgactgaggtaaaacagctgagtccggtttcagtacttgagacgagtagccatagctccacaacgactacctcaaacagtagcggcggaagtaacggaagcacggccgtggctacgaccaccaccactccaacaataatgagctgttgcgttggttttaaagcgccggctaaagcgagaagcaagcgtcgtcgtacaggacgccgtgatttacgagttttgtggacaggaaacgagcaaggaggaatacagaagaagaagacgatgactgtggcggcggctgcgttgattatgggaaggaagtgtcaacactgtggagcggagaagactccgcaatggagggcaggaccagcggggcctaagactctgtgtaacgcttgtggcgtgaggtataagtccgggaggctagttccggagtatcgtccagcgaacagtccaactttcacggcggagttacattcgaattctcaccggaagattgtagagatgaggaagcagtatcagtccggtgacggtgacggtgatcggaaagattgtggataaaaagtgattaggattaatttttattttttcggagaaacttttttttttttttttttcgtttaatttctctttatttgtttttaaagtctgttttagggttttgcagttggaatttaggtttttaattttttgcttatcttttttatttgtgaaattagtggtaattacttatttagggaatattatggtcatggaatggaagataactttctc

SEQ ID NO: 29309 - DNA, 1246 bp, Arabidopsis thaliana
  Clone ID: LIB9-044-D5_FLI
tttcagatttctctctctccatttggcgatagaagaagtcatgtaccaatcatcatcctccacgtcatcatcatcgcagagatcatcgcttcccggcggcggaggactgatccgttacggctcagctccgggatcgtttctaaactctgtggttgacgaagtcatcggaggaggctcatcaaacgctcgtgacttcaccggctatcaaccgtcgtcggataacttcatcggtaactttttcaccggagctgctgactcatcctcgctgagatccgattcgacgacttgtggagtcaacaactcatccgacggacagaaacagctaggcaataacaataataataatagtaataaagatatcttcctcgacagatcctacggtggattcaacgagatctcgcaacaacacaagagcaacgacatcggaggaggaaacagctcaggatcttactctctcgctagacaacgtagctctcccgccgatttcttcacctacctcgcctcagataaaaacaatttctcgttgaaccaaccaaccagtgattatagtccgcaaggagggtctaatgggggacgtggacattccagattgaagtctcagctaagcttcacgaatcacgactctctggctcggatcaacgaggtcaatgagaccccagtccacgacggttcaggccattcgttttctgcggctagctttggtgcagccactactgattcttgggatgacggttccggttcgatagggtttaccgtgactaggcccagtaaacgatccaaggacatggactctggtctcttttcgcagtatagtcttccttcagacacttcaatgaactacatggataacttcatgcagcttccagaagattctgtaccctgcaaaatccgggccaaacgcggctgcgccacccatcctagaagcatcgctgagcgggagaggagaacgagaataagtgggaagctaaagaagctacaagatcttgtccccaacatggataagcaaacaagctattcagacatgctggatttagctgtacaacacatcaaaggccttcagcatcaacttcagaatttgaaaaaagatcaagagaattgcacgtgtgggtgcagtgagaaaccaagctagctcaaacccaaaggtagggtcatcctaattttatttgcattgttccgattttatcatatgagagaattagagaagatgtaaataaaatagattatattaaatgtctaatcctcttat

SEQ ID NO: 29310 - DNA, 728 bp, Arabidopsis thaliana
  Clone ID: LIB9-04-E10_FLI
atttgcaattcgatcttctatgccttcattttgtggagctaatctgtgctgggaactgcaccgaagctctcaaatttggtaagacaagattggctccttttgggaaggtcaaaaaatatgtagaaaagcttgaagacgtaatggcattgctcgcttatgaagaccctgagaaatccccaatgttccatcttttgagctctgaataccgccaacaagttgctgataatctgaaccgcacaattcttgaacacacaaaccacccgagctacacaccaatggaaaggatcatacaacaggtgacagttgtgagacaatacttgactgaggagaatggcaaagatgcgtttcctccattctctctgaaggattctctcaaaggctaagatcgcaggactactccaaagtttgctaggaggaggatatgctaagcattgtcatgtaaatacaaaaagaccttgctcctctctaaagtttgcaaggttagtcttccatggccacaggcggggtttcagtttgctgttacaggagatcaatattgtgaaggacagtttcggcttggtttggtttggtttggttcagttctctaccagaagattgtttcatcaactttgtgtgagtttagtcgataaatctgtaatccatatctttggaatacacatttctctttgtaactatcgtttatgttttgatagaatacttgcaaattcaaggttttatttttagacatc

SEQ ID NO: 29311 - DNA, 918 bp, Arabidopsis thaliana
  Clone ID: LIB9-15-H9_FLI
ggctcgagttcttcttctacttcgtcctcatcatcgtcacatagatcctcctttttcgttaattggggagagatatactttcttttgaggatcagatcgtgacagggtttagctcaaggagaggtattagatccgtactttgtgataaactttctcaagggtgagaaaaagaagaagaaggtgagaaaagtgaaggcaaggctttgaggatgtcttttacaggaactcaacagaaatgcaaggcttgtgagaagactgtttatgctgttgagcttctctctgctgatggagttggatatcacaagtcttgcttcaaatgcactcactgcaaaagcaggcttcagctgagtagttactcatcaatggaaggtgttttgtactgtaagcctcattttgagcagctctttaaggagagtggtagtttcaacaagaactttcagtcacctgcaaaatcggctgacaaatcaactcctgagctgacaaggacgcctagccgagttgctggcaggttctctggtacacaagagaaatgcgccacttgtagtaaaactgtgtatcctattgaaaaggtaacagtcgagagccagacatatcacaagtcctgcttcaagtgctcacatggaggttgcccaatttcaccttccaactacgcagctcttgaaggaatcctgtactgcaagcaccatttcgctcagctcttcaaggagaagggaagttacaaccacttaatcaaatccgcttccatcaaacgctctgcagccgcagcagtcgccgccggtgtaccagcagcctccgttcctgaatcttaaaatccaataatttctcctctctagtctaaaatttgaagttaatgccaaactgattcagtttgatttctctttgtgagagcgtgtgtgtaatctatgctttgatgttctt

SEQ ID NO: 29312 - DNA, 2062 bp, Arabidopsis thaliana
  Clone ID: LIB9-18-E8_FLI
ccaagaagccaaaacgtcaagatgctaacaacccttgtagtctaaccactcccaagatttaagaattttcttacttttgttctagttttgttgagaaaaagatgcatccgatcttcgatgccatccttcaaaatgaccttccagcttttcttggtttggtggaagcgagagaatcttccctggaggagagaagcgaggaacagaacaccaacaacacggttttgcacgtagctgcaaagctcggtcaccgagaactggtcgccaagattattgagctccgaccttcccttctctcttcccgtaacgcgtacggagacacacctttgcatcttgctgctcttcttggagacgtaaacatagttatgcagatgttagacactggattggaactatattccgcacgcaataacaagaaccaaacacctctccacttagctttcgttagcattttcatggaagctgccaaattcatcgttgaaaagacgaattcagtcgaccttgatgaactcaatttcgccttatcaagtggatctacttgtattgttgggattatactggagagatttccagagctagctaggaaaaatgcttgggaggttgaagacggctcgcgatcaacgttactgcattatgcgtgtgacaaaggtgaccttgaactgacaagtatattgttaggactcaatcaaggactagaagaagctcttaacagcaaaggtttatcacctctgcatctagcagtccaaagaggctcagttataatcctggaggagtttatggacaagtctccattgtctttctgcgtaaggacgccgtcaaaagagacagtctttcatctcgcggcacgaaacaagaataccgatgcctttgttttcatggcggagaatttgggaactagcagcccaattcttttgaagaaaaaagatcaacagggaaacactgtcttacatattgctgcttctgtgtcttgtggttctccgcttatacgttacattgttggtaagaaaataatagatatcagagacagaaacaatatgggttatcgagcttatcaccttctccctcgacaagctcaagactatgagtttatatcaagctacctgaggtgtgacaccaagacttcagaagaagtggactctaaaaaggctgagagaaatgaaccacacatagggcattctgaggtaataaggctgcttaagctaatcgaaataagcacatcagagatagcagagagaaagaaaagcaagaaacatcatgttaaaagaggtcataagagcttggaacatgagatgcatatagaagcattacaaaatgcaagaaatacgatcgcgatagtggcagtcttgattgcttcagtttcttatgccggtgggataaacccgccgggcggtgtttaccaagatgggccatggaaagggaaatcgcttgtagggtttatggcaacggcttatgttgcggcatctttggtgaccataccgcattttcccggaactcgatggttatttccggttattatctctgtagctggtggatcattgacggtactcttttcctatctaggagttgagaccatcagtcactggtttaagaagatgaatcgtgtagggagaggactacctatttattttatcaaaaataaccgtgtagaagatatacctgccattgcaaaaaatgaaggtgaaatgccttccttagcaaggaccaactcagacttggccgcctcagaagggtcaggctatttcacctattgaatctttaaggtaaattttctacgagactactctctctggtgctcgagcttttaccgtggtgtttgcagcctatcttatgggttttgagtgtctaaagtgattttcttgatgagcttcttctcctcacagggaccggcacaagatttacttgaagcagatttatattgccattgtatgatgcatccctacttaaggagtttcgtgtaaactggtctcacctatgttatctctatcatttaaagtccaaaaagaatgaaaaatgttgtcaatgatgttttacatgttttatatcaatactcagtacatgtttcatc

SEQ ID NO: 29313 - DNA, 622 bp, Arabidopsis thaliana
  Clone ID: LIB9-40-H7_FLI
gagtctctcagtcgttaggggaagcaaatagagaaatggctagctttactgcctccgcttccaccgtctccgccgctcgtccggctctccttctcaagcctaccgtcgccatctctgctcctgttcttggtttgcctccaatgggtaagaagaagggaggagtgagatgttcaatggagacaaagcaaggaaacgtctcagtcatgggggctggagtttcagctgcagcaacagctgctttgacggcggtgatgagcaatcccgcgatggctttggttgatgagaggatgtcaacagaaggaacaggattaccctttggtctaagcaacaacctcttgggttggattctgtttggagtctttggtttgatctggactttcttcttcgtctacacttcatctctcgaggaggatgaagaatctggtctttcactctgaaggaagaatcaatctttcgtcttctcatttccattttcatgtgagaacatgaatcaaaagtgttcacccttctagtttcttgtaattgttaagtaaagactaaaaactattttcatgtgtgtttactttcccccattctctttatcttgtcataacattgataaggaggagattatgtgattatt

SEQ ID NO: 29314 - DNA, 683 bp, Arabidopsis thaliana
  Clone ID: LIB9-43-G8_FLI
gcaatacaagagaagcaattagaaaggcttaaccataattagagattcacaaccaaagcaaaatggcatcatacaagctcttccgcattgcttttctagtgtgcctctcttcctctatgatgatcaacacttgctcagcctcacgccgccttctccaacaacaacctcttcctcaaatcccaaatctgcctattccaacaatgggactacctccattgccatcgacgttgccacaaccgtctttaccaactctccccacaatgcccactgcaatgtctccatttccaatgccatcagctttgccacaaccaaatcttcccaccattcccacggcaatgcctccaatgccaactttgccttcatttccaacaacaattccttctcttccgactaatattccatccattccttctcttccaactaatctcccatccattccctctctgccgactagtctcccatccattccgttcttctctcccccgccttctgcaactacttcgagtccttgaactatcatcacttcatgtgattgatgatgtatattttattataagattgttgtaattagttgtttcattgtggtgtgtttttgtttgtttaattacgcatacccccgtttgatgatttgtattttgtacctttaatttccttttgattattaatatgttgtattttaaatt

SEQ ID NO: 29315 - DNA, 1852 bp, Glycine max noir
  Clone ID: UC-GMFLLIB3275P112E12_FLI
tttgacaacggatccaaggccattaattgtgtgtgcccattaccaaaccccatttccattaatctaattcaattgtgttttactaccaaatcttcattgcttcctcactcaccggcgcctactcatatcacagatcatagataaataataccaatacttcatagtattcacgaaccattctatttccattcggcagcaacaaaatcaccatccttcttctgcaccgcaatgctcttcctcttccctccgtcattagtttgttagttagattacccttttcccttccatgcttacgtcaccaccgctcaccattcactctctttttacccctaaaccattgaatcgatctaaatctctcccaaatcgcaaaccccttttgctcaattgagtcaattctctccctaagttcctctgtcggcgtctgggtgggtaaaagttgttgttttgtcttctgggttttggagcaaagacaaaagatgggtgagggagaacgtttccagcttgggactgtgggtgcgttgactctttctgtggtctcatctgtgtccattgtgatttgcaataaggcgctgatgagttcactgcatttcattttcgctacaactttgaccagctggcatctgcttgtcacgttttgttcccttcatgtggcgctcaaaatgagattctttgagcacaaaccttttgagcagaaagctgtaatgggattcgggattttaaatgggatctcaattggacttttaaatttgagcctggggttcaattccgttggcttctatcaaatgactaagctggcaatcattccttgtactgtattgttggagaccatttttcttgggaagagattcagtaagagaattcaatttgccctcagtatcctccttttgggtgtcgggattgctactgtcacagatttgcagctcaatgctctgggctctttcttatcttttcttgcagtgattacaacttgtgttgctcagattatgacaaatactatccagaagaagtacaaggtttcttccacccagcttctgtatcaatcatgtccatatcaagcagcaaccctgttaatcgctggtccatatctggataaacttttgaccaaccaaaatgtatttggtttcaagtatacgacacaagtgacggttttcataattctttcctgccttatctccatctctgtcaatttcagtacgttccttgttattggaaagacatctccagtcacctatcaggttcttggacacctgaagacatgccttgtattggcatttggttatatacttctccgagacccatttagctggagaaacatactgggtattttgatagccatgattgggatgattctatattcttactattgcactctcgagaatcagcaaaaaactgttgaagctgcatcacaatcatcccaggcaagagaagatgaatctgatcctctgatgaatgtggaaaatggaagtgcagttgtgagttctaatgtcggacaaagacaaatgtcccctgtatggagcaagagcaaagactagtatgtttaatgggctttgttttagcattgtcaagaacagttttatagtccctatagagggttaacacccgtaatccatgaggaattagaaagtggaagtgctgccaaacacatgtcctagtcatttttaatagctttagtctaatatttttatgaatcgtttgccgaccaacagtattagggaagggaacaagcacatggtcatgtcgtaattctattggccaacaaatatgtcttatagtaacatacatctcctggtgatgttttcatatcatgatacatttatgattttatatagatattcaaactttttcttggctt

SEQ ID NO: 29316 - DNA, 1497 bp, Glycine max noir
  Clone ID: UC-GMFLLIB3275P157G09_FLI
cggacacgtgggctagccttcttcaagtgttcttcctctttaatttctctatagaatacttacccttttctcaagactaacctctcgatccttctcaaaagaagaaaattaaaatggcaactgaaaagcttagaggttgtgcaaagttttttgcaagctctaaaccctacttggccatgatctctttacaatttggctatgctggcatgaacattatcactaaggtttccctcaaccaaggcatgagccactatgtccttgtggtttatcgccacgcttttgccaccgctgtcatcgctccttttgcctttatttttgaaaggaaaggtcaaccgaagataacattcccagttttcatgcaaatttttatcctagctcttcttgggcctgtgattgatcaaaatttctactatgctgggttgaagctcacatccccaaccttctcctgtgcaatgagcaacatgcttccagccatgacttttgtgatggcagtgttttgccggatggagaagatagacataaagaaggtgagatgcatagcaaagatagtgggaacattagtcacagtggcaggggcaatgttgatgaccttatacagaggtcctatagtggagatggtgtgggccaaacatccacacaataaaaccaatgcaacaaccaccacaggatcattggacaaagattggttcttaggatgcacctttcttatcattgccacccttgcttgggcttccctatttgttttacaagccaaagctatacagacgtacaagaatcatcagctaagcttaacttcacttgtgtgctttataggcactcttcaagctattgctgttacttttgtagttgaacacaatccttctgtatggagaattggctgggatgtgagcttacttgctgctgcatatgctgggattgtgacatcaagcatatcatactatgtacaaggactggtaattaagatgaaaggacctgtctttgcaactgcctttagccctttaatgatgatcattgttgccatcatgggctccttcatccttgcagaacaaatttatcttggaggtgtgattggtgccatcttaattgttataggtttatactcagttctgtggggaaaacacaaagaacaaatagagagcaaagtggcagatgaaattcccttgcctgtaaaggattctcaaattgctgtaattgcagggccaataattgatgccactgataattttactgaagaaaaatatggtcagaaaggagaagccaacaacaacaagctctcttcactcataataaccattcctattccagagcctcccactaaagctaaccaagagagaaaagcttaagcaatttggaatgtgaataggaattaatgttttttaaatttatgttttttgccctttttagcaatttctcctttctcctttttcttttttgatgacataaaaagggtcttgtttgttgcatttaagcaatatatgatgtataattttgaaaagt

SEQ ID NO: 29317 - DNA, 2030 bp, Glycine max
  Clone ID: UC-GMFLMINSOY001B06_FLI
gcacctcactcttcagcttcggagattccctcactgataccggcaacttgtacttcatttacccccgtcagagccccgattgcttgctccctccctacggacacatacccattttcatcgccccaacggacgatgctccgacggacgccttatcctcgatttcctcgctgagtctctggggcttctgtatctgaaaccgtatctgggtttcaagaacggcgcggtgacacggtggaatattgagcagggtgtgaattttgcggtggccagagccatggcgttggaccgcggtttctttgaagaaaaggggctcattgttgatgtgaccgcaaacttttctctctgagggttcagttagattgtttcaaggaattgctgccttctctttgcaattcttcttcaagtaaagttatcttttctttcctcttgtttcattaggaagctaattaattagaaatcactgtgtctcttaaagtaattattacaaaattcaatatttttattaaagtttaaatttcatacactgtctataaattttgtactctcaaccaaatagaaatcttagtaggcatgacttttaagatggttatggtcaaacacaacaaatttaccatatatgtcaactggtgataggataacatcaagaattttcttacactatgcaattattaaatttttgtaataattagtttagaagtcataattaaagtggtttttaattgattgatagtataaaaactgccactctatcaaaattaagcttatataaataattactttgaatatgatagtgtatccaatattcagtaggtcagtccagcttagtatttaaatatttaagattttcattcacttaatttccctttaggtatttattagagtgcatttccattttctggatgattgagggtgttgcatcctgttcttttttctttctcttaagcctctctgatttttttttttttggatcttttgtatccagttccttatctagcctaggcacatcttatgctaagtttagttttatcatataattcttttggcttcttcaaaaaaattagagtgattttctattataaaaactttaaatcctctaatcaagtgttgtctataactattcaatgcgtaaggaggaagaggaagcagttaaatgaatcttaaaatttgataagctagtattcattctcatgctttttttgcaaatgttgttatgtcagcatgtaggtaattcctactcctagctatttccaatggcatatgggattttccttgttggcagcaaaaaagttatttgcagctccttatttattgtgggagagattggatgcaatgattatggctatcctttgtctgaaacaactgcatttggagatctcgtgacttacataccccaagtaatatctgtaatcacttcagcaatcagggtaagaatgtgattcaattgtttagtagtaggctagtagccattatgatatcttttcaagttcaaattcaattgtaattaatgaaacagtagtgttttcttgacacccttctatatggagtgtaacgtggatgaaagagaaaggattgaggagagaaacgaggaagaaacaaaaagtgagagacatgataacaaaagagtgaaagagaaagttgtaatgaattatgttctgggtatttatcaaaagagtcatgatatttggaccttactattttggataccttatcaacaccctctcatttctttctatctctcttcctatcacatcatatcacttgtcatatctatattttttaatctttttttcttctctctctaggtttcaactggcatttggagtgttcaaatatatttttatgagcttttacttatttcttggaggaaaaaatgttcatgaaaaataatgatactacatcttaggatgactaatggttaactccaacaaaagtccaattggtaaagaatagactcatactcatttcaaaaaaagacatgagttcaaatggtgagtccctgagatctcacctaaactttttttcacacacac

SEQ ID NO: 29318 - DNA, 1825 bp, Glycine max
  Clone ID: UC-GMFLMINSOY001E01_FLI
gtgccggagctgagaggactgcaggggagcatccggaacgagtaggccagcctgtgtgccagtatttcatgaggacaaggacatgcaaatttggttcatcttgcaagtaccaccaccccaggcaggcaggagcagggggcgctgctgctacccctgtgtcactaaattattatggatatccattgcgacagggtgagaaggagtgttcctattatgtgaaaacaggacaatgcaagtttggtgcaacttgtaaattccatcatccagttcctgctggcatccaaattccaccatcgccatttgccccagtttcacctttgcctgtaccagtaccttcgccgttatattcaaccatgcagcccccacctggtccttcgtcccagcaaattggtgtgctggttgcgaggcctcctatgctgcctggctcattagtccagagcccctatggacctgtggtactgtcccctgccatggtacctatttctggctggggtccttatcaagcttctgcatcaggtgctgttcttccttctggtactccatctaatgttggttcagcacagctttatgggataacccagctaccttcaccagcagctgcctatcctggaccttatccaccttctggttccccagttggtcctccaagcagtagtcagaaggagcaggcatttccagaaaggtctaaccaaccagaatatcagtattatctgaaaacaggggaggttaaatttggtccatcatataggtataaccctccaccggacatgagtgtgccggacatgagtacgccaaaagcaaatgtgattcttagtcctgcaggtcttcctttgcgcccgggactaaaactgaagtctgtggacgaatcaaattagggataaaccagccattgtctccttacattttctccagtagccaacatcagggggcaccagcttgcactcattatgcacaacatggagtatgtaagtttggttctgcatgtaaattcgatcatcctatgggatcaatgagttatagtccatctgcttcttccctggctgacatgccagttgcaccctatcctgtgggttcaacaattgctactcttgctccatcatcttcatcttcagagttgcggcctgaacctagctcaggatccagtaaagagtctgttccatccagaatgccttcatcaacattgactgggtcaatcggctcgactttgtcgactggtggacccatttctcaatcgagcactcaaccaccttcccaaagttcaggtcctttagccgctgtcactagcaccacaagtagcaatgtctctcacacctcaagctaagcaatgtgaatgcatacctcatcattactccttttttcaatctcaattcttccactggacataattattcaaggagatcctccaataggttttgttttcagttatcctagttccattctcaggtctagcacacttcacaccaattatctttgtgttcatataaactttttgtggccatccctttgatcttgaataaaccatggccatccttgagaattttagcaatccatacgatcaccttgcttttgaataactcagaatctgcaaggccattgtgcacatgccctttcacatctccaataggttgtgctgcttatttgtgctccaatcttttttgatatgagaacattctgtccagactttcgtttatcatgtgtttatgtctcttcatctgaacccttttttaatttgggaacaattttccatttctgccttgtaagtcctgttcaacaattttcccaacttgtatctagggtttaatgtgaagagaagtaatcaggagac

SEQ ID NO: 29319 - DNA, 2776 bp, Glycine max
  Clone ID: UC-GMFLMINSOY001E02_FLI
tgaactagcctacaggcttctgggctctggcaagggtgagtgtttgttccattcctttcctctttagtttggttcgggtgacaaaacaaaacacaatggtgtgttgatcactctgtcttctctttctctctttccatttgatgtctctccccaccaaacggtcgagcaccgctggttcctccctgtcgccgccacctcctatgaaaaaggccaagtccctcctcctccgctcctcctccgacgaccacgacgccgttttggacccttcctccatgcctctcgacgacgatctccccaatgcccgcgccgccaatctcgcccgcaagaaagccaccccgccccaacccgccaagaagctcctcatcaagctccacaaagctaaaccaacattgcccacaaatttcgaggaggatacatgggcaaaactaaagtctgccatttgtgctatatttttgaagcaacctaactcttgtgacttggagaagctttatcaggctgtgaacgatctctgcctttataaaatgggtggaaatctttatcaacggattgaaaaggagtgtgaagcacatatatctgctgcactgcagtctttggttggccaaagcccagatttggttgtttttctgtctctagttgagagatgttggcaggatctttgtgaccaaatgttgatgattcgtggtatagccttgtatctagataggacatatgtgaagcaaacagcaaatgtccgatcattatgggacatgggcttacaacttttccgcaaacatctttcattgtctcctgaagtagaacacaaaactgttacaggtcttctacgaatgattgaaagtgaaagaaaaggtgaagcagtggatagaactcttctaaaccaccttttgaagatgtttactgctctgggaatttatgcagaaagctttgagaagccattccttgaatgcacatctgaattttatgctgctgaaggtgtgaaatacatgcagcaatcagatgttccagattacttgaagcatgtggagatacgattgcaagaagaacatgaaagatgtttgatctacttggatgcaagtactaggaagccattgatagcaacagcagaaaaacaacttcttgaacgtcatatacctgccattcttgataagggctttgcaatgcttatggatgggaatcgtattgaagaccttcagagaatgtactcactcttttcaagggtcaatgccctcgagtcattgaggcaggccattagttcatatatcaggagaactggtcagggcattgttttggacgaggagaaagataaggatatggtttcatcccttttggaatttaaggcttctcttgacacaacatgggaagaaagcttttccaagaatgaagcattctgtaacaccatcaaagattcgtttgagcatctcatcaatcttcgtcagaaccgacctgctgaattgattgccaagtttttggatgagaaacttcgtgcaggtaacaagggcacttcagaagaagagttggagggtacacttgataaagtccttgttttattcaggttcattcagggcaaggatgtgtttgaggcattttataagaaagatcttgcaaaaagactgttgttgggaaagagtgcttctattgatgcagagaaatctatgatctccaagttgaagaccgagtgtggcagccagttcacaaacaaactagaagggatgtttaaggacattgaattatcaaaagaaataaacgagtccttcaaacagtcatcccaggctaggacaaaactcccatccgggattgaaatgagtgttcatgttttgacaactgggtactggccgacgtatccacccatggatgttagacttcctcatgaattgaatgtttaccaggatattttcaaagagttctatctaagtaaatatagtggaaggcgtctgatgtggcaaaattcattaggtcactgtgtcttaaaggcagagtttcctaaagggaaaaaagagttggctgtctccctatttcagactgttgttctgatgttattcaatgatgctgagaaactaagctttcaagatatcaaggactctactggtatagaggacaaggaactgagaaggactctgcaatcacttgcatgtggaaaagttcgtgtcctacaaaagttgccaaagggtagagatgtggaggatgatgactcatttgtttttaatgaagggtttacagctcctctttatcgtataaaggtgaatgcaattcagttgaaggagacagtagaggagaacacaagcaccactgaaagagttttccaagaccgtcaatatcaggttgatgctgctattgtgaggataatgaagactaggaaagtgcttagtcacacgcttcttattactgaactcttccaacagctcaaatttccaataaaaccagctgacttgaagaaaaggatcgaaagcctgattgatagggagtatctggagagagacaagaacaaccctcaaatatacaattaccttgcataatttattttaccttaaaagtttattttcttaaatgacatgggtaaagctagatgtttactcctttgtcatatatgtacagtaacaacagattctccccacccctctatttttcttttcctttcatttatggaccattgtactgtaattgtaaagcatattatcctcccccttgaatttcttttcattagttgagaattcaaaattgttcccaaaagtgatcgagaaattagaaaggaattggtgattaacaaggtaggtttcttctc

SEQ ID NO: 29320 - DNA, 1297 bp, Glycine max
  Clone ID: UC-GMFLMINSOY001F04_FLI
tctgaattgaataaatttgattgattaatttttgcaggtaaggcgattttcggtgagaaagagtggtactttttcagccctagagacaggaaataccctaacgggtcccgacccaacagagtagccgggtcgggttattggaaagccaccggaaccgacaagatcatcaccaccgaaggtagaaaagttggcataaaaaaagccctcgttttctacattggcaaagcccccaaaggcaccaaaaccaattggatcatgcacgagtatcgcctcctcgactcttcccgaaaaaacaccggcaccaagcttgatgactgggttctgtgtcgtatctacaagaagaactcgagtgcacagaaggcggtgcaaaacggcgtcgttccgagcaacgagcacactcaatacagcaacggttcctcttcctcttcttcgtcacaactcgacgacgttctggaatcgctgccagcgattgatgaacggtgtttcccgatgccacgtgtcaacacgctgcagcaacagcagcacgaggagaaggtcaatgttcagaacttgggtgaaggggggttactggattggaccaacccttcggttctgaattcggtcgttgatttcgtatcggggaataataatcataatcaattggtgcaggaccagacgcaaggcatggtgaactacaacgcgtgcaatgacctctatgtccctacgttatgccatgtgggcacgtcagttccgcaaaagatggaggaagaggtgcaaagcggcgtgagaaaccaacgggtccagaacaattcctggtttcttcagaatgatttcacacaggggtttcagaattcggttgacacgtctgggtttaagtacccggttcaaccggtggggttcgggttcaggaattgaaccctgttatcgattaataatagtagtaatcttttaaatcggtaaataggtgggggattctttgggcttaactcgtgggggttttagattaatcctttagaaaagggaagaagaagaagaagaagaaggtgaaaattttggtcctcattttcagctaaagatgtagggtatacaaacgttcaatgaaccaatccacgagataaagcaatgacgggaccattttaatttgttacgacgtagttttcggcccacacaagcccttactcagccacatgaatcacatttgtacttcaaatgaacagcaagaattttttttactatatgttaggtttcgttaaataattccaatcttgatattactttgttaaccaactaaagtacctaaagaaatgcaactcattag

SEQ ID NO: 29321 - DNA, 1160 bp, Glycine max
  Clone ID: UC-GMFLMINSOY001G03_FLI
ctaagatcgtacgtgctcatagggcttacgtgcgactgtcatggcttcgtgaggtgtatcagagtagatgccaagcccgatgttggattgtagcggtgcgtgcttacctcttccacctggtggattgtactctttttgctaataagagtgcaactcatgttcatgtggtgcatctgaagggtttttgagacctatgttagtctgggggctatggttggggagttgccgcgctggttcacatgtatgaccagctaaaggaagctttgcagacccccacacgacatatgggtgggtatttgacgctattacagtgctggatatatgagtattttcccagtgttcatcagggcgtcattgatgatgggtacgcaaagatgaccccacgtgcctccaggtggcttacgatgaaggcgcacatgaaggggatcaagggaacaccatacagggcacgtttagatgctctgacgatcacgaacttttcttggttgccctacaatgagcaccgggcagttaggggcttcgagcttatttcatgctaccaggggcggctcagatggggtcatgttgtggtctatgtcataccagagagggtggtacaacagttcgggtacatccagaccatccctccaccgccggttactggttcgttgttgtatgaggacatagatgacaggtggatgcatttcgggaatcatctagcacccgcgggtgagatttgtgttgtccccggccaggtatcagcggactacatggagcggtttttccagatatctcaccctttcatcacgccgacccaagaaggtgatgagcccagacatccacttgccccagatgtggatgcatacgtcgagccacatatcccagaggttccagtcgcagttgatctccctagacattcagtggttgcttgtgaaggttgcgaagagatcacagaaaggttggagcgtgtgttcaaccttaggatggtcactgcaggaacagagttacatgagatcatagaagattgcctgcggattgctaggggtgacgcctctgatggaagtcttagggcgtgacgtagacagcgcatagattagtttttgatatcatgtgtattatttttgtatttgataacattattgtaattgttacattattttggcaatacaatttttgtaaat

SEQ ID NO: 29322 - DNA, 1446 bp, Glycine max
  Clone ID: UC-GMFLMINSOY001G04_FLI
aaaaattacaaagcacgagggtctcgtttagcaacttgtaaaggacacaacagcatcacttacataacatgcacttccccttctccaccgcattctgtgttctctagtcaatagaaagtgagcactgaatttgctttgtgccgttcctgttttcttataatttgtgcatttttttgcacataaacaaaacccatgggaagggctccttgttgtgagaaagtgggattgaagaaggggaggtggacagcagaggaggatgagatcttggcaaaatacattcaggccaatggggaaggttcttggaggtcattgcctaaaaatgcaggattattaaggtgtgggaagagttgcaggctgagatggattaactatttgagagctgaccttaaaagaggaaacatttctgctgaagaggaaaataccattgttaagttgcacgcttcttttggtaacaggtggtctttgatagcaaatcacttaccaggaagaacagacaacgagataaaaaactactggaattctcacctcagcaggaaaatttacagtttcccaggtgcaggtgcaggtgcaagtgcagggatcatggatacacctaaggtagtatatattcctcccaagcgcaaatgtggtagaacaagtcgttgggccatgaagaaaaacaaaacatacacccaaaaagtcaatgataggattaaccagagacacacacaaattggtttccctcaacagaacagtgacaccgcagttccgacgccaccaactccgtctctagagagtgagggtttgtcaaacgccgttaatgacttcaaggtcctggacggtgacgtggcagagtttgatgagccgagaacggaggagctggaggcggaggtaaataaacgtgacaatagcgttggaggcgtggaagaaagtagtaataccgatgaagacatcttgggactgtgtgaactagagggcattaatgaggacagtgggatgttgttgggttttagtgacattttggaaagttgccttgcggaaacaacatgtggggtttgggacataagtgaagagagagaaagcaatgacgtggtggcggctgatgcttgtcgcgacaaaatagcatcgagtgaggaagggtcatgctcttccatgaatcaagactgggactgggagagcgtgttagagtttagtaacgctgttgataattgggaggaccaagacaaattgctcacttggctgtgggaggacgatgactgcaagagattgggagagacagatactcagatactacaaaacgacatggttattgattggtttctctcttgattcatccaagaataaaataggcttagtgtgtgtgcccccttggtcatgtttctttaatctgttcttcttggattgattagggaatgtgtaaacttaataaatactttttttagttacttatataatcatccttaagac

SEQ ID NO: 29323 - DNA, 1101 bp, Glycine max
  Clone ID: UC-GMFLMINSOY001G09_FLI
gttcaagttgaagttctcaatctgattgcaaaggagaaaatgggtgataatgattcgctctccgaattcctcgcatctgcagtcgacgctgcttgcaaggctggtgagattattcggaaaggtttctatcagaccaagaacgtgcagcacaaaggactggttgatttggtcactgaaactgatcaagcatgtgaagatctcatatttactcatctcaagcaactttactccactcataagttcattggggaggaaaccacagctgctggtggcaatgcagaacttacagatgaacccacgtggatagttgatcctctcgatggaactactaattttgtgcatgggttcccctttgtttgtgtctccatcggtcttacaattgggaaagttcctacagttggcgttgtttacaatccaataattaatgagcttttcactggaattcgtgggaaaggtgcttttctaaatgggaaccctataaaagtatcatcacaaactgaactaatgagcgctcttcttgtgactgaggttggaacaaaacgtgacaagttaacaatagatgcctgtacaaataggatcaatagcttgcttttcaaggtgagatcccttcgaatgactggctcctgtgctttaaacctttgcggaattgcatgtggaaggctggatgtatgctttgaacttggctttggaggtccttgggatgtggcaggcggtgctgtcattgttagagaagccggaggtgttatatttgatccgtctggtgcagattttgacatcacatctcagcgggtggcagcttccaaccctttcttgaaggatgcccttgttgatgttctgcaccaaatcgtgtgagaagcttactattaatcaatgacaaggagaaattgagtcagccttatgttaattcatttcccttttgttaaaatgctttgaattgtgggattcatggcgtcaattatttttctaattctcttgtgaccttaccaaaatattagtatttattctttattttttttctccaaaaatctcacataggtaacgatgcaacttgctttaaaataattccatcgcatagcctatgagctgctgcttcaacttgtc

SEQ ID NO: 29324 - DNA, 1389 bp, Glycine max
  Clone ID: UC-GMFLMINSOY001H05_FLI
gtttgacacttgccttggaaagggagggtacggcaccgtgtactatggaaaacttcaagatgggcgagaggttgcaataaaatgtttccatgatgagagtgagacagaagagaccattaagcaattcatgaaagaaactgcgatcttaggtctcctgcaccatgaaaatctggtttcactttatggccgcacttctcgcaattgcaacaaacacatgctagtttacgagtacatctccaatggcactcttactaaacatcttcatgaatcttctggtggtaaactaccatggcataatagattgaatattgccattgaaactgctactgccttggtatttcttcatgaatcaggtatcatccaccgtgatgtaaaagggagtaatattctgttggatgaaaattttactgtcaaagttgcagattttggattctcacggtctcttccagatcatgctactcatgtttcaactattccagtaggaactcgtgcttacatagatcctgactactatgaatctggaagggtcagtgacaaaagtgatgtctatagttttggggttgtattgttcgaactcatatcatccatccgcccaagtttaatggaaggcacagattatgttactcttgcacagtttgcaaagagaaaaattttaaacaaggaattaaccgctgtagtggatcaaagtttttggcttggtgttgacaaaaacatgatggaaatgataacagcagtggcagagttagcatttcagtgtgtgcagtgtcccaaggaactcagaccatccatgaaacaggtgctagatacccttgagggcataaggaaaggaacatggggattcaaccagataacatagtccttattcatgctaccaacattcctggttctatcaaaccattcatttggtttgtggtctagtaattggattttggcttaacagagatgattttgttctgcagtataggaatttcaggttagccctattgtaggttagaaatttacttgactatttagggtgtgtttgttttagctggattacactttgaggcacgttgaacatggatccttatgtcacttggattcacgttcaacgtggtttaacagcaatacaaacatgctgttacatgatacatgtaaatgcattccatgttctaaatgtataagaaagaccaaaagctggaaaccatctcagaattgcagtacatcacttcaaacattatcctcctcctcctctttaaagtaaaaacatggataattccttagtagagataaagggagttgtcaaatgtcaatattaaaaataaaaggcgtaacccgtcggcagctgttgtacatggataatggactcttcatagtactctgtatagtgtccattgaattaaagagtct

SEQ ID NO: 29325 - DNA, 1382 bp, Glycine max
  Clone ID: UC-GMFLMINSOY002A03_FLI
ttcaaaaacagtgtaacaaaaagaaaaaaaaaaaaaatatgaagttcgctataatcacaatattgttctctttatttcttcttgactttggttttgcacaacagggggatcttgacatatcaagatttggaggaaaaccaaatacaaatataggccaggctttcttaagtgcctggactcaagcatgtgcatcaccaactgctgtcaaaattgtgattccagctggcacataccaaatgggtgcagttgatgtcaaaggtccttgcaaggctcctattgaggttcaagttgatggaacaattcaagcacctgcaaacccaactgaccttaaggcggctcatcaatggtttgttgttcaatatgttaactctttcaccctgtcgggtaaaggtgtttttgatggtcaaggggcaactgcttggaaacaaaatgattgtacaacaaacaaggactgcaagatgctttgcatgaattttggttttaatttcctcaataattcaattgtccgtgacattacttccaaggatagcaaaaactttcatgtgaatgttttggggtgcaacaatttcacatttgatgggtttaaagttagtgcaccaaaagatagccccaacaccgatgggatccacattggaagatccacagatgtgaagattcttaacacaaacattgcaaccggagatgactgtgtctcattgggtgatggttgcaaaaatataactgtccaaaatgtgaattgtggacctggtcatggcattagtgttggaagccttgggaagtacgatgctgaagagcccgttgcaggtcttctagttaagaattgcactttgaatggaacagataatggtgtgagaattaagacttggcctaacacgccaggagcaattacaattactgatatgcattttgaagatcttaccatgaataatgttatgaaccctatcatcatagaccaagagtattgtccttggaaccaatgctccaaacagaatccgtcaaaaatcaagataagcaaggtttccttcaagaacattaagggcacttcaggaactaaagaaggggtggttcttgtttgtagtagtggtgtaccatgtgaggctgtagagatggctgatattgatctgacattcaacggaagtgcagcaacagctaaatgtgctaatgtcaagcccacaataacaggaaaagctcctacttgtgcagcctagaatgagcaacaataatggcctttttccttatcaattttcttttactatttttcctatgtagagaagcaagccatccccattaaaaaaggaggtgtctagtaattgtattctcctgtgaataaatacttcaacgtgactatggtaaaataattatcatatatataatgtttcttc

SEQ ID NO: 29326 - DNA, 1130 bp, Glycine max
  Clone ID: UC-GMFLMINSOY002C05_FLI
tgtgaattgttgttgagatctgaatcaaaatcagaaacgataatggctacaccggaccacctcttcaacctccgcaacaacttctacctcggcgcttaccaagccgccatcaacagcagcgacgttgccaacctctcccaagaagataccctcgagcgcgacaccctcgtccaccgctgctacatcgccctcggccagctccagttcgtcatctccgagatccacgacgatgctcccacaccactccaagccgtcaaactcctcgccctctatttctcctctcccgacaccaaggattccgccatcgcgagtctcaaggagtggctcgccgatcccgctattggaaacaacgccacgctgaggctcgtcgccggtctcgtcttcctccacgagaatgatttcaatgaagccctcaaacacaccaacgccggtggaaccatggaactgcacgcgttgaatattcagatctttattaagatgcataggtcggattacgcagagaggcagctgcggatcatgcagcagattgatgaggatcacactctcactcaactcgccaatgcttggctcaatttggctgtgggtgggtcgaagatccaggaggcgtatctgatcttccaggatttgtcggagaggtatcagtccaccagcttgctcttgaatggcaaggctgtttgctgcatgcacatgggcaacttcgacgaagctgagacccttttggttgaagctcttaacaaggatgccagggatccagaaactctagccaatctagttgtatgctgtcttcatctcggcaaaccatctaacaaatcattcagccagctgaaactttctcacccagagcatgtattggtcaaacgggtatcatcagctgaagaaagttttgatagagcgctacaatcattttcctcatgagtgtcgatgattgaatttctttcaagagttgaatggtgtgaggtcttcccgtgcaatttttacaccttatcgtggctattgtattggttgcgtatcttagaacataatcaactgggtaatgtgtcatagtattcaaatttgttatgtttttggtttacttgagtcttgatgttgtaaaagctacatctgacattaatttttaaacatgttcattt

SEQ ID NO: 29327 - DNA, 1921 bp, Glycine max
  Clone ID: UC-GMFLMINSOY003C08_FLI
gagaaggtgcgctttgacaaacttcaagctgaaagcattaggttcatggcaagagaaatactaattctccgcacactggaccacccaaacatcatgaaattggaaggtataatcacttcacaactatcaaatagcatataccttgtatttgaatacatggagcatgaccttgctggtctagtagcttctcctgacataaagttcacggactcacagattaagtgttacatgaggcagctattaagtggaattgagcattgtcaccttaaaggtattatgcatcgagacattaaagtatctaatatattagtgaacaatgaaggtgttctcaagatagcagattttggattagccaatacccttagtccaaatagtaagcaacccttaacaagtcgtgtggtgactctatggtatcgtcctcctgagctcttgttgggatcgacgagttatggagtttcagtggatctatggagtgttggctgtgtatttgctgaactttttctagggaagcccatccttaaggggagaactgaggttgaacaattgcacaaaattttcaagctttgtggttctccacctgaggagttctggaaaaagaataagcttcctctggccacaatgtttaagcctaaggctaattacgaaacctctcttcaggagaggtgtagaggctttcctgcaactgctgtaaacctactagagactttactttccattgatccttccaagcgcaggactgcctcctctgctctcatgtccgagtatttcagcaccaagccatatgcttgtaatccgtcacacctgccaaagtatccaccaagcaaagaaatggatgccaaaaatcgggaagaagtgcgcaggaaaaagaatggaggtaaagtgagagaggctgtgacatcaaaaaggcaaagacaagtccacaaagtttcccatgaccatatcaatttcaaccaaccagctttgaaagagaatgtttctcaaaatcctggtacaaatgatggtagggcatatgttacaaaaggaaaagtagcaggagctatgcataaagagcaaccaaagccttcatatgatgcaaagtcagaggctgcccaagtggtgaatggttgcaatggatacagtgtatactcaggaccggcaccaatctcgggatctagtggctttacatgggctaaaaggagaaaaccaaaagcttcatccatattgtcagatggctcaagaagcaaagtcagtgctctggatccaacctttgcaaaaggtacatatgatttaacagaacatgggatagaagtttcagaaaggaaacatagttataacacaagccatcgggatgagacttccagctatgtatcaaaaaagtaccaggctcctctcgttcaacaaaaatcattcgatgtagctgatacatacaactcaaattattacatggactttgatttcacagataaaatggatgctttgatagacactcagggccacagaaaacatgatgagccagtggagcaatcagtaccgaatatgatcccatcaaataaaaatgaggagttgttgcattggaatgaaaatgatatgcgacaatctcttcgtaaatcaaggttgggaagagaccaataacacaaggatcataggagtggattaatcccacatctacaaaaggggtgctcggccaaacattgtggccattgttgtctgaaccattctaacttctgacttcagctctcttgagttgatatctttggcgacagtttccccctccttttgttcactagactagagttaagtgttcatacagatttatagtacatacatactaggactaacactgaattatgtataggattacagcaacaaattgcaaagcccacgtgtaatgtgatatgtttaaagaaaggttaaattttctaatagaatttttttccttcgc

SEQ ID NO: 29328 - DNA, 1462 bp, Glycine max
  Clone ID: UC-GMFLMINSOY003C12_FLI
agttctcccaaatgggaaaattgtcgcagtcaagcagttgaaatctgagagtagacaaggggagcgtgagttccatgcagaagttgatgtcattagccgtgtgcatcacagacaccttgtttccctagttggatactgcgtctcagacagccaaaagatgcttgtctacgagtatgtggaaaatgatacactagaatttcacttgcatggaaaggacagactacctatggattggtcaacaaggatgaagattgctataggatctgcaaaaggattggcatatttgcatgaagactgtaatcccaaaatcatacaccgagacatcaaggcatctaacattcttcttgatgaaagttttgaggctaaggtcgcagattttggacttgcaaaattttcatcagacacagacacccatgtttctacccgagtgatgggaacttttggatacatggctccagaatatgctgctagtgggaaactcactgaaaagtcagatgttttctcctttggtgttgtgcttttggagttgattactggacgaaaacctgttgataaaactcaaaccttcatagatgacagcatggttgaatgggcgaggcctttactatcccaagctttggaaaatggcaacttaaatggacttgtcgatccaaggttgcagacaaattacaatcttgacgagatgatccgaatgactacttgtgctgcaacttgtgtgcgctattcagccaggctccggcctcgaatgagccaggttgttcgagctctggaaggaaatatttctctagaagatctaaatgatgggattgcacctggacacagcagagtttttggttcctttgagagttctagttatgacagtgtccaatacagagaagacctaaagaactttaagaagctggcactggaaagccaagagcaaggcattagtgagtacagtggtcccagcagcgagtatggccgacatccatctgtctcaactagttcggaccagcaaaatacgcaggaaatggaaatggggaacaagaagggtagcaaccatgattctgggatacaagttcttgattgatgattcctatgtcttgcaaaattgtgctctccagatatcagtttgcaagtgcacctatgagagtggtactggtacagtggtacatataatttgttggtatattttgcaggtccaatgtacgaattggcttgcacacgatgaatagaagttagagttgtgtctttcttttttcctggtgatttttactatctaacttgcttcacaagtatggttcctgatttatttgatacacctgaagctttgtaaacttgattcattcttcgaagctaacatttgttttaactggaaaagcctgacattgggacttaaaagtgtggaggatgagggtattttgtatttatttggtgagctttgtgactgataatgcattatatgattcttcagttggtgttt

SEQ ID NO: 29329 - DNA, 908 bp, Glycine max
  Clone ID: UC-GMFLMINSOY003D02_FLI
gtgctacacattctgccagctgtccatttccagagtcacttaagttatcaaaacaagacaactacttggtgttgcaggtcaaagaaacattcggggtggaggatgatgctacctaggaccttctttgctttcttactctttgcactgagttgcttcagatggctggaatacgcagaatccaaactacccaaactaccccaagaggaggttgatgctcttaaagaaatcactagcacgatgggtgcaacctattgggagtttgatagtgattcttgtcatagtaaaatgctgagattaacaccagagccacctaaaggatctcaaagcagcattgattgtgattgcacttctgaaaataacacctgtcatgtagttgggattaccttcaaacggctcaaccttcctggcatgcttccaccttatttggctaagcttcctaacctcacacaagttgattttgctttgaactacctaagtggtacgattccaaaggagtggggttcaacaaaactaactaatatctctctatttgttaatcgtatatttggggaaattcctaaggagttgggaagtattaccactctaacatacctgaatctcgaagcaaatcaattttctggtgttgttccccacgaacttggaagtctctctaacctgaagactttgattttatcatccaataaattatctgggaagttaccggtgacatttgctaagttgcagaatttgacagatttcaggataagtgataacagtttcaacggagaaatacctagcttcatacagaattggaaatcacttgaaagattgtgagataattgcaattcattttttttattcttgttttcaacaatacttcaaatgcactctaaattttcacaatagataaagccttcattatggttatt

SEQ ID NO: 29330 - DNA, 1787 bp, Glycine max
  Clone ID: UC-GMFLMINSOY003F11_FLI
aaaaaattgaaagaagaaaatgaagtgcacattcaggaagaggccatatcaaaggagacaattaaaaatctcaaagaagaaaatgataaactacttcagaaagtggtaatatatactgcaaattttatcaattatcagagggatatttgttttaatgcttaaattgcaactatatatttactttctcaactggcattctagaaaaatgattaaaaattagctaccatatgttttgcctttcttttacaggtttccttggaagaggtcatcaataatttacaaactgataatgaattgcagacacaaaaacatactagtctggaaatgagaattgcacaattgcaaagtgagaataattccttacttcaaaaagaggcgagtgattatgttttccctttaaaaagattaggaatcattgattttgagaatattatacatccagatatttaatagtatatcatatgtaggctggattggtggaaaaaactaatcagttgctgaatgaaaaggtagttttgagcctgaaagctgagagtttagagagaaaaataaatcttctggagaatgagttgagttcttttagtgagaaagaggttggacttgaaacaagaattgcacaattgcagagtgagaataattccttacttcaaaaagaggctacattggtggaaagaaccaatcaattgctgaatgaaaaggcagttttgagcctgaaaggggagagtttagaacaaaaaatatatcttctggaaagcgatttgaattctttagtcaagaaggagaattcaactaaagaaactatttcaaacctgaatggaaacattgctgtgctacaagcgcaggtggaagaattggaggagtccaggaataatctttttctagaaaaccagcaattgagggaaaaagtgtcgagtcttcagtcaacggtccaaaatcatgaaaacagtaacacttcttcctgctcatgggatgcatctgtaaaggatcttgcttctgaaaacgaggacttgaagtctgaaattgaagcagcctttacgttggtggagaaattgatggctgaaaatgcagaacttgttgagaaggtcaccgagttatgtgttgagctggatcaccgaagtgcagaagtcggacattctggagtcactgaatccaatgggatgactgaatttgttaaacctactggtgttgccattcctctaccagaatctgctgagtatgcgtctgtatcatcccccaagttgaattcattggaagagacttcagtgaaggataatggtaactctaatgatgctaagcatgttgttggggtaacgtcaaactcgtcgttggtatcggctgatgacgctggagaaatcgtgcaaattccattggatgataatgaaatacaagatatagagttgcaggatgctaagaatgtggaaaatgatgctgatgctgtgccaatcacagatgctccgcttatcggtgctccatttcgtttgatatcatttgttgctaattttgttagtggtgctgacttggttaaccaaagctcttcaaacactgctcgttgacttggttgaccaaagctctgttttttttggctggcagtcttgaacatacaataacctcacttacattaggcagaataccaatataggttggcctaatttgggccattttaatgtttgtatgttaattctttgaacacggaaatattgtactggggaaaagcatatagttttatgtgttcttacttcatattgctttcacttttggaaattatacctttaaaaaatggcatcatg

SEQ ID NO: 29331 - DNA, 1057 bp, Glycine max
  Clone ID: UC-GMFLMINSOY005B06_FLI
ctcttggcatcttgtgttgtgtccctcttttaagctatttccttctcttaacacaattggttgtgccaattgccatagtcaccaaccaattaacaaaggtatatatatcatcatatcatcaccaaatgaaaaatattgggttgttttttcttgtggtggtggctacttttgtggtggcagccacagctggtagcttttaccaagactttgaaataacgtggggtggtgagcgtgccaaaatctatgagaatggaaaccttctcacactctcccttgacagagcctctggctctggctttcgttccaaaaaagagtacttgttcggaaaaattgacatgcagctcaagcttgtgcctggtaactctgctggaacagtaactgcctattatttatcttctctggggcctactcatgacgaaatagactttgagtttttgggtaacttgagtggtgatccttacactctccacacgaacgtattcagccaagggaaagggaacagagaacaacagttccattcccaaagagccaacccatgagaatatactctagtctttggaacgctgaggattgggccacaaggggtgggcttgtgaaaacggattggagcaaggccccattcacagcctcttacagaaacttcaattcccaaacctcttcctccactggccaatcactggacgccacggggcaggcaaagatccgttgggtgcaaaagaattacatgatttacaattattgcactgatatcagacgtttccctcaaggccttcctccagaatgctccattgcatgagaatatttaattcaatgttgcatatcattataaaatgatcctcatgaacgtgacacacatgtgttgcctattacgttaatttactttcttgtgtaaattaatgcaactaaaactgttattattgttggtttgtgctttgttgagcactactccattgtttgtggcgaaagataattatagcgtgcaaaattatattcatggcagtgtatatgtgctgaaattgtaaagtattttcattaataaaattgttggagttttatt

SEQ ID NO: 29332 - DNA, 1836 bp, Glycine max
  Clone ID: UC-GMFLMINSOY005B11_FLI
gctgtgcgtagtaattcaaaatttgtggtaaagcaaatggcgaaagttttctgtgattttcggtttcttctcttgattgcagctggcgtcttcatctatatccagatgaggcttttcgcaacacaatcagaatatgctgatcgcctcgctgcagctatcgaagctgaaaaccattgtacaagtcaaacgcgatcgctgattgatcagattagcttgcaacaaggacgaattgtggccctggaagattaaattggtcgttgtcttgaattctttcagaagagcagaaacgtcgagaccaagaatgtggacaaacaaagtctcttgtacaagatcttgaaagaaaagacctgcagaggctgattgataaagtgcaggttccggtggctgctgttgtgatcatggcatgtaatcgtgctgattacctggagaggactattaattctgtattgaaataccaaaggcccatttcttcaagatatcctttatttgtatctcaggatggatcaaatccaaatgttaaaagtaaggctttgagctatgatcagttatcttatatgcagcacttggattttgaaccagttcaaactgaacggcctggagagttaactgcttactacaaaattgcacgtcattacaagtgggctctagatcaactgttctacaagcataacttcagccgtgtgatcattcttgaagatgacatggaaatagcacctgatttctttgattattttgaagctgcagcgactctccttgacaaggataaatccattatggctgtttcctcatggaatgacaatggacaaaagcagtttgtacatgatccatatgaactttatcgctcagacttctttcctggattaggatggatgctggccagatctacatgggatgagctatcaccaaaatggccaaaagctgggatgactggttgagacttaaagagaatcacaaaggacgacagtttatccggcccgaagtatgcagaacatataattttggtgagcatggttctagtttgggacagttttttaagcaatttcttgagccaatcaagctgaatgatgtcaaggtacacctgctttatgaaacaatacagtcttaaatatgtttcttattattagaatgatgctatttcactttggatttttggaaggttgattggaaatcaatggatttgagctatttactggaggataaatattctatgcactttgcgaacgttgttaagaaagctacacctgtctatggagctgacatggttctaaaggcatataatatagatggcgatgtgcgtatcaaatatgaagatcagtcagactttgaaaacattgctcgccaatttggtatatttcaagagtggaaggatggtgtgcccaggacagcctataaaggagtagtcgttttcagatatcaaacctcacgacgtatattccttgttggtccagaatatttgaagctacttcagatcgaagagtcttaatgttggatgaggaagagaaatatccacaatgtaagagtagttgttttcagatatcaacgaagtgttgcggagttattgatattgagcttaaagtaacatacgatagggatacttctcattgtcaaatccactgcctaaaagaggctatgatctgcgctttaagcgctaaaaaatgcacaccagaatgcgctggaacaaaattatggccaccatcccgagtattttttgagtggaaattttgtctaatgatgccgtgaggtccttagcgtggccatgggaatctcatgtatccctattcttcattcatgtgacagaaagctctacttttaatggcattgtagatttgcactctc

SEQ ID NO: 29333 - DNA, 2926 bp, Glycine max
  Clone ID: UC-GMFLMINSOY007H05_FLI
gctttgaagtaagaagagtgtgttgtgttgaagtatcaaagatgttgattggttctctcttaaacaggcgtcctaagatcaaggggactgtggtgttgatgaccaagaatgtgttcgacgtcaacgacttcatggcgactactaggggcggaccagccgctgttgccggcggcatcttcggtgccgcccaggacattgttggtggaatagttgatggtgctacggccatcttcagccgtaacattgccatacagttgatcagtgccaccaagtctgagaatgcacttggacatgggaaagttggaaagctaacctatttggagaaacatcttccttcattaccaaacttgggagataggcaggatgcattcgatgtttattttgaatgggatgagagttttggaattccgggagcattttacatcaaaaactatatgcaatctgagtttttccttgtgagtttcaagcttgaagacgttccaaatcatggaaccattctctttgcttgcaactcatgggtttacaacgcaaaattgtacaaaaaagatcgcattttctttgctaataaggcatatcttccaaatgacactccaactccactagtaaagtacagaaaagaagaattggaaaatctaagaggagatggaagaggggagcgcaaggaacttgataggatctatgattatgatgtctataatgatttgggcaacccagacgagaatgacgatctagctcgtcctattcttggcgggtctagtaagcatccataccctcgcaggggaagaactggtagaaaaccaacaaagaaagaccccagatgtgagagaccaaccagcgacacttacatcccgagagacgaaaattttggtcacttgaagtcatcagacttccttacatatgcaataaaatccttaactcaaaacgttttacctcaattcaacactgcatttggtttcaataatgagtttgatagcttcgaggacgtgcgttgtctctttgatggcggagtttatctccctacagatgtactcagcaaaattagccccataccggtgctcaaagaaatcttccgcactgatggtgagcaagccctcaagtttccaccacctcatgtcatcaaagttcgtgagtctgaatggatgactgatgaagaatttggaagagagatgcttgctggtgttaatcctggcatgattcaacgccttcaagagttccctccaaagagcaagctagatcccacagagtttggagatcaaactagtacaataaccaaagaacacttggagatcaaccttggtggactcaccgtagaacaggcactgaaaggtaacaaattgttcatattagatcaccatgatgcattcataccgtttatgaatttgatcaatggcctgcccactgcaaagtcttatgccacaaggaccatccttttcttgcaagacgatggcacattgaagccattagccattgagttaagtttgccacatcctaggggacatgagtttggagccgatagtagagtagtcttgcccccagccgcagtcaacagcgctgaaggcacaatttggttaattgccaaggcttatgttgctgtcaatgacactggctatcaccaactcataagccactggttaaatactcatgccacaattgagccatttgtcatagcaacaaacaggcatcttagtgtgctccaccctattcataagcttctcttgcctcactaccgtgacacaatgaatatcaatgcacttgcacgacaatcgctcatcaacgcagatggcgttatcgagcgatcatttttgcccggcaaatactctctggagatgtcttcggcagtttacaagagttgggttttcactgatcaagcccttcctgcagatcttatcaagagaggaatggcaattgaggatccctgtgccccccacggccttcgccttgtgatagaggactacccttatgctgttgatggactagaaatatgggatgctattcagacatgggttaagaactatgtctccttgtattacccaacagatgatgcaattaagaaagactctgagctccaagcttggtggaaggaagctgttgagacgggtcacggtgacttgaaagacaagccatggtggcctaagttgaacactcctcaagatttggttcacatttgctccattatcatatggatagcttcagctctccatgcagcagtgaattttggacaatacccttatggaggtttgatcctaaaccgtccaactttaaccagaagatttctccctgaaccaggaagcaaagaatatgaggagctttcaaccaattatcaaaaggcttacctgagaacaattacaagaaagattgaggcccttgtggacctttcagtgatagagatattgtcaagacatgcttctgatgagatctaccttgggaagagggacagtgacgattggactgatgaccaaaaggcaattcaagcctttgaaaagtttggaaccaagctgaaggaaattgaggccaaaatcaattcgaggaacaaagattcaagccttagaaaccgtaatggaccggttcagatgccttatactgtgcttcttcctaccagtgaggaaggccttactttcagaggaattcccaacagcatctctatctaaggccagagtgcgtttatgtgtggttctctttccaaacctacgttacctttctcgttgacgagtaaatatgcaagcttatgcatgcatataataattgtcttatgcattcttaagtgttgtatgtggacgttatctagttttcgtatttaataagaatggtatcaccattactttgtttttactatcatgttcacccgtagtatgtaagattgatatcccaaactatgattatgaaatcaaatttctctatggcaccagttgggattttcacatggacc

SEQ ID NO: 29334 - DNA, 1009 bp, Glycine max
  Clone ID: UC-GMFLMINSOY008A12_FLI
gtttgttgtgagctataagctagtttatcgtgaggagaatatgaagttgtttgttttctttgttgctgcagtagttttggtagcatggccatgccatggcgcaggctaccaaaggttccctctccgaatgaaaactggctatggtgagcgttcttcggaggtaaaatgcgcaagttttaggcttgctgtggaagcacacaacatccgagcctttaaaaccattcctgaagagtgcgttgaaccaacaaaggactacattaatggcgaacaatttagatcagactctaaaacagttaaccaacaagctttcttttatgctagtgaacgcgaagtccatcacaacgacatatttatattcggcatagataacaccgtactctctaatatcccatactatgaaaaacatggatatggggtggaggaatttaatgaaaccttatatgatgaatgggttaacaagggcgacgcaccggcattgccagagactcttaaaaattacaacaagctgttgtctcttggcttcaagattgtattcttgtcaggaagatatcttgacaaaatggccgtaacagaagcaaacctaaagaaggctggcttccacacatgggagcagttaattctcaaggatccacatcttatcactccaaatgcactttcatacaaatcagcaatgagagagaatctgttgaggcagggatacagaattgttggaatcattggagaccaatggagcgatctgcttggagaccacagaggcgaaagcaggacctttaagcttcctaatcccatgtactacattgagtagtaccttcacctctctcaacaatctagctagagtttgctcctatctatatgtaataaggtatgctgatatgcactattcaaataggagcattagctatgtttgttaatgtcactttatgttatgtgggtaagtcacctaagacactccacgtacctacttgttgtctcttacgcggctttaataaatcttctgcccttgttccat

SEQ ID NO: 29335 - DNA, 567 bp, Glycine max
  Clone ID: UC-GMFLMINSOY008D01_FLI
cccggctgcaacaaggtaattggtaaagcacttgtgctggatgagataattaattatatccagtcactgcagcatcaggttgagttcctttctatgaagcttgaggcagttaattcgagattgagcatgagccctactattgaatgttttccttcaaaagaagttggcactcagccatttgaccttgccggaataatatttggatcacaaccggccaggggatatgctcaaggatcacagccgggatggctgcatatgcagatagctggtggttttgagaaagcaacataatttgagggaggttcattgggaatgacagaccaatcagtgtggttggttttccattgaaaaggaaaaagtcacttggctggttggttagcatgcgctgctctattaacaacctagtcaattgatgcaaaatgttgtaaggtctgtatgttctttgtcatagtatgatatcaatagtaagaaatgcatctaatttccttgcgcatcatctgactgggaacgtagtgtttcaccatgttagcaattgaaataatcttattgtggtttagttttcgtttc

SEQ ID NO: 29336 - DNA, 1471 bp, Glycine max
  Clone ID: UC-GMFLMINSOY008G10_FLI
caaagattctgatttacctaggaatgcaaatgagagaatgagggcgatggagcagacactgatgaaaggaaagcaagctcaagatgattgtgctgctgttgtgaagaagcttagggctatgctccactcatcggaggagcagcttcatgttctcaagaagcagactttgttcttaacacaattgacagcaaaaacactgcccaaaggtcttcattgtcttccattgcgccttactactgagtatcataatatgaattcttctcaccaacaattcccccatcaagagaatttagaagacccccatttataccattatgccatattttcagacaacatattagcaacagctgttgttgtgaactcaactgtttccaatactaaggatgcctcaaaacatgttttccacattgtcactgatagactcaattacgcagcgatgaggatgtggtttttggtgaatccacctggcaaggcaaccattcaagttcaaaacattgaagactttacatggttgaatgcaagttacagtcctgttcttaaacagttgggttcccaatccatgattgattattacttcaaggctcatcgagtaacttctgattcaaatcttaagtttcggaatccaaagtatttgtctatcttgaaccacctccggttctatctgcctgagatctttccaaagctcaacaaagtgctgtttttggatgatgatattgttgtgcagaaggatctgactgatctgtggtcaattgatttgaaaggcaacgtaaatggtgctgtagaaacttgtggagaaagttttcaccgatttgatcgctatctcaacttctcaaatcctcttattgcgaagaattttgacccacatgcttgtgggtgggcatatggtatgaatgtctttgatttagcagaatggaagaggcaaaacatcacagaggtttaccacaactggcagaatctgaatcatgatagacaactatggaagttaggaacactgccaccaggtctcataacattctggaaacgcactttcccgctgaaccgatcttggcacattttaggtcttggctacaaccccaatgtcaaccaaagagatatcgagcagtctgctgttgtacactataatgggaacatgaaaccgtggcttgagataagtattcccaagttccgacgttactggacgaattatgttgattatgatcatgtgtatttgagagaatgcaacatcaatccatagataggtcgttttggtatgtttaatcattgaagttttcttagcatttgccagcaccttctaggtctgcgattccatctgtgtagggcttctacttttttaaagctttacaattctttttgtatacgtgttcctgtttttaaattggtattttttggtcttgcaacccttgatcagaaacctgcagagaatgctaactgtacttgtaaatgaaatgaagaggctagttctttttatttc

SEQ ID NO: 29337 - DNA, 800 bp, Glycine max
  Clone ID: uC-gmflminsoy008g11_FLI
atcagctaattgcaattgttaatggttagatttttgtgcacgactttttcttttctcatttctccttttatcaccgagccaatcttatgagtgtgtgatttgcaggttgtggtagacgagagaaagaagaagagaaaacaatcgaatcgcgaatcggcgagaagatctcggatgcgaaagcgtaagcacttggacgaactgacgaagcaggtttcacagctcgcaaagggcaacggcgaaatcctcggcaccatagacataaccacacagcattatctgaacgttgaggcagagaattcgattctgagggcccaaatggaggagcttagccaacggctccaatcgttaaacgacatcgtcgacggtatcatcaacctcaccaacgcaaccaccgcctacgaaagggactgttatctaacaagcgcacaaaatatcaccaccaagaacaacacgctctgtcttaaccaacaagccgtttttcagtggtgaattgtcaccctcgctctgcctttgtggatctgacaataaaaataataatttgttctcttggagttgcttcggggaggaatcaatcagtgaacaaaaaatgaaaagttaatgtgaattagtacagtacttagggtggggctatatatatgttaagtgggagattgatagataaacagaatttgtgcaaagtgcttaatgaaaatgacctggtggcctgcaactatatgtcaggcaggtcattagtactaatggatcactcttgtccaatatcatggaaaaagagatttcggtgcatgctactgtagtttact

SEQ ID NO: 29338 - DNA, 1889 bp, Glycine max
  Clone ID: UC-GMFLMINSOY010A09_FLI
ggttttatcaaaccgttgggccaagctaaagagtcaaacctaatatgtcatttaacaccatgggatattgctatgatgtctttgcactacatccagaaaggtctactcttcaagaagcctgcaacacttgttgatccacaagatttcatggagaatctgttagagaagctgaaacactctctttctctcaccctcttccatttctatcctttggcaggccaacttgtcacccaaaaaacccaagaccctccctcttatactatttttgtcgattgcaacaacactagtggagccagattcatctatgcaactttggatatcactatatctgacatactctccccagttgatgtcccacccattgttcactcattctttgaccatcacaaagcagtcaaccatgatggccacaccatgccactgttgtccatccaagtcactgaactattggatggtgttttcataggctgttccatgaaccataccataggtgatggcacttcttattggaatttctttaacacatggtctgagatcttttttcaaactcaagctcaagggcttgaatatgatgctactgttcccatttcacgccaccctattcataataggtggtttccagatggttgtggtccattaatcaatcttcccttcaaacatgaggacgagtttattgacagatttgaatcaccaaagctgagagtgagaatcttccacttttcagcagagtctattgcaaagctgaaagcaagggctaactctgagtccaaatccaaaaccagcgaaatctcttcgttccaatccttatcagcgcatgtttggagatccgtaacacgagcacggaagctgccaaatgatgagataacaagttgcaaattggccataagcaatcgatcaagattggaaccgcctcttccacatgagtactttggaaacgcagttgatgtggtgagcactgcagggttcacggcaggggaattgcttgagaaggatctaggatgggcagcatggaaggtgcacgtggctgttgcgaaccaaaacgacaaagcggtgagacaaaagctcaaagagtggttgaagcttcctgtggtgtaccaacttggtgtgcactttgatccttgtactgtgaccatgtcgagttccccgaggttcaacatgtatgggaatgaatttgggatggggaaagcgattgcagttctgagtggatatgccaacaaaaatgatgggaacgtgacagcataccaaggatatgaaggagagggaagcatagatttggaaatttgcctttcgcctgatgcagtgagcgcgctggaatcagatgaggagtttatggaagctgcttctgtggccaatttcctacactagatagtgaaagctttttgagaggctatgagattcattaattcacaaagcgctctctgccaccgtttcactcactctgctctcttcgactcttctaaagtggattatgggaaaatcacatttactggttagatgagagatctgacaatagaattagttagcacgctgtacattttaagctttgtgtgtaagagagactggcccagcgtgtgtaggaacatcatatggttaagatctcttagtcttatgttgaaattatgcatcaatcgaggagaaagattttaaatgttgagtactgccagaaagaattgggagaaatgtagaggaaggatcacttggagccatttgggagaaatattcagcagatcttcaattcggttcgggcaagcagatttttcttccgtgactaatgaacggcacttggctcccgagtaataaagttaaagcatccgtactttggttcgtaaaaagtgaaaatttctaatttgaatgtttgattttaaaacataagttaaattagattattc

SEQ ID NO: 29339 - DNA, 827 bp, Glycine max
  Clone ID: UC-GMFLMINSOY010B02_FLI
gatgaatgatcctataaaagcatcgtctcttttgaactgtgattctgtgttcttaaactctcttgaaaaaagaaagtatattattgcacatataacattcagatacaattagttttcaatatatgaatctccagttgttaaaatgaatcccaacattcacaccttcatagccataaaggctattcaaatccacagaatggatgacaagactctctcgagcatcaaattcctccttgcttgaaattgtacaatagcagacaggtagagatatcgacatgagtaagtttgatgagcagaattctcagagtgattagtgactgaagcctttgtcaaatgagcttgaaggaaacgttgtatcaagaattggaaaggttgcagaacattctatggttgccaattttttggaggaaatccaaggactcaacataaatgctcattaacaagacaagtgggtgtggttgagtgacccaactgggttatacactgtatgcagcgcatacaaactgcttgacagggactcaagagatgagaatatagatggggtatttcatgacaaatggaagttgaaaattccaagtaaagctgcgttttttgcttggagattattacgggatagatttcccactaaatccaatttgtgtagaagaaatgttgacatcattgataaattatgcccattttgttgagataaggaagaggaggcagcccatctgtttttcagctgccataaaattatgccgctttggtgggaatccttatcttggataagcatggtgggagtgtttccgcagaatccaagacaacactttcttcagcactcattctgc

SEQ ID NO: 29340 - DNA, 1930 bp, Glycine max
  Clone ID: UC-GMFLMINSOY010E11_FLI
tcttcatataatattgcttcttggttcattctagctaattttgatggctcttccaatttgtctcaccgttattgcaattttcaccctttgttgtgtcattaattgtaacaatggcgttgaagcgtttcatgacatatacccggatcttcaatccatttcagcacgttcggtgagcaaacttcagagaactggataccattttcaacctcatccaaatgggcccatgtactacaatggaatctaccatctattttaccaatacaacccaaaaggagcagtttggggcaacatagtgtggggacacgcagtatcaaaggacctcatcaattggaaagaacttgaacctgccctatacccatcaaaaccctttgacaaatacggggtttggtccgggtcagccactgtactcccgggtaaaggacccgtaatcctttatactggagtcattgacaagcaaagcaatgaggtccaattgtatgccatacctgaaaacaaatccgacccatttttaagaaaatgggtcaagcctaaggcctttaacccgattgtggtcgcggatcacagcatgaatgctagtgttttccgcgacccaaccaccgcatggtggagcaaagatggacattggaggatgttgattggtggtagaagaaaagatagaggaatggcctatttatatagaagtaaggattttgtgaagtggatccaagccaagcacccgatccattcggctgcatccacgggcatgtgggagtgcccggatttttatcccgtttctttgaaagggaaaaacgggttagacatatccgtagttgggagtagtagtattaagcatgttctcaagaatagccttgaccttactaggtatgagtactacacaattggaacatacttcaaaaataaggataagtatattccggataacacttcggaagatggttggggtggacttagatatgattatggcaacttttatgcttccaagtcattctttgacccaagcaagaatcgaaggatcttgtgggcttgggcaaacgaatcagattccaaagaagacgatgttaagaaaggatgggcagggattcagtcaattcctagaaccgtgtggcttgattatggtgggaaacagttggtgcaatggccagttgaagaattaaatagtcttagaaagaaagaagttaaaataagtcaccaaaagcttaagaagggacagcatgttgaagttaaagggattactgcagctcaggctgacgtggaagttaccttctcattctcaagcttggacagggcagagccatttgattctaggtgggtgaacgcacaggatctatgttcacaaaagggttcaaaggttcaaggtggggttgggccatttgggcttttgactttggcttcagaaaaattggaggagtttactccagtgttcttcagaatttttaaagctccaaacaagcacgtgattctcatgtgctccgatgcaagaagttcctctttgaagagagaattgtacaagccatcatttgcaggctttgtgaatgtggatttagccaaaaataaaaagctctctctcaagagtttgattgatcactcagtagtggagagttttggagccggaggaagaacaaacatcttgtctagggtttatcctaccctagcaataaagaaaaaagctcatttgtttgtgttcaataacggtactgagcatatcaccgtggaatacctaaaagcatggagcatgaaatctgcacgtcgaaactaaaaaatagtcagctagaaattagtacaaataaatgaatcaagtagaaacaataatacctcttattctcttgttttctacaaaaagaggtctaacttttagccttctgtccatggtgttgtactcacctagcacgataagctactacattgacatatactggttttaattttacgt

SEQ ID NO: 29341 - DNA, 1023 bp, Glycine max
  Clone ID: UC-GMFLMINSOY010H05_FLI
attctatatgagctgaaagagcattcggtgggtctaaactgtgggcgttgggattacattttcagttatgttaaaaccttccagactcacccagatcgtctactaccagacagggtccaggttggcatgactcaacatttcatgaagagttactctgatctcctcatcaggacatgccacaggcgcggtgtgcatgctatgggaggaatggcagcacagattccaatcaaagatgacccagttgcaaatgaggcagcactggaacttgtaaggaaggacaagcttagagaagtgaaggcaggccacgatggaacttgggctgcacatcctggtctcattccatcctgcatggaggttttcaacaacaacatgggcaatgctcccaaccagatagacacagtgaaacgcgatgatgctgcaaacttaactgaacaagacctcttgcagataccaacaggaacccggaccatggaaggtctcagattgaatacaagggtgggcattcagtacttggcagcatggctcagcggaagcggttgcgtgcctctttacaacctcatggaagatgctgccactgctgagattagcagggtgcagaactggcagtggctcaagtatggagtggagctagatggggatgggcttggagagaaagtgaacaaagacctttttcatagagtggttgaagaagagatggctaggattgaaaaggaagtgggaacagagaagttcgagaagggaatgtacaaggaggcttgcaagatcttcactcgccaatgcacgtccctaacacttgatgattttctcactttggatgcctataattacatagtcgtgcatcaccccaaggaaggaaccgtcaaagcttcgaactaattaaggggttcattattgcctaatggttggatcacttggactctgtcttgtgtacttaaagttactgttgtgagaaaatcacaagtgcacggtggttatcgtattcacatgattatgtgtatgactttgtgattatcgttattcaat

SEQ ID NO: 29342 - DNA, 1274 bp, Glycine max
  Clone ID: uC-gmflminsoy011b03_FLI
ggaagcaccagaagaactctcttttgggggctccaaagatcacaccaacattgccaaaggaaaaagaaccaaaagggtaaggccacaatctcctattcccttctccatcaccgccaattcttccaccggaggagaaaaagaagaagattgctacaatgttgatgatgacaacatcataaaaaatgaagatattaacaacaacaacatcaataacatcaacagcactcccaccacttctgcagaattacaagacatcacagatgaagaggaggacatggcgaattgcctcatccttttagcacaaggacaatcccgggaatccccgaaacacgccgaggaagacgccggcatgagctacgccaagcacaacagtaggaaattcttggaagctgctaccttggggtctagcagggcagggtactatgtctatgaatgcaagacatgtaacagaaccttcccttcatttcaagcacttggaggccacagggcaagtcacaagaagcctaaggcattgatggctattggccaaaagaaaaaacagcaacatcttttgtcatcagatgaggaagagtttcaattgaagaccaataagtcaccattttccattcaattgaatacaaatgggaatttgtacagcagcagcagcaacaacaacaacaagtccaaggtgcatgagtgttccatctgtggtgctgaattcacatcaggacaggcattgggaggccacatgagacgccaccgcgctccggtcggaaccacccccaccgccaccatactctccttcaccccgttggctttggaaccagaagaagatcaccccagaaagaaaaggaatgtgttgaatttggatttggatctcaaccttcctgcccctgaagatgatcatagagaatccaagtttgcctttgcatccaagcaacaacaacaacaacatggacagaaacaaccacaacaacatcatcatccagaacaaaaacaacaacagccacaacagcaacaaacaagtcttgtcttccccgtaccagctttggttgattgtcattactaacaaggttttagattggcatttctcaagatgatcaccaaacgaaactggggttaatgtgcaagttagccatacatttgtcgtatgatctgattttttttttcttttttgatctatacatttatcaaaaatttacattacatgatgattcttttgatcctttgtaaacttgatcgagccatggtgattattaagggtgagctcagtttgtttattggagaaaagtttt

SEQ ID NO: 29343 - DNA, 1215 bp, Glycine max
  Clone ID: UC-GMFLMINSOY011G02_FLI
aaaaattggaagagagtgataccaagaggagagttaccatcaaaactggcatcgtttctgttgcattatttgttgggtacttgtggtatgaatacatatacaagctggacaaggtctcatacaacaagctccacccctacacctcttggattccaattacgtgagtgttatccatttattttattccttttgctgttctttatgttttctttgtttccttcctttaagcttgaaagatagcaatcctagactaatatatggaatgcatttatatttttcttttcagctccttctattgattcttttgcctattatttttcagtgtatacatttgcttgagaaatttcagtcagcggcttcggaatttctctttaaccctctttgcgtggcttggcaagattactttggagacatacatttcccagtttcatatttggttaaggtctaacatgccaaacggacagcccaagtggcttctttctcttatcccggagtatcctatgctcaacttcatgctaacaactgctatatacgtctttgtatctcatcgactttttgaattaacaaatacacttaagacagtgttcatacctacaaaagacaatcggaggctgctgcataattttattactggtgttaccctttgcatttctctgtattgcattgcacttattctgcttctgattcctcattcaacggtttgaaattcaagataccaaagagagattacagagacagtaccctttgaatttgctgtgctgaaaggagactaggagatttggattaaaataagggtacatggaaatgtgggatctcttttggagcagtgtttctatagttgtgggaaatagtatcctcgatggcggcatcaaatataaacgttgagtgttggtttgcatcggaggttggcagatgaaaagggggattaaccccgaaggaatttgaaccaattttctataaattcattttgctcacacttaaaaggaggaaaaggtaggatcgtcatacaaatccgtcgtcttggcttcgaagaaattcaagattcatttcattacctctgttcttgttcaattttcgttgtattttttgactttttcttctgtgaaggataaggaaatatatgtatattcatttttacaatcttaccagaaacgccttgtcatacccttgtaacactagttttgtttaatggctataagtgcaagtagtgttact

SEQ ID NO: 29344 - DNA, 821 bp, Glycine max
  Clone ID: UC-GMFLMINSOY012F10_FLI
gtgaagttatggaatggcaccacagggaaatttgttgctgccttccgtggtcatgttgggcctgtttaccagatcagctggtctgcagacagtagacttctattaagtggcagcaaagattcaacacttaaggtttgggatattcggactcgtaagttgaagcaagatcttccaggccattctgatgaagttttttcggtcgattggagtccagatggagagaaggtagcctctggtggtaaggataaagtgttgaagttgtggatgggctaggctaatttttggatgaatattgggaatccaacgaagtgcaatctcaatggagttttgcggatgcatggatttcatggaaatcaatggttggtattatgtggatgcaaggtctttaaattatatagacagcatagaagatatgtttatgacttgtcagaaatattactctcatagcaattgagaatataggcactggaagaagttgctcaaagcgagtctcagaacagtggttgaaatgtttggaggcctatcacatgcttgcaagatgttttcttgtctgctttgaagtctttcttggtcttctcttccattaatagttgtaggtggtattgtttttcagtgacaacaatgactataatgggttgaactgtcatagggttcattggtatgaactcagaaatttttgggcagtttgacacacgatgattttttgttggccttgccactttagtagtagtgtttgaatggagtattttaatttgagatgtaagaaaaataagccgtgtccttttcattttataaaattgtgtttggattgttgaaaactt

SEQ ID NO: 29345 - DNA, 1925 bp, Glycine max
  Clone ID: UC-GMFLMINSOY012G09_FLI
ccttaatttatattatacacgtctctagctagctacataatattctcttcttccacacacacaaaagaaaaaagaaaattgtttagagtgtggagggtaaaaaatgagcaaagttcttcaggcgaagttggaggcaactccaacatgggctgttgcagttgtgtgctttgtgatgcttgctatttcaatcctcattgaacatattcttgaagaacttggaaagtggttaaaaaagaaacacaaaaaggctcttcatgaagcgctggaaaaggttaaaggagagcttatgctgctgggattcatatcgttgctcctagtgatgtttcaagatcacatttctaatatatgcatcccaaaaagcgttgcatccacttggcatccttgtgatcccggtgatgagcgtaaaaaaccagacggatattatgacaaatgcgcagataaaggtaaagaccaagtagcttttatgtctgaatatagtattcaccagctccatatattcgtctttgtgcttgctatttttcacatcctacagtgcatcatgacactgactttgggtagaaccaagatgtctatatggaggaagtgggaagacgaaacaaagagtcttggccatcagttccaccatgatcctgagaggttcaggtttgctagggatacaacgtttggacgaaggcacttgagctcatggagtcgatcaccaggttccttatggatagttagcttcttccgacaattctacgggtcacttaataaagtagactacatggcattgcggcatggattcctcgtggcacatttgactccagcaaatgaggcaaaatttgatttccagaactatatcaagagaacacttgatgaggattttgcagctgtggtgggcataactccaaccatatggttctttgctgtgctaattctgctcacaaatactcatgggtggtattcttatttttggattccatttatcccagtaattataatcttgttggtgggaacaaagctacaaatgatcataacagagatggcactaaagattcaagataggggggaagtggtcaagggtgcacctttggttgagcccggagatgaattgttctggttcaatcgaccccgcctcatcctctttttgattcatcttgttctctttcagaatgcatttcaactagcgttttttgcttggagcacatatgacaatgggttcaaaataaactcttgtttccacaaaactactgcagatattgtcattagacttacaatgggggttctcacacaagttctatgcagttatgtgactttgcctctttatgctctagtcacccagatgggttctaccatgaaagttactattttcaatgaaaatgttgcagtagccctgaagaactggcatcacactgctaaaaagcacatcaaacacaacaaggattctacttcaaatacaccattctcaagcaggccaggaaccccgacacatggcatgtctccagttcacttgcttcacaagcaccctagacacagtgacagtccagtagtttctccaagggcatacaattacgaaaatgaacagtggggtgttgaagggatacattccccaagccaccacgcaagagatcatgatcctgatcatgaaaagaccatgcagatgcagatgcagatgcagcagcagcggccagctccaacagcagaattgcctcctagtggactcaatcctattcgaactcaacatgaaatcaacattgctttatctgaattttcatttgggaggggacaccacactggtagtaatactaataactaaatatgagtattagaaacatttccttgttttgttttgttttttttttttttttttaatctttttagcttcaattcatatcgagcacatctacgttgtaagtaaaagacgggcagtgcttttgaagattttt

SEQ ID NO: 29346 - DNA, 1598 bp, Glycine max
  Clone ID: UC-GMFLMINSOY012G11_FLI
cacccctccccaaaaaaaacaaacaggtatataaattaatcaaatactactgcgtgtgggggtgggaaaatgggccactctgaggaaaacagtgatgttgctgccaggcagaaggcaatcgatgattggcttccggtcactggttcccgaaatgccaaatggtggtcttcagccttccacaatctcacagccatggttggtgcaggtgtcctcagccttccatttgccatgtcaaatatgggctggggccccggtgctaccgtgcttatcttgtcatgggttatcaccctctacaccctatggcaaatggttgagatgcacgaaatggtgccagggaaaagatttgataggtaccatgagttgggccagcatgccttcggagacaagctaggtctctggattgtggttccccaacaagttgttgttgaagttggcacgtgcattgtctatatggttactggtggcaagtcattgaagaaagttcatgataccctttgtcccgattgcaaagatattaagacctcgtattggattgttatcttcgcttctgtgaacatcgttcttgcgcaatgccctaacttgaactccatctctgctatctcttttgttgcagctgccatgtctttgatatactcaaccatcgcttggggtgcttctataaacaaggggattgaagcaaatgtggattatggctccagagccactagctctgctgatgctgtattcaacttcttttctgccttgggtgatgtagcatttgcctacgcaggtcacaatgtggttttggaaattcaagcaaccatgccttcatccgaagatacaccttccaagaaacccatgtggagaggagttattttggcatacataggagttgcattctgctacttacctgttgccttcattggatactatatgtttggaaactcagttgatgataacatcctcatcacactagaacgccccgcttggctcattgccgctgctaacctctttgtctttgtccacgttgttggaggctaccaggtgtttgccatgccagtgtttgatatgatcgaaacctacatggttacgaaattaaatttcccaccttctactgcactccgagtaacaactcgcactatatatgttgcattgacaatgttaattggcatatgtatcccgttctttggctctcttcttggatttcttggaggctttgcgtttgccccgacatcatattttttgccctgtatcatatggcttaagcttaaaaagcccaagaaatttggcttgtcttggacgattaactggatctgcattattcttggggtaatgttgatgatagtatctccaattggtgctctaaggaatatcatattatcggccaaaaactacgagttcttctcataaactattgatgcaatcattgattccccaaccgattttaaagttgatgagtgaaactaaataacaagaaagcacgcagacatgcgttatacattgaatatagataagcttaataggatttgtggaagtgatacacacacaactagccttgtacaaaattatacttcttttgaagtaacaactatcttattcaccgtgtagcttattagcgg

SEQ ID NO: 29347 - DNA, 1009 bp, Glycine max; identical to SEQ ID NO: 29334
  Clone ID: UC-GMFLMINSOY014D08_FLI

SEQ ID NO: 29348 - DNA, 1373 bp, Glycine max
  Clone ID: UC-GMFLMINSOY018E04_FLI
gcatatcaaatgccaagatcaagggggtcagagttgcctcaaaggcagtctccacgaggtgcacatcaacatcggacatcaagttctgactctgatccattgcatcatcggccgattgctgaccgaagtccaaagctaggagatcggcgttcccccagaggtactcaatctgagggattaaatcagaagaagctaggaactcgcattgcagatttggaatctcagcttggtcaagcacaagtagagttgaaagttttaaaggaccagctagcttctgctgaagccgcaaagaaagaagctcaagatgagctagtgaagaaagctgtgcaatcagtagtgccagtggtagagaagctccaagagaaatccacttccaagaatgctccagagactaataaaactgaaagcaaatcccaagatattatacctgatgacaaccaacaagagactgatgtgtttgaagttccaattgagaagttgacaattgaattcagcaaacctgctgatcaatcagaaaaggaaactcaaccatctgaagactctaacgcaccagcaatatcaaagccttctgtggatgaacacgaactaacactaaagaatgacgaaattgcattgttgaaaaccggtttggaagagaaaggaaaggagttagagtccatgactaacgaaaaggagaatctgaagaaccaactgaatgaagcagtttcaaaagtgtctgctgctcaaaccaaggaagaagaaatgaccttgcagttgaaccaactgagagaagagttggaagccagtaaagccaatggagacaagttggatgagaagttgaaatctatggaagcaagaaaggaggggttggagtcagagatgaagaagctaagggtgcaaactgagcaatggagaaaagcagcagatgctgcagcagcagtgcttgctgggggtgtggatatgagtgcaaggattcctgaaaggtgtggctccatggataagcactttggtggcacatttgagacacctgctggtagatacaatggctatgtggggtctcccggtatggctgatgtcttggatgatggttttggaggtggtaagaggaagggttctgggattagaatgtttggtgatttatggaaaaagaagagccaaaagtgatttatggcttatatattcagtgagtgaattagtagtactttaactaaggtcatgttttgatggtagcagaaacttccaaagcagttgcttactgttttgcatctttctggtatctttagtcttttgtggtattattaaggccattaagcgtgtagtgttactgttgcatcatctgtgcaaggtagtgatgtgaactttttgaaagatggattatatatttcacttctcct

SEQ ID NO: 29349 - DNA, 1126 bp, Glycine max
  Clone ID: uC-gmflminsoy018f08_FLI
aggagcaagattaacgaaaggtttcaggttctgagagatctaatacctcaaaatgatcaaaaaagagataaggcatccttcttgttggaggtcattgagtatattcagttcctacaggaaaaattacaaatttatgaacagacttatgaaggatggaatcaggagcccacgaaattaactccatggagaaataatcacggacctgcagaaaatactacagatccttctcaagctactcaaaatgggtctgttgatgagaaaaataacaatgtctctccattgttgcccaaaaatgtacagaacccgatagagtctgacttctcaatgacaactattcagaagggcaacatccctggttcaactacagaagcagttcccctgcccatgcaaatgcgattggacatgtttgatccagttgttagcagtagtatggcaacccaacatctgctggaacctgtatctaatgttaacatgctttcccatacccagcctcaattgtggcttgataaacgaaacaagggcaactatattcttccacataatgatacaatgaaggaacaggaggagctggtgaatgaaagtgggtcagatagcatctcaagtgcctattctcagggaattttagattctctcacacaagcactgcactcttcaggcgtagatatgtcccaaactaatgtctcagtgcaaattgatgttggtagacaagaaaatgctgggctgatcccctctgcatctacttcaaagggtcatgaaaaccaatctgtgagcaatccagcaatagcacgttccggagttgattactgcaatattgattctgaacaaagttcaaagaggctcagacaagaagcaagctagagattcctctcatgttcattttgtcaggagtttctttttttgctgtttgtcttcagatgagagtaagaggaattgggtggatcggttcatttttgccatgctggttagggccagatcaaatgtaaattttcacgattctggttttgggactaagacattctgaaataaaatgttatatatgcttgcttctacttcaattttccattttaatgccttcgagtatgcttgatattttaatgtcatatattcatggttttgacatttattt

SEQ ID NO: 29350 - DNA, 3043 bp, Glycine max
  Clone ID: UC-GMFLMINSOY018F09_FLI
cccgaatcaaagagcaattgattgcttacaattggatcaccactagtctggcattgggcactgaagtgagaatcgtaatcaatgggtgcgagtcgaaaactccagggggagatagatcgcgttctcaagaaggtccaggaaggcgttgaagtcttcgatagcatctggaacaaggtttacgacactgacaatgctaaccagaaggagaaatttgaagcggacctcaagaaggagattaagaagctgcagaggtacagagaccaaattaagacttggattcagtccagtgagatcaaggacaagaaggttagtgcctcatatgagcaggctttggtggatgcacgcaagataattgagcgagaaatggaaagatttaagatatgtgagaaggaaactaagaccaaagcattctccaaagaaggcttgggtcaacagcctaagactgatccaaaagagaaggctaaatcagagacaagggattggttaaacaatgtggttggagagttagaatcccaaattgataactttgaagcggagcttgaagggctttccgttaagaaaggaaagagcaggccacccagattgacacatttagagacatcaattactcggcacaaggctcatataaaaaaatgtgaattcattttgaggctactagataatgatgaattaagtcctgaggaggttaatgatgtcaaagatttcttagatgactatgttgagcgtaatcaggatgattttgatgaatttgatgatgttgacgaactatacagttcattacctttagataaggtggagactctagaagatcttgttacaattccccctggtctttctaaggtggcacctagtcttagcttgaagaatactttgacagtatcagcatcacaatcagcatctgcatcgcaaacatctgagcaagctgatgacacaacgtcccaggatagcaattctgacattgttgccaaaactccaccttgtaaaagtgggggaattagttctgctacctcaactcctgttgaccatgctactcctgtttctgtgaatgtttctggtcataacttgtctagtgcacctgttgcagtcctacctggttcaaattctgtgcggaatgtcttagagaatactaatgttatcaattcatcatctgtaaatcagtctacctctacaaatgaagaagagattaatagcttccctagccggagaccatctccatcgctttctgatgcaacacttttgaagggcagaagcagcctgtcaaatcaagcaacagccagcattcctcttggttctggaaacatggtttctagcaatggtgcccttggatcagtctcttcagcctctgaaatagctaaaaggaacatattgggagctgatgataggcttggaagtagtgggatggtgcagcctcttgtatccccgctaagtaatagattgatcttgcctcaggctgcaaaggctaatgatggaactgttttagttgactctagtactgttaatgaagcagcatctgggagagttttctccccttctggggttcctggcatgcaatggagacctggaagtccctttcagaatcagaatgatgcaggccagcttcgtggaagaactgaaatagcacctgatcaaagggaaaagtttttgcagaagtatcagcaagtgcaacaagggaatagtaccctccttaatatgaatagtaccctccttaatatgccttctctagttgggggaaaccataagcagttttctgcccagcagcaaaatccccttttgcagcagtctggtattggacttggggtccagtccacaagtctcgttggtatttcttctgcttcactacagcagccacccaatcctgtccattccccctctagtcaacagccattgatgccaggtgtttctatagatgcagatgttggcaattctaagattgaagaacagcagcagcatcagaatttccctgatgattcaacaacagaatctactgctagcactgggattggcaagaatctcataaatgaagatgattcaaaatcagcatttgctttagattctcctgcaggagtgtctgcctctcttccagaatctgctcaaacttccagggatatcgatttgtctcctggccaaccattacaacctaatcaacctactggcaaccttggtgtcattggaagaagaaatggtgctgaacatggagccattggtgataattttagtggatcaagtgttagttctggtggagtgcgtgatcaattatataatttgcaaatgcttgaggcagcccacttcaaaattccactacccaaagactcagaacgacccaggacttatactcctaagcatccgacaattacacctcctagttatcctcaagtacaggcacctattgttaataatcctgctttttgggagagagtcggtcttgaaccatttggcactgatactctgttctttgcattttattatcaacagaatacttaccaacaatatttggctgcaaaggagttaaagaagcagtcttggagataccaccgaaagtataacacttggtttcagcggcatgaagagcccaaaattgcaaccgatgaatatgagcagggaacttatgtgtactttgatttccatattgcaaatgatgacatgcaacatggatggtgtcaaagaatcaagactgaattcacttttgagtataattatcttgaagatgatcttcttgtatagaagatgccatctggtattgcaaattatgtttggaattgttgacagagaagttatttattcaatgcacatcgtgactagcaggttattaggctgcctttctttgtcacagcagtgcctctgtatttagtttttttatgctaattgtccttggttgatactttcttgtaggattttgtttgcaaggattaaaatataacatttttccttttaatcttctctgtatttgagctctgatttctcattcagcttgtttagggacaaattcaaggaaaaaaaatatgattaaagtgttgaagataaaataagggaagattgatgaggt

SEQ ID NO: 29351 - DNA, 605 bp, Glycine max
  Clone ID: UC-GMFLMINSOY018G10_FLI
gaacaagctttgaaagctgggttccgacatcttgtctttgaggataactatgacactggaactggtgatcattattcattaaggcagatatgtgatcaatcttatattagaggtggggggcacaattgctttaaagacagtgatgaagctaggatcaggtcaaggaggaagaaattctgggagaaagcagtcgatattgaagaactctgtggtccagatgaagcatggtggggagttagaggctttatgcgggataactttaatcatagtaataagccaatatcttatgctcaacatttccagaatagccgatatattgaatctattcttgatgtttactgggagctccctccagttgctggtccttccctcacccatcaaaccagatatgatcctgctcgtgcacccagtcctattgttgaagatgggcggtatggcttgttccgaaggctaggtttggccaaccttgacaattctgtatttaatggatacactcagatggtttatttacagatatctgaacaataagttagagtttcttagacaagggtatgtagtagaaagaagttttgtacctgtattatgtatgcattgtttcttctgcc

SEQ ID NO: 29352 - DNA, 2103 bp, Glycine max
  Clone ID: UC-GMFLMINSOY019A12_FLI
aaacattatgacggattacggagaggcagggaagacatatatcaaatggtgtgcacaaatggctttggcacaaaatatcggtgtcccttggatcatgtgtcagcaacacgatgctccccaacctatgatcaacacttgcaatgggcactattgtgacagttttcaacccaataaccctaaaagtcccaaaatgttcactgaaaattggattggatggttccaaaaatggggcgagagggtgcctcacagaagtgctgaagattcagctttctcagttgcacgttttttccaaaatggagggatattgaataattattacatgtaccatggaggaactaactttggtcgcacggcaggaggcccgtatatgacaacatcttacgagtatgatgcgccacttgatgagtatggcaatttgaatcaacccaaatggggacatcttaagcaacttcatgcagcaataaaattaggggaaaaaatcatcaccaacgggacaaggacggacaaggattttggcaatgaagtcacattaacaacatatacccacacaaatggggaaaggttttgtttcttgagcaatacaaacgatagcaaggatgcaaatgttgacttgcaacaagatggaaactactttctccctgcttggtctgtgaccattcttgatggttgcaacaaagaagttttcaacactgcaaaggttaatagtcaaacctcgataatggtgaagaagagtgatgatgcttctaataagctcacttgggcatggataccagagaaaaagaaagacaccatgcatggaaagggcaacttcaaggtaaatcaacttcttgagcagaaggagctaactttcgatgtcagtgactacttgtggtacatgactagtgttgatatcaatgacacttccatttggagcaatgcaactcttcgtgtgaacactagggggcatacccttcgtgcttatgttaatggaaggcatgtaggatacaaatttagccaatggggaggcaatttcacatatgagaaatacgtttctttgaagaagggactaaacgtcataactttgcttagtgccactgttgggcttccaaactatggtgcaaagttcgataagattaaaactggtatagcaggtggccctgttcaattaattggaaacaataatgagaccatagatttgtcaaccaacctttggtcttacaagattggtttgaatggcgaaaaaaagcgtctatatgatccgcaaccacgcattggtgtatcatggcgcactaattcaccttatcctattgggagatccttgacttggtataaggctgactttgtagctccttccggaaatgaccctgtggttgtggacttgctaggcttgggtaaaggagaagcttgggtgaatggacaaagcattggtcgttattggacttcttggattactgctaccaatgggtgcagtgacacttgtgactaccgtggaaaatacgtaccggctcaaaaatgcaacaccaattgtggcaatccatcacaaaggtggtaccatgtaccaaggtcattcttgaaaaatgacaagaacacattggttttgttcgaagaaataggtggaaatcctcaaaatgtttcctttcaaaccgtgataactggaactatttgtgcccaagtccaggaaggtgcattgttagagctatcatgccaaggtgggaaaacaatctcacagatccaattttctagctttggaaatccaacaggtaactgtggttcattcaaaaaaggtacatgggaagctactgatggccaatctgtgggggaagctgcatgcgtagggaggaatagttgtggatttatggtgacaaaagaagcatttggtgtagcaattggtccaatgaatgttgacgagcgtgtagcaagattagctgtccaagcaacttgttaagtcagcatttcattcaaatcaaagttaaagagaagaaagttgttaaaggattcaattcagtggcggagcattgatggagcaaagaggggccatgccccccaaacttttctacaatttttataatgtgttgctttaaataatattaatacttttatatatgaattgtttttatataccct

SEQ ID NO: 29353 - DNA, 1036 bp, Glycine max
  Clone ID: UC-GMFLMINSOY019E06_FLI
ttgattccaacaccctcctgcattatactaatgtctttgatgcaattgttgatgctgcttattttgctatgtcatatttgaagtttaccaacatccctattttagtcacagagtcaggatggccctccaaaggcgactcatctgagccggatgcaaccgttgacaatgctaacacttacaatagtaacttgatcaggcatgcccttaacaatagtgggactcccaagcaacctggaattgcagttagcacttatatttatgagctttataatgaagacttgaaatcaggtccagtgtctgagaataattgggggctgttttatgctagtggagctcaagtgtataccttacacttgactaattctggtactgtatttgcaaatgatacaacaaaccaaactttttgtgttgccaagagtaatgccgattcaaagatgcttcaggcagcactcgattgggcttgtggaccggggaaggtggattgttcgcctttgctgcagggtcaatcgtgttacgaaccaaatagtgtagcttcacatgctacatatgctatcaattcatattatcagcagatggctaaatctgcggggacctgtgatttcaaaggagttgcctctatcaccactacaaacccaagtcacggttcctgtatattttcaggaagtggtggtaaaaatgttaccagcgtaaatggcacagcattggctccatcaacaaattccacaaattcagggtgcttgtcccaatattacaatggtggattttttacaagcactgtgattcttactttaattttgagtgtagttgtcttgtaaaactacgcactaacatgttcagcattagaatcctatttaatggtgacacactcttcaactaccatttaagagattgctgcatacccatttttgtgttcctcatttagaggatttgaaggatggcgaggttggtcaaaatgtatattggcaattgtaacgtgagttgtccattggatttttgtacaaacgaaccagaagaatttatttaaaatcgttgatgt

SEQ ID NO: 29354 - DNA, 1692 bp, Glycine max
  Clone ID: UC-GMFLMINSOY019F04_FLI
cttgaagatgagcagctctgtgaacagtttggatggagaatttggtgttgatggaagaagtgttaatggttctaaccgcggcacggtggcagccgttggatttgccatgatgtttggagcctttgtgggtcttggtgctatggtgatcaagtggcacaagaggcctcaggactggcaaaagaggaacagcttctcctcatggttgcttcctctgcacgctggtgacacaagcttcatgagcaagaactcaatgggaaagagcaacttcttctcctcgtcgatgggattaggccggtacttctccttcgcggaacttcaggaagcaaccaagaactttgactccaagaacatcattggtgttggtggatttggcaatgtgtatttgggtgtgattgatgaggggactcaagtggcagtcaagagaggaaaccctcaatcagaacaaggcatcacagagttccaaactgaaatccaaatgctgtctaagctcaggcacaggcacttggtgtccttgattggatactgtgatgagaatgatgagatgatcctggtttatgagtacatgcctaatggccacttcagagaccatctttatggaaagaacttacctgctctctcatggaagcaaagactagatatctgtattggatcagctcgcggtcttcactaccttcacaccggcacagctcaaggcatcattcaccgcgatgtcaagaccaccaacatcttgcttgatgagaatttcacagccaaggtttctgattttggtctttcaaaggatgcaccaatggggcagggtcatgttagcactgctgtgaagggtagctttggttatcttgaccctgagtacttcaggaggcagcaactgactgaaaagtctgatgtgtactcatttggggtggttctgcttgaggcactctgtgcaagaccagccatcaaccctcagttgccccgcgaacaagtaaacttggctgattgggcgatgcaatggaagaggaagggccttcttgacaagatcattgaccctctcctagttggttgcatcaatcctgaatccatgaagaagtttgctgaggctgctgagaagtgtttggcagatcatggtgtggataggccttcaatgggagatgttttgtggaacttggagtatgctttgcagcttcaagaggccttcacacaaggaaaggctgaggatgagactaagtcatcatcagcagtccctactgcagctgttcctacttcacctgccccaccaacacctcccatttcttctgatgaccgcccggctgcgcctgctcgtccggaagtgaataataatacttcatcggatgtgcattctattgatgaccattctggaactgcaatgtttgctcagtttagcaatctcaatggcaggtgaaggcctaatttggtttcatgaatggagcaaccatcacctggacagctacaaatttgatcatgtctaggaagatgttatagtagctttctgaaggcttggaccaaaaatttcctgtgtaatggtgtgatactgtatgctgtttctcttctagatactcttgtctttctgtattgtgttggggtactattttgcatgatagcaaaaagaaaaggtgtcaaaatatgtaatgtgattaagttgttggtttgtaagtatacatgcattcaacagtaccattaatcacatatggtatt

SEQ ID NO: 29355 - DNA, 1144 bp, Glycine max
  Clone ID: uC-gmflminsoy020d04_FLI
ccacgcatccgaaaaaatgactatgtttagcatcgaaaacataaatgcttctggtcttgaggagttgattgtactatcatgtgctgatatataaccaaatgtttggcctaccagataaactgattataatattaaattttgaaagtgaaataatgcgtgacttacactaatattttcataaactgtgcacaaacttttgatgtagacttgaattcttttatgtcaaactcgtatgcaatttcatcattactattatgaaggaaaggttgcacaagtattataatttttgtgttattggttgagctagctaaatgaatctggattttattgtttcttcctaaacagattctttctttattttcctttattagaaggcattcattttgttcagttcaggtactggtacaaattctgccttgtttaatttaaagcctaacaatttgtctttcaggatgctttctaatagggagtcagccagacgctcaagaaggagaaagcaggctcatttaactgagctggagacacaggtctcccaattacgaagtgaaaattcttcgttgttaaagcgattcacggatgtgagccagaaatacaataatgctgcagttgacaacagagtactgaaagctgatgttgaaacattaagaacaaaggtgaagatggctgaagagacagtgaaaagaattactgggttgaacccaatgcttcatgccataactgagatgtcatcaatggcaatgccatcgtttgatgaaagtccttctgagacatcagctgatgctgctattcctgtgcaagaagacccaaatcatcaccgttgtcaacccacttctaataatgggttgggaggcatttcttcaattgaaactgtgcagcagaatgtttcagcagtggtaggtggcaacaaaacggggagaacaacttccctgcatagagtggctagcttggaacatcttcagaagaggattcgtggtggtgcagattcacgtggacctccttctaatggagaacaataacatagtagttaaatttacattatgctttttatgaggaaactattctaaaactcttgtttctgctagttgtaagtaagagcaaattcttattgatgtatgtgaatcttattgagcatattctgctggat

SEQ ID NO: 29356 - DNA, 1362 bp, Glycine max
  Clone ID: UC-GMFLMINSOY020F05_FLI
cccttccttcttcttctctctctctctaaaaccctaattctatacatggaagggaaatctcaaatctaatgactaattaattaatccatcgatcaagcatggagtccgaactcaaagacctcaattcgaagccgccgaacggcaacggcaacagcgttcgcgatgaccgtcctctgctgaagccggagcctccggtctccgccgacagcatcgccgatatggagaagaagttcgccgcttacgtccgccgcgacgtgtacggcaccatgggacgcggcgagttgccgaccaaggagaagctcttgctcggtttcgcgttggtcactcttctccccattcgagtcgttctcgccgtcaccatattgctcttttattacttaatttgtagggtttgcactctcttctctgcgcccactggcgaagaggaacaggaagattacgctcacatcagtgggtggaggagaaccattattgtttcgtgtggacgcgccctctccagactcatgcttttcattttcggcttttattggatccccgaatcgaactctgcctctcaggaagacaagagtcggcagcccgaagagttgaggagacctggcgtaataatttctaatcatgtgtcgtacttggatattttgtatcacatgtcttcctcattccctagttttgttgctaagagatcagtggctaaacttccgctagtcggtctcatcagcaagtgccttggttgtgtctatgttcagcgggaatcaaggtcatcagacttcaagggtgtttcagctgttgtcactgacagaattcgagaagctcatcagaatgagtctgctccattaatgatgttatttccagaaggtacaaccacaaatggagagttcctccttccattcaagactggtggttttttggcaaaggcaccggtacttcctgtgatattacaatatcattaccagagatttagccctgcctgggattccatatctggagtgcgccatgtgatatttctcctgtgtcagtttgtgaattatatggaggtgatccgattacctgtttaccatccttcacagcaggagatggatgatcccaaactatacgctaataatgttagaaggttgatggctactgagggtaatttgatactttctgatattgggctagctgaaaaacgaatatatcacgctgctcttaatggtttgttttcccaatgctaattcatcggattcgtggtctgtatattcattgtatggttccattatttatcaggaaagaaaaagtaaattaatatagaaaattctgtgcagaacaagtattcatacttgaaaatgtatttatctgataattgtctctagagcattaacggatttc

SEQ ID NO: 29357 - DNA, 1185 bp, Glycine max
  Clone ID: UC-GMFLMINSOY021B05_FLI
agatggtgctatgcctccactggtggagctcctcaagatgcaaaatagcggtatacgagaattagctacagctgcaatcttgacactctcagctgccacatccaacaagcccattattgctgcttctggagccggacctctccttgttcaaattctcaaatctggaagtgttcaaggaaaagttgatgctgttacagccctccataatctttctactggcattgagaattccattgaacttcttgatgcaagtgctgttttccctctgctcaacctccttaaagagtgcaagaagtattccaagtttgcagaaaaagccacagcactgcttgaaatcctttccaactccgaagaaggacgaactgcaatctcaattgcagatggtggaatcttaacgctagtagagacagttgaagatggatcacttgtcagcacagaacacgctgttggaactctgctatcattatgtcgaagctgtcgagataaataccgggaactgattcttaaagaaggagcaattccgggtctgttacgtctgacagtggagggcacagctgaagctcaagatagagcacgtgtgcttctggatttgctcagagattctcccccagaaaaaagactaacctcatcagttttggagaaaattgtttatgacattgctgaacgggtagatggagcagataaagctgctgaaactgccaaacggttattgcaagatatggttcaaaggagtatggaacacagcatgaaatgcatccagcatagggctgcatcttgtactcctattccatccacttgatgtgtacctttttttccctcatcaagcaactgcaaaattgagttttaacttgtatatatgtgttcttattttattttttcttctctggggggcaagttagtgtgttaattagatcaccatgcaaagtgagtctacgctgctctacatgactagtgtcatgatttttaccagactaacttgggattgatctgtttacgtcatcactcttgattaactacatttacacctcattactttggccaggatgctgtgctttgcacatacataaatgagtttgtctttgcatgtatttctttttcaccgagtcatgaacgtgaacttgtgaaagattgctaattatatgcactctagatcaatcaatggatgtaacatgggacattactttt

SEQ ID NO: 29358 - DNA, 752 bp, Glycine max
  Clone ID: UC-GMFLMINSOY022A05_FLI
ctcaaactccttcagaatccccctttcccagttcccaacttcatttcaaatcaatatgaagaaaattgtgctaaagttggaaatccatgacgacaaaaccaagaaaaaggccatgagggcagtatctggtatttcaggggtggagacagtctcagtggacatgaatgacctgaaaatgactataattgggaatgttgatgctgtaatagtagttggcaagcttagaaaatgttgtgatcatgctgatatactatcagttggaccagccaaagaggagaagaaagaggaaccaaagaaagatgagaagaagccagaagacaagaaagatccaaaggaggaatatgctgaacttctgaacgccttttataatcagaccagacagcagcaataccccccttattatcacagaacagtggaagaggatccaactagctgtgttatttgctaagtattggaatatcatatggagtttgaaatgatggataataaaatgagatcaagaaaagatggtggctgcatggagttgaagaagaattatgtttcttttggagttccctttttccttcttttctttcttatgttttggtctttcaggctttcctcttgttttagttcataaaagaaaagaaaaaaaaaggagtctaaaactgagatatataatatgtaaattattttgtggtgtagtacaatcaatgtattcaaatttctggcagtgagaaattggttttattaaattcaggtgttcaattctt

SEQ ID NO: 29359 - DNA, 3678 bp, Glycine max
  Clone ID: UC-GMFLMINSOY023E12_FLI
aatgacagtgaggtgattaacatgattgcacattcatctgaatttgagaatattgctgttcgggaagaagaacagaatgagctagagatgttggcacgcacatcatgtccattagaaattaagggtggtccttccaataaacatggaaagatttccattttgattcagttgtacatatctcgaggttctatagattctttttctttagtatctgatgcttcatatataagtgcaagcttggctagaataacacgggctttatttgagatttgcttacgaagaggctggtgtgagatgtctttgttcatgttggaatattgcaaagctgtggatcgccaagtttggccgcatcaacatcctcttagacaatttgacaaggacctttctgcagaaatattgcggaagcttgaagaacgtggggctgacctagaccgcttgtatgagatggaggaaaaagacattggggcattaattcgttatgcgcctggaggaaggttggtcaagcaacacctagggtattttccatcacttcagttatcagcaactgtgagtccaattaccagaactgtgttgaaggttgatctggtcattacgcctgttttcatttggaaagatcgttttcatggtactgctcaacgttggtggattttggtagaggattctgagaatgaccacatctaccactctgaactctttacgctgacaaagcgaatggctaggggtgaaccttacaagctttccttcaccgtaccaatatttgaaccacatccaccacaatattacattcatgctatttctgattcttggcttcatgccgaggcattctacactattacttttcacaatttaccattgccagaggctcgtactgctcacacagaactccttgatttaaaaccgcttcccatgtcttcccttggcaacagtacttatgaagcattatataaattttcacattttaatcctatacaaacacagacttttcatgtcctgtatcacacggacaataatgttctgttaggagctccaactggaagtggaaaaactatatctgctgagcttgccatgcttcgtctttttaatactcagcctgatatgaaggttatttatatagctcctttgaaagctattgtcagggaaagaatgagtgattggcaaaagcgtcttgtctctcagctagggaaaaagatggttgaaatgactggagactatactcctgatttgacggctctcttgtcggccaatatcatcatatctactcctgaaaagtgggatggaataagtcgtaattggcatagccgtagctatgtcacaaaggttggacttatgatattggatgagattcacttattgggggctgatcgtggacccattcttgaggttattgtttctaggatgagatacatatcatcccaaacagaacgtgcagtacggtttgtaggtctttctacagctctggctaatgctggtgatctagctgattggttaggcgttgaggaaattggactcttcaatttcaagccaagtgtgaggcctgtacccctggaagttcatattcagggttatcctggaaaatattactgcccaaggatgaatagcatgaataaaccagcatatgctgcaatatgcacacattcacctgcaaaaccagttcttatatttgtctcatcacgacgccagacaagacttactgcacttgacctaattcagtttgctgcatcagatgaacaatccagacaattccttaatttgccagaagaaaccctacagatggttctgtctcaagtctctgacctaaacctaaggcatactttacaatttggcattggattacatcatgcaggcctgaatgacaaagacagatctctggttgaggaactttttgcaaacaacaaaattcagatattggtttgtaccagcacattggcttggggtgtgaatcttccagctcatctagtgattatcaaggggacagaatactatgatggaaaagcaaagaggtatgttgattttccaatcactgatattttgcaaatgatgggtcgtgctggacggcctcaatttgatcaacatgggaaagctgtgattcttgttcatgaacccaagaagagcttctataaaaagttcttgtatgaacccttcccggttgagagtagtttgagagagcagttgcatgatcacattaatgccgaaattatttctggaaccatttgccataaacaagatgcagtccattatcttacatggacttacttatttcgtagactgatggttaatcctgcttactatggattggaggatgctgaatctgaatttctaaatacatatttgtccagcctagtacagaccacatttgaggatttggaagacagtggatgcataaagatggatgaagacaaggtggagcccatgatgttgggtacaattgcatctcagtattacctcagctacatgactgtatcaatgtttggttcaaacataggtccagatacatcacttgaagtctttttgcatattttatctgctgcttctgaatttgatgaactacctgtgcgtcataatgaggaaaaatacaatgaagcactgtctgagaaagttaaatatccagtggataagaaccgtctagatgaccctcacatcaaagcacttcttctatttcaggctcatttttctcaattggagttaccaattagtgactatgtcacagacttgaaatcagtattagatcagagtatacgcgtaattcaggccatgattgatatttgtgcaaacagtgggtggctttcaagctcaattacttgcatgcatcttctgcaaatggtcatgcagggtttgtggtttgacaaggaatcttccttatggatgctgccatgcatgaatacagatctgataagttcactaagcagaagaggaatttctagtgtacaggaattactagacattccaaaagcagcattgcagactgtaactgcaaatttcccagcttcaagattgtaccaggatcttcagcatttccctcatgttaaaatgaaattaaaagttcagaggaaggacactgatggtgacaggtctcgcatattatctgttagattagagaagaccaattctagacgacactcttctagagcatttgtacctcgatttccaaagataaaagaggaacaatggtggttggttcttggtaatacctctacgtctgagctatatgctttgaaaagagtttctgtttcagatcacttagttacctcaatgaagttgcctctgactccagctaatcttcagggcgtaaaactgattttagtctccgattgttacattggatttgaacaagaacactccattgaagaacttgatgtatgttaagtagtggagacaccattggtcagtgccattgtacatacaacgtaaacgtaagatttcttgaagagggttggggctgcccaggttgtaccaaaaaatgtttttttttaacttgagaaaaagtcaatatgtatatccataggatttgcaatctcttgcatttaattgttttataggtaatcataatgatcttgtttttagattttctttatttattttccaagtcgtgtcgccatttgtaagtataaaggtttacagtgcaaggattgaaagatgtctgaacatttataaattgtgaaggaatggatctccgcaagc

SEQ ID NO: 29360 - DNA, 2060 bp, Glycine max
  Clone ID: UC-GMFLMINSOY024A11_FLI
caataagcggaggaaaaaaacgttgaattggaggtggggaatagcagtaaggacactcttgtgaacgaggaaaggaaggaagtgaagggctcaagttcgggttcggtttcgaacaggaaggacggaccgaggtttaaggatttgggtgggatgaaggaggttttggaggaactgaagatggaagtgatcgtgcctttgttccacccccaattgccaagacagttgggagtgagaccaatggctggcattttgttgcatggaccacctggctgtgggaagactaaacttgctcatgccatagctcatgagactggtcttcctttctatcagatttcagctactgaggtggtttctggagtttcaggtgcatctgaagaaaatattagagagctttttgctaaagcgtacaggtctgcgcctgctattgtctttattgacgagattgatgcaattgcatctaaaagagagaatttgcagcgtgagatggagaaacgtattgtgacgcaattaatgacttgcatggatcaatcaaataggcttcttcaaccagcggatgatgtggagagttctggtgatgatcatcatcctggctatgttcttgtaattggagctactaataggcctgatgctgttgaccctgccctaagaaggcccggccggtttgatcgtgagattatcattggcaatcccgatgaatctgccagggaggagatcctttctgtgctcacttgcgatcttagacttgagggtttatttgatctacggaaaatagccagggctacatcaggattcgttggtgctgatttggcggctctggttgacaaggctggtaatcttgctatgaagagaataattgatgaaaggaaacgtgaattatctcaagatctcacgagtgagcatgctgaagactggtggagggaaccttggtcggttgaagaaataaacaagcttgccatcaaaatgtccgatttcgaggaagcagctaataaggtgcaaccttcattaagaagagaagggttctcttccattcctaatgtaaaatgggacgacgttggagggcttgatcttttaagaaaggagtttgaacgttacattgtaagacgtataaaatatcctgaagattatgaggagcttggggtggatctcgagacgggatttttgctttatggacctcctgggtgtggtaaaacactgattgccaaagctgttgccaatgaggcaggggctacttttattcatattaagggacctgaacttttaaataaatatgttggagaaagtgagcttgcagttcgtacaatgtttagccgtgcaaggacatgtgcgccttgcatacttttttttgatgagattgatgctttgacaaccaaacgtggtaaagaaggtggttgggttgttgaacgactattgaaccagttgcttgttgagttagatggcgctgaacaacgaaaaggtgtttttgtgattggtgctacaaataggcctgaggtgatggatcgtgctgtcctacggcccggaaggtttggtaaacttctttatgttccacttccaagcccagatgaacgagttttgatattgaaagctcttgcaaggaagaaggctgttgatgcctctgtggatttgagtgccatagcaaaaatggaagcttgtgaaaacctaagtggcgcagatcttgctgcattgatgaatgaagcagcaatggctgctcttgaagagagattgacctctattgagacaacttgtgatacattgaccatcaagaggaccatcaagaggcaccattttgaggtagcactgagtaaagtgtctccgtctgtgtcagacaggcaaaagcagtattatcagcatttgtcagagggctttaaagcagcatgagcagcatgacattcactttgttattttagcaggtgtcgacattcctttaaagaatggggtgaaagaaatcatttatatgagcgtcaagtatttagagtatttgcttttgtaatgagatgtacatgtttcctgcagtcaggacataatttttggcaaatggttataatttatggttcactttatcc

SEQ ID NO: 29361 - DNA, 1950 bp, Glycine max
  Clone ID: UC-GMFLMINSOY024B06_FLI
ttcaaaagagtttcttctcctttcttccatcgtgccacggcgaagatgaagatagcgtggcttctgctgctcctcctggtatcagtgtccgttcaagtttgggccctgaaatcgccgtttcacccgcgagacgtacttcctctgcttcccaaacagttgtcgtggcccatcctcaatcgcctccacagcgcggtggatctcctccccgtcttcgtcggcgccgcctcttctccggacgacaatctcaagtggaaaggtgcatgcttctacgagaacaaagcctggatggtgtttcacaacaagagcggcactcaatttggcggtggaacccttcacctaaaggttagcaatgctcacagttggacatgcatggatctttatatttttgccaccccttatcgtgtaacatgggattattatttcctggcccgggagcatacgcttgagatcaaagagtgggaagggaaagctgagtacgagtatgtaaaaaaccatgggttatcaattttcctcttgcaagctgggatgttggggacccttcaagcactttgggaggtcttccctctatttacaaatactggatggggggagaactccaatattaagtttttggagaaacatatgggagcttcttttgaagtgcgccctcagccttgggttacaaatgtcagtgctgatgacattcattctggagatttccttgccgtttcgaaaattcgaggtcggtggggtgcttttgagactctagagaagtgggttagtggagcttatgctggccacactgctgtttgtctaagggactccagtgggaagctttgggttggagagtcaggacatgaaaatgaaaagggagaagatataattgctgtgataccatgggaagagtggtgggactttgaactgaataatgatgattccaatccccatattgctctgcttccattgcaccctgctttgcgtgccaggtttaatgagactgctgcatgggagtatgcactgagcatggcaggaaaaccatatggttaccataacatgatcttcagttggatagacactttaaatgaaaactatccaccccccttggatgctaatgtggttgcttgcgttatgacaatttggagtcaacttcaacctgaatatgcagcaaatatgtggaatgaagccttgaacaaacgacttggaactaaaggacttgacctttcagaagttttagtagaagttgaaaagcgtggatcatcttttgatgaactactgacaattcccgaacaggatgattggatctacagtgatggaaagtcgacttcttgcattgcttttatacttgagatgtacaaggaggcagggctgtttgatccggttgctagttctgttcaagtgacagagtttacgataaaagatgcttacatcctaaatttttttgagaacaattctactcgcttgccaaaatggtgcaatgatggagacacggtgaagcttccttattgtcaaattaaaggcaagtatcgaatggatttacctggatacaacaccatgcaaccatatcctcacatgaatgaaagatgtccatctcttcctccaaagtactccagaccccagaattgctagcagtcttcaatttttttcctccaatcggagggctgattgcgtgtgaccagattttttggtcttctagatttggattgcttaggagattccaaatgaattattgtttgtatccatttaattttaaaaaattattcaaacaattagatattttgcatatatttattcttacaacttatattagacattcatgtaatttggattatctatgtagccagactcaacatactgtaaatataaggaacttgaatatatgtagctcatgcaaaattaacttgaataagtgtcatgtaaaatattttgtaagtcttgcatatttttttctctaaaatgggtttggcaactttg

SEQ ID NO: 29362 - DNA, 883 bp, Glycine max
  Clone ID: UC-GMFLMINSOY024E07_FLI
ctttattatctcagtgggtttcatcactttttggtttctaggttggattgttggggatgggtcgcacacttcaaagggatctgaataggattgcagcagttgctgatacatcaccttcagaaggtctgcattatgtattgacagagacaaccctagctttgcttcggcatcctgattactgtatctcagcgtattcatctgtggacataaagcagggtattgaagatggggagaaacgtttcaatcaactttcaattgaagagcggggcaagtttgatgaagagacactagtcaatgctaataacataaagagacaaagcacaagaagccagagagcgaatgggttcagcaatgaatacatagtgataacaatcttggctgctgccgaaggagaccataaacttccaagcatcaatggaagtggagacttgaagcaagctttacagaaacttggttccattccgtcaagcagattattggcagttgaggtgttatggacaccacagaatgagaacgatactctctcagaacgggagttacttgaagattacccgcttttacggcctttgtaagtggtgatggtatgcttgcgttctgcttctagcctcttctagagctatgaactgaaattgggttgtgattgcacagttaaggatcatctccagtagtacttgaataatatcgttaaaactattgagattgtcctgctactcaattttcagctgcggccaatgtcactaatgacgttttatcacttacaaaggttcaatattaaatattgatggcattagttgtaaattttaccagtaggatcaactctaaagaatatgtacaatattatagacaatcattttatcattgaaaaaggggccctttctgtttt

SEQ ID NO: 29363 - DNA, 1698 bp, Glycine max
  Clone ID: UC-GMFLMINSOY025C08_FLI
gatgacacaggttttgttcaagtgagtgttggtccttctgagctgagcagttccataaggatgaatgccatattgaatggtgcagagataatgaagatggtcaatgatgtcggtactaatgttgtgcataggaggaagaatctgtgggtgttggtgggttcaattgctggaggaattgttgtcttgtttttagttgtaactgcttttctacttggtaccaaatgcaggaacaagaaaccgaaacaaaggacagtagaaagtgttggatggacacctttgagtatgtttggagggagctcccttagtagaagctctgagcctggttctcatggacttcttggcatgaagatcccttttgctgaaatacaatcagcaacaaacaactttgatagaaatctgattatagggtctggtggatttggtatggtctacaagggagaactgagagacaatgtgaaggttgctgtcaagagaggcatgccagggtccagacaaggccttcctgagttccagactgagataacagttctgtccaaaattcgccatcgccacctcgtttcactagttggtttctgtgaagagaattcagaaatgatacttgtctatgagtatgttgaaaagggtccactgaagaagcatttatatggttcatcactacaaacacctctctcttggaagcagcgtcttgaaatatgcattggtgcggctagaggccttcactatcttcacaccggttttgctcaaggaatcatccaccgtgacattaagtcaaccaacatattgcttgatgaaaactatgtggccaaggttgctgactttggtctttcaaggtcagggccatgcatcaatgaaacacatgtgagtactaatgtgaaaggtagctttggttatcttgatcccgagtattaccggaggcagcagcttacagataagtcagatgtttactcatttggggttgtgctttttgaggttctttgtggaagacctgctgttgatccacaacttgcaagagaacaggtgaatttggcagaatgggcacttgaatggctgcaaaagggtatgctggagcaaattgttgaccctcatcttgttggacagattcaacaaagctccttaaagaaattttgtgaaactgcagagaaatgtttggccgaatacggtgttgacaggccagccatgggtgatgtgttgtggaatttggaatatgcacttcagctccaagaaagtgagccacatgccaatagcagtgctagggaatctgtgagtgtgacaaatgctgttattcctggaaatccttctaccaacagaaggacagagagggattattataactgttcttcagatgtaagtactagccaagtgttttcccagttaatgaacaatgaaggcagatagagataggtgtataccgcaaatataagcaagaggtattaaagcagtaccaaagctttcatgctttttttttcctatcaagttttcttttgaagaaaattgcatgaaaaccataactcgcaagatttacctacggaaggctccttatagtactagttcattggtagcttcttacaaatgtttgaatatcttcttgtctgatattggagaggcttacaatttttgtagtataatttattcatttattttatacagcaattctgtacttattattctagagctaaatcagtcaaatttgtcatgagc

SEQ ID NO: 29364 - DNA, 1900 bp, Glycine max
  Clone ID: UC-GMFLMINSOY025D04_FLI
gcgagtacacctacctaacgttcaactcttgcaagtgaagtgagaaaattgaataattgattcgtttagggatggagggattaggaggactgggccacctttttgtgacaatgtttgtgtcggggtttggtggtgtcatagttcttccggcaatcaccgacgttaccatggcagcactttgccctggtcaagatcagtgttcccttgccatttacctctctggcttccaacaagctatggctggagtggggtcagtggtgatgacaccattaataggaaacttgtccgaccgatatggcagaaaagcgttgctcacacttcctctcactgtgtctgtcattcctcaagtgatattggcatatagcagggatacccaattcttctacgcgtactatgtggtgaaaactctggctgccatggcaggcgaagggtccttccactgcctggctcttgcatacgtggcagacaaggttccagatgggaaacgaacatcagcatttggaatacttgctggtgttggatcagcatcattcgttggtggaacattagctgctcgtttcctatccactgctttaacatttcaggttgcttcagtcttgtcaatggttgcattggtgtacatgagaattttccttaaggatagtgtgcctggtggtgccttgagacagccattattgaaagaggtcgaggaaccttgtgatgaggatgattcatcaccaagggcaacaggaacatttaagaaacttccatcgctgggggatttgatttgtttgctcaggtgtagtcccacattctcccaagcagccatggtttcgttcttcaatagtcttgcagatggtggcttgatggctgtattgctgtattatttgaaggcacgttttcaattcaacaagaaccagtttgctgatttgttgatgattactgggattggagccactcttgcacaactatttttcatgcccattttagtgcctgtgataggagaggagaagctgctctccacagggctcttaattagctgcataaatgtctttgtctacagcatagcatggacagcatgggttccttatgctctagcaggttgctctgtgtttgcagtttttgtgcgcccaagtttatgcagcattgcatcaaaacaagttggacctactgaacagggaatggttcaaggatgtctttcagcaattagttccttcgccaacatcattgctccattaattttcagtccactgacagccttgttcctgtcagaagaagcaccgttttattttcctggcttcagtctaatgtgccttgggctagcactgatggtagcattttttcagagtctaataattcgtgctgttcctcctattgcgggtggcaaaattagcagtaaccgctgcacggataccttggtctgaggagactagagtgttccaggcaataaacataatctctttaagtttcattttgccttggcgaaattgtggttcattgcatatcagacaataaattaaaaagatagcaaaaggaatcgcactgtaagtgtagattctagggtcgacatatatgctttggcacttggagatatagagcaccaaatagcaaaacacagaaaatagaacgtgaagttggttctgaaaaataataatcaggtgaaccaactgcagaagcacagatttctttgcaattatgaattggaaatgtggcatatgtttatgaatcattgggtctcacctgttacatattagccattcaaacattgcaacattaaccaatgtatgtaaatacacccattgggtagctatgctgcttacatttctagctagtatatttttcccaagtttctttgggtagtcattggtcaaggactttgtgatttttatattttatgtaatggatggttgagttttgaagt

SEQ ID NO: 29365 - DNA, 668 bp, Glycine max
  Clone ID: UC-GMFLMINSOY025E05_FLI
taatggaagccgtattaaactacaataccatagcttccagcagaccaaccagtgttaacaagccatccagtagcaccatgcttctgcatcttttcagcaagcattgctgcatactttgtagggtgtagcataatgaatgctgcaccaaaacaagctgaaaaagttgcctgaggctccttaatactggttggtctgctggaagctatggtaatggaagccgtattaaactacaatacacaaggaaaatcattgatgctattcactccggaagtctcctgaatgcagagtacaagaagactgaaatttttgggcttgagattcccaccgaagtggagggtgtcccttcagaaattctggatcctatgaacacttggtcaaacaaaaaggcctacaaggagacactattgaagttggctggattgttcaagaacaattttgaaaccttcaccaactacaagattggcaagggaaacaacaacctgacagaagagattctcgcagctggtccaatcttttgagacaatgttatgcaacatgttgtgtggttgggaatgttagggtggtagataaaatctttccttagaataaaatattgtaccattggtttggttgggctcaaaatgtcatttctagtcttcctccaaaaatgaagtttattttctagtctt

SEQ ID NO: 29366 - DNA, 1190 bp, Glycine max
  Clone ID: UC-GMFLMINSOY026A05_FLI
ctctcacttcctatctaatttttttcgttccgtcgtttcatcctcgcgagcgtgcatttgcattgcattgctctctctctctcacaaaacgacgacgacgtcgccaccgcgcaccgttttggttttcctttctcttccgtcgtttgcttccgcaaatagcctttcgcatgggaaacgctaacggcagagaagacggatccattccccccgccgccgccgatccctccgccgccgcacgtggaactcacgcgccgccggtctctctccctccggttcgcgccttctcctccgattcaatggccaatagcccgccgcacagccctcgccgctccagatcgccgatcctcttcggtcctcaggttcctctagctccattacaacgaggtaatggccctccttttctcaatcaaatgtggcagaatgagtctcatggtattgttaatcacccttctgagcaagggatccctgtcatgattacatggaactatggtggtaacaatgtggctgtggagggatcttgggataactggacatctaggaaggcattacagcgagctggcaaggatcactcattccttatagtccttccaccaggtatatatcattacaggttcattgctgatggtgaagagagatttatcccagagctacctaatgtagctgatgagatggggcatgtctgcaatcttcttgatgttaatgattatgtgccagaaaaccccgatggtgtgtctgagtttgaagcaccaccctcccccgaatccagttatggccaagcatttccagctgaagaagactttgcaaaagagccaatggctgttccttcgcaactgcatcttactgtcctaggtatggaaaactctgacataggttcctcttcaaagccccaacatgttgtgctaaatcatgtcttcatagagaaaaatttggcctcaaagtctgttgttgccctgggactcactcacaggttccagtccaaatatgtgacagttgtcctttacaaaccgctcaagaggtgaaatatataacgcttgtcaattatataaacctttttttcttttttttggtagcctcagtctgtaaagatgaaaatttaaataatactcctcaacgggtggtatatgaaggtcttgtgtctatatatgcttgaggcttctgttcgaattggtaaattaaactttttgtttttc

SEQ ID NO: 29367 - DNA, 796 bp, Glycine max
  Clone ID: UC-GMFLMINSOY026G11_FLI
caaaattcaattttgagcactaaccagcaccacttccaatggcttcaaatcatgaagaagtgatacttttgggcaagtgggccagcccatttagcaacagagtagaccttgctctcaagctcaagggagttccctacaaatactccgaggaagatcttgctaacaagagtgctgatcttctcaggtacaaccccgtgcacaagaaggttccggttttggtccacaatgggaacccattacccgagtcacttatcattgttgaatacatcgatgagacatggaaaaataatcccctcttgcctcgagacccttatgagagagccctggctcgtttctggtctaagaccttagatgacaagatcttgcctgctatatggaatgcttgctggagtgatgagaatggacgtgagaaagcagtggaggaagccttggaagcattgaaaatcctgcaggaagcactgaaagacaagaaattttttggaggagagagcataggattggtagacattgctgccaatttcattgggtattgggttgccatattgcaagagattgcagggttggagttgctcaccattgagaaatttcccaagttatataaatggagtcaagagtttatcaatcaccctgtgatcaaggagggcctgcctcctagagatgaattgtttgctttcttccaagcttctgctaaaaagtagagtcgttttagaggtaggattcctaataagttagcatgattttgttgggaaataatgataatcttgttgtgagtaaaagattgttctgttttaaattt

SEQ ID NO: 29368 - DNA, 2304 bp, Glycine max
  Clone ID: UC-GMFLMINSOY027B07_FLI
actaacaaggatccaaacacaaacacaaagcacgttcttttgtctttgtcttcatcttcggtgaatgatcactgatcactcatcatcatcatcatcatgggggtgttacaggagaagctctcttccttctacaagagccggtggctagtgttcgtggccgcaatgtggctgcagtcgtgggcgggcatcgggtacttgttcgggagcatctctcctgtcataaaaagctcccttggctacaaccagaagcagctcgccatgcttggcgtcgccaaggaccttggtgacgccgtcgggttcatgaccgggcttctttgtgagatcttgcccatctggggcgcgcttcttgtgggtgctgctttgaaccttgtgggatatggctgggtctggcttgttgtcacttctcaagtccctgtcttgcctctctgggctatgtgtgctcttatctttgtgggaacaaatggtgaaacctacttcaatacagtttctctggtgtcttgtgtacaaaatttccccaaaagccggggtcctgtggtgggaattctaaagggctttgctgggttgagtggtgcaatcttgactcagatatatgcactgttccatgcccctaatcaagcatcactaatatttatggttgctgttggtccatcattggtaggaataggtcttatgttcattgttaggcctgttgggggtcacaaacaagttaggccatcagatggcaaatgcttcacattgatctatggtgtgtgccttctattggctgcatatttgttgggagtcatggttgtccaagatttggttgaagtgagtgaaactgtaatctctatattcactggggttctcttgttgatcctccttgtcccaatcgttattcctattacattgagttttggcccggagcaaaggcatccagaggtagaagcacttcttccaccaccacagaataaagaagcagggaaatctcagctggattctgatgaagtgatactgagtgagttggaagatgagaagcctaaggaagttgacatgctccctgcatcagagaggcagaaacgtatcgcgcacttgcaacaaagactgctccaagcagctgcagaaggagcagtgagggttaagaggagaagaggaccacacagaggggaagatttcaccttgacacaagcattgatcaaagcagacttttggcttcttttcatttccatgatcatgggttctggatccgggttgactgtaatcgacaatctgggtcagatgagccagtctctaggatatgacaatgcacatatatttgtctccatgatcagtatttggaactttcttggccgtgtcggaggaggttacatatctgagcttgttgtgagggatcatgcatatccaaggccagttgcattggctgtatttcaactcattatgactcttgggcatgttttccttggtatgggatggccagggtcaatgtatgttggcactttactagttggacttggttatggagctcattgggcaattgttccagctacagcctctgagttgtttggtttgagaaactttggtgctttgtacaatttcattactatagcaaaccctgcaggaacactggttttctctagtctcattgccagcaccatctatgatgctgaagcagagaaacaacatcgccaaaatatgatgttgcgtgtgctgaatgctagtgagcctctaaagtgcgaaggttccgtatgtttcttcctaacttccatgatcatggcaggattatgcgtggttggagcaggcctatgcatggttcttgtgttaagaacaaggattgtttatgccaacctatatggaaaagcttcttctagtagacttcgattatgagagtttggactatgtattttggtgtctgtatacttgagaaatcagtgttgctgattttaattcaagaatgattgaagaagctgagccaagcatctgatctgaatctgtctccagtgtggaaagccaaagaagggataattttactcaaaacaaaagaagaaaaaaaaagtgtgttttgtcaaatctgtattcttttccatttttgttgtgttatattctttccttttgcaagtaaaagtttgattggcattgaaatttgacactaataggtttctacccttattctatcagaaaacttgcaaaatattccacttgttttgttactaagaaaacaaaaaaagttgttctcattagtggtagattatgtacttttattttattaaaaattttgaccggatattccacaagtatcaatgaaagactatgattaggtagagtcttttt

SEQ ID NO: 29369 - DNA, 1260 bp, Glycine max
  Clone ID: uC-gmflminsoy027c02_FLI
gtccaaatagagattattacctaattggtacttgaatttgaatgccttaaaatgacactctaactctctctacatcggcacttgtcgagtttgcataagcatggcttattttctccaataaacaaagtttcaatatcaaaaaaagtaaacaaaacagattcaacaagtgtcaactggagcaatggttaactgaaactgaccatatgataatcacatatggcaaatgtataatatgtcaatcatggacaacgttttttgggtcagaagatactctccaataaacaggactccaagctgatgcatgcttttgttttcatcgaccagaagatattctaattaattgtccaagacaaagcactacaaaaaccaacaaacattaaaagcgtgcagggtggggactgttatagtaaaatagaaagacaagattgaaagctttccaagttgtctgcattcgttggactaacaccagtggagagatgctatgatatgttatgccaatcaagtagtagcagccatttctgatttccactcacaaatgtttatttagtaagaaaagaatcaaaaagagagaaccaaaatctggtaattaagatcttctcttcagaagatgtgtaacaccctcaagttcaacccctttaagaaccgtttgctaataatgttcatgctggttctttctctccccttcaatgttcaatcccaagccaaagatagtgaagaacagaacctggcagaactccctcaaacggttcatccaagcaagggaatagtaatagcagttctctccacaatgtttgccataacattactcttacttctctatgttaaattctgccgaactatccctcatgaactccttaggcaaaactcaaatctccaaaactttcagggcctaactcgatcaaggtctagagtttctgggattgacaaacaagtagttgaaacacttcctttcttcaagttctcttccctcaagggttccaaagaaggcctagaatgcaccgtttgtctctccaaattcgaggacacagagactctaagacttcttccaaagtgcaagcacgctttccacatgaattgcattgacaagtggtttgaaagccactctacgtgccctctttgtagacgcagggttgaagcaggggacattaaaaacctcaacttttcattaagctcgcggttcctccgagttccttcaaatctcacggaggatccaaaccttgaaatctttgttcacagagagccatctcatggagggtcagc

SEQ ID NO: 29370 - DNA, 2658 bp, Glycine max
  Clone ID: uC-gmflminsoy027c07_FLI
ggcagtgatgtcagttttgaagtgaatggagaaattttcgctgctcataaattggttctagcagctcgttcacctgttttcagggcccaacttttcggtccaatgaaagatcagaatacccattgtataaaagttgaagacatggaggctccagttttcaaggtttgaatgagtgctctttgtgctttatgtttttgatttatgcttgtgatgcggttggaaaatgttttggttaccctttctgttcataccctgatatacacagtcctttatgattttggaagacactttccttgcttttccccttattatcattgttaagcacattgttgcaactgagctatatgctgatgtggaaagttatacctcttttgttttgccaactttattctctcctcttcccttcatttatgccaccaaaaagaattgatgcatacattggtacttttttagatggtatttcattgcactgggaagttagatttgacagaaatcatataacctttttgaaagaacacagaaaagttggaaaaaagaactgagactagttctttataaattgactgcagctaggagttccattctggttggttggttccttagttgcttggtttctctttggcatgttgttccagctggttgtgtataaaattagtactgtaaagaactgatactatatgatattgtaatgttgttttttgcacacagaatggtagattcgcatggctgattggttttgttcaatgctttctataatttatgctttgaattgggaacttattcttgcaagtctatttttattgtaccggttccatttttctaggtgctaaaatgttgggtgatagcttagcattataccaaaagaatgtgcaactttgtctgctttgttatatcatatttctctattttgcaggcattgcttcatgttatatattgggactcactacctgacatgcaagagcttactgggttgagctcaaaatgggctactaccttgatggctcagcatctgctagcagcagctgatcggtatggcttggagagacttaggcttatgtgtgaagcaagtctctgtgatgatgttgcaataaacacggtcgctacgactctagctttggcagaacagcaccattgtttccaactgaaagcagtctgtctaaaatttgttgcaaggcctgaaaatctcagaggtgtgttttattgtttgaactttattttcatgaacatgcattaaacaaaatgtgcaatattaggagataattgggatgttgaaaggtcttacactctgtttggtaaaaaggaatgggtgagaaatagagagaatgaagaggaaataggcgaagaaatgggggatttctcttgtttggtagggtagtaatgggagaagactgaaataagaaggtgtgagaagactgaaataaaaaggtgtgaggctcacacctttttatctcctcactgaattgtgcggtgtgtggaaatgcaaggggggggagacgcatgtcacgcaaattgttttgtttccttggcggtttgaatttctagcattttttttcctggctgtttgaaacccccacaaattgagcattaactggcagtcttatatgtcacgcagtcagggtttaaaactgctagaaacgtataaaaatcaatttaaaaaatgcataattgatcttcactaatcatggtagaatatgaataaaaaaacgatcaacaaagaaatttttattattttttcaatttctttattccttatttcttctctatttctcctaaaacaagcacccctaaatccattctatttctcatctatttttgtcttccctagttctcaactatttttttccttcttaccaaacacactcttaaagttagtatctaattatcattgaatgttaaattcattgccgacacaaaggtttgttgtttcggtttggttcattttgaatgcaatatcttctgtggttcaggttggctttttttttaagaaaaaaaaatccatttttatatgactttcaatattgtttttaatatgtcgacctacaaaatatagcaaaatttaataaccaattgagtcatgataaacccttgaaaatgacatttacataaccaaaaagtaatggagtagtaaaagacaacattacaaacttcttatttaaaaaagtgtattatagataattcatagtcatacttttgatgtcctaaactcgggctgaagtattatgttccctttgtttctacagctgtgatgcaaactgatggttttgagtacttgaaggaaagttgcccgtctgttttgactgaacttttggagtatgtggctagatttactgagcattcggacttcttgtgcaagcataggaatgaagtgatacttgatggcagtgacgtaaatggaaggcgggtgaagcaaagactatagtgcgaacactgacaagtttctctgtacaaccctctgctccttgttgcatttaaaaatttctgtgagagccatagatagagggagatgctaagcatttataggattagtggcaatttctaattttcttagcttacttcatgtctaggagatgtaaatgtagtttgttttgatgctgttgcaggtctgtctgtgataactttgctcgtaaaacatttgtcttaaaaaagaaagtattgatc

SEQ ID NO: 29371 - DNA, 1737 bp, Glycine max
  Clone ID: UC-GMFLMINSOY027C10_FLI
ctgataggacattcacttctggttccgtggatttgccggcttccaaaacggactctggtcgagtgaatcggaggcggggaggcggctcatcctcggtatatagccgtcctagtttatcagaaatgaagaaggagaaggcagcaataagggaaaaggtttatgagttcttgagggcaattggcattgttcctgatgagcttgatggtcttgaactccctgtgactgttgatgttatgagggagcgcgttgattttcttcatagtttggggcttacgattgaagacatcaacaactatccgcttgttcttggctgcagtgtcaagaagaacatgattcctgtgcttgattaccttggaaaattgggagtgaggaaatcctcgatcactcaattcttgcagagatacccacaagtgctccatgctagtgtggttgtggatcttatgccggtggtcaattatcttaaggggatggatatcaagttcgatgatgttcctcgtgttcttgagaggtaccctgaagttctcggattcaaacttgagggaactatgagcacatccgttgcttatttgattggaattggagtaggaagaagagaaattggaggtgtcttaactagatacccagagattttggggatgcgagttggtagagtcatcaagccttttgtggaatatctggaaagcttgggaattccaaggttagctattgctagactgatagagcaacggccttatattcttggatttgggctgggtgagaaggtgaagccaaatgttaaataccttgaagagtataatgttaggcgaacatcacttccgtctataattgctcaatatcctgacatcattggaactgacctaaatcaaaagcttgaaaaacagagaagtttactcaattctgtacttgatttggatccagaggactttggccgagttgttgagaagatgccacaggtagttaacctcagcagtggacctatgctgaaacatgttgattttcttaagaattgtgggttttccttgccacaaatgaggcagatggttgttggatgccctcaattacttgctttaaacattgacattatgaaacttagctttgattacttccaaatggttatgaaaaggcctttggaagacttagttactttccctgcattcttcacttacggtttggagtcaactataaaacctaggcataagatggttgtcaagaaagggttgaagtgttctctgtcatggatgcttaattgttctaatgagaaatttgagcaacgaatggactatgacactattgacatggaagagatggaaatggaaccatcatttgacatgaattcactgacgcaaccaagaagtgatgaatcagattttgattatgaagacagcgatgaagatgacgagtagaatgattaagttactccaataactagtttatctgggaaaattttgatattctgttggatgatctttatgctgatatttacaatgatgtaccattggaaaggtaatttattatgcgagtacacgtgaagtatttttaagtgtttgtatactaattcttatgtttgtttatgtgatatgatattgagttcttgtattccaattacctcctacttatttctatttcacaattgtacaacagagctactgatctcctcatctattacaatgtttgtagtacaaaagttctgtggaattgtgaacgagacattagttgactcaatggataagctttgac

SEQ ID NO: 29372 - DNA, 2143 bp, Glycine max
  Clone ID: UC-GMFLMINSOY027E07_FLI
caacgacaacaacaacaacaacaacttctcttcttccctctcagactctctctctccttaccactgtttcatgcaaaaccatttctagggttttcggttttctcgccattcttcaattctcgcactccgacaccgcttcgccatggcatttccgaacaagaagctcatcgacgaccccaatgatgttgtgactgaattcattgaaggtcttgtggagacatattccggactacagtatttagatggctttcctctggtgaaggttgtcttacgtgcagatgtttcagctgcaacatatgataaagttgcaatcgtaccagggggaggaagtggccatgagcctgcccatgctggatttgtcggagaaggaatgcttacagcagcaatatgtggagatatattttcttctccacctgttgactcaattctagctgggatacgagctgtaactggtcctaagggatgtcttttgattgtaaagaactatactggtgatcgtttgaactttggcttggctgctgagatagcaaaatctgaaggttataaagttgagactgttattgttggggatgattgtgcactacctccacctcgagggattgcgggaagaagaggtttggcagggactattctggttcacaaggttgcaggagctgctgctgctggtggtctttctcttgctgatgttgctgctgaagcaaaacatgcatctgaaatagtgggaacaatgggtgttgctttgactgtgtgctcaattcctggtcaagttgcatcagatcgtttggggccaggaaagatggaacttggtcttggaattcatggagaacctggggcagctgtggctgatattcagcccgtaaatgtggtggtttctcatgttctacagcaaatattgtccacggaaacaaactatgtaccgataactcgaggagaaagagtggtccttatggtcaatgggttaggtgccactcctacaatggaactaatgattatagctggaaaaacagttccaaaattacagctagaacatggattggctgttgatagagtttatacagggtcatttatgacttctcttgatatggcaggtttctcaatttctattatgaaggctgatccagttattcttcaacgattagatgctccaactaaagctccttattggcctgttgctgctgatggtaatcacccgcctgctaagattcctgttccaattccagcatctcgatcagcaaagactgatgagccacgaagtcagccattacaactaaatgagcaaggccaaattcttgaggtagccattgaagctgctgcaaatgcaattataaatctgaaggacaatttaaatgaatgggatggtaaagttggtgatggtgactgtggatcaactatgtatagaggtgcaaaagcaattcttgaggacatcaaaaattaccctctaaatgatgctgcagaaactgtcggtgaaattggttcatcaattggaagatccatgggaggaacaagtgggatcatatatactatattttttaaggcagcacattcggtgctaaaagcaagttcccattctggtgtcacttcaaaacaatgggctgaagcactcgcagtttccattgctgctgtaagtaaatatgggggggctagtgctggatatagaacattgttagatgcccttatcccagcatcgttggttcttgaagagaaattaaattctggagttgatccttgcatcgcatttgttctctcctctgaagctgcattggctggagctcagtcaacggtagacatgcaagcacaggctggacgttcgacttacttttctggagagattctttcaacagttcctgatcctggtgctatggctgccgctacatggtacagagccgcggccttagctgtgaaggccaaataccagagctaagctatatacttgaaatgtcctgtttgtgcggatatacccaagttttgttccaaattttgtactctcctgtaaccatttaaggctctccgcttatgtctttcatgcataaagctgagagagcaattcccagtcactttcatatacgccaaaaatttaaaagtggatgtaaatttgaaactttattactacaatcgacaataatgtcagtctcaatttgagctc

SEQ ID NO: 29373 - DNA, 1090 bp, Glycine max
  Clone ID: UC-GMFLMINSOY028B10_FLI
atgagcttgatggcacttctcgttgttgtagttgcgaaagaatggagccaagggatacaaaatatcttttgcttgatgatggtcgaaagctatgtttagagtgtctagactcatcaattatggatactcatgaatgccaacctctttaccttgaaatacaagaattttatgaaggtttaaatatgaaattggagcaacaaattcctatgctcttggttgagagacaagcgctgaatgaggctatggagggagaaaagaatggtcatcaccacttacccgaaactagaggactatgcttgtcagaagagcaaactgtcaccactatttcaaggaggccaaggattgcagcaggctaccgagccatagacatgataactgaaccttataggctgatccgttgttgtgaagtgacagccattcttgttttgtatggccttcctaggttgttaacaggatcaatcctagctcatgagatgatgcatgcatggcttaggcttaaaggttatcctaacctcagtccagaagttgaagaaggaatctgccaagttttggctcatatgtggttagaatcagagctctattctggatttgggaatgatggtgcatcatcctcaacatcatctttgtcttcgtcatcaccttcctcctcttctgtctcaacaaagaagggtaaacggtccgactttgagaagaaacttggtgatttttttaaacaccagattgagtcagatacctcctcagcttatggagatggattcagattgggtaaccaagcaatggtcaagtatgggcttaaaaggacccttgaccatatccatatgacaggaagttttccatattaaaaattgaaaatttgaaagatatgattctctgacctatacaatggccattaccacagcttggttaataaattatatagttcaaagtttccaagatcatatagtttaacattagagaaaataaggaataaaattgctcctcttacgttgcggtcccttaatttcgtgtcaaatgtggcaccgcatgccttatatgtataattaaatactactcaggaactgaagcaatgaaagtatagaattaattttgt

SEQ ID NO: 29374 - DNA, 729 bp, Glycine max
  Clone ID: UC-GMFLMINSOY028C01_FLI
gataattcctctctgcaaggagcttggcattggaattgtaccatatagccctcttggtcgaggcttttttggtggcaaaggagttctggaaactgtgtcaacagttagctccctgattacacatccacgcttccgagctgagaacttggacaagaacaaaaaattgtatggcaaaatagaaagccttgctaccaaacaacagtgcactccttcccagttggcactagcatgggtgctccaccaaggcaatgatgttgtgcctattcccggaactactaaggtgaagaacctagatcaaaacatcggtgcagtatcattgaaattaacagaaagtgacctgagagaaatttctgaggcagttcccattgatgaagtagccggtactcgacactactatggatcggctaatttttcatggaccgttgctaatacacctccaaaagatccgagggtttaaacttgaagcactcgaaatcattttcaatcggacaatgcactaagttatgaattaggctagttgctgtttttctcattgtatgcaaaatcctatatatgggtattagtagttcaatttgcgagttaaatttaataaaatccaagtcaattatggcctcttggtgattgactgatggatatttggttggttcagttttgttgtttgcagtacgagtttgcgatgtgtaacaaaaaccatgaataatgttatatagacgtgagggtttgctcctt

SEQ ID NO: 29375 - DNA, 1796 bp, Glycine max
  Clone ID: UC-GMFLMINSOY028C03_FLI
gttgacagcgaaaccaaccaaccaaccaacaaagaaagaaggattaagcatatattcatcagaaagattaagcataatcatcagaaaaatggcatgcaatggattctgcctcagactcattgctttagttcttgtgattagcatatcaagtgttaattgcatagaaactgatgcagttgaacccattattgatattgcttcgctgaatcgagatagtttcccaccagacttcatctttggggctgggtcgtcatcataccagtttgaaggtgcagcaaatgagggtggtaggggactaagtatatgggataccttcacccataaatatccagaaaagatacaggacaaaagcaatggagatgttgccattgatgcttatcatcgttacaaggaagatgttaagattgtgaaggatatgaacttggattcatatagattctcgatttcttggtccagaatactaccaaaaggaaaactaagtagaggtataaatcaagaaggaatagactattacaacaatctcatcaacgaactagtggctaatggtatacaaccattggtaacgctttttcattgggatcttcctcaatctttagaagatgaatatggtggcttcttaagtcctcgcatagttaaagattttcgagattacgcggaactttgcttcaaggaatttggagatagagttaagtattgggttactttaaacgagccatggagttatagtcagcatggttatgcaaatgggggaatggcaccgggtcgttgttctgcttgggtaaatccaaattgcactgggggtgattctggtacggagccttatttagttacgcactaccagttacttgctcatgcagctgctgttcgtgtatacaagaccaagtatcaggtatcacaaaagggtttgataggcattaccttagtagctaattggtacctaccattctcgaataccaaagctgatcaaaaggcgactgaaagagcaattgacttcatgtttggatggtttatggatccactaacatctggagactatccaaaaatcatgcgatctcttgtgagaacacgattgccaaagtttactacagagcaatctaaactacttattggctcatttgattttattggcctaaattactattcttcaacctatgcctctgatgcacctcatctaagtaatgctagacctaactatgtaacagattctttggtcacccctgaatttgagcgtgatgggaaacccataggtataaagattgcttctgattggttgtatgtttgtccaagaggaattcttgatcttctattatatacgaaggaaaagtataataatcctttgatttacattactgaaaatggtataaatgaatttagagacgaaacactatcattagaggaatctcttttagatacatttagaattgattatcattatcgtcatcttttttatcttcgatcagcaattaggcatggtgtgaatgtgaagggatattacatatggtctttattcgacaattttgagtggtcttccggttatacggtgcgatttggaatgattttggtggattacaaaaataatttgaaaagatatcataaactctctgcaatatggatcaagaattttttgaagaaaactagcctttatgattctagcatatgatattgtcaattatgagattcatcatccattagatagttatatttgtaaataataatttgtgtatatttttttatttattccaataaggtctcagtggaccagaatgaaaattaaaaatgaagatacaaatttattg

SEQ ID NO: 29376 - DNA, 1505 bp, Glycine max
  Clone ID: UC-GMFLMINSOY028E06_FLI
tggcttctcttgtttgtctgattatcctgcctgtaatttttgttcaagggaaaccatcaaaggctgtagttgattcattggctttatttggggcaggagctatgttgggggatgcatttcttcaccaattaccacatgcttttggtggagaacactcccattctcatggtgaccatggagatcatgaccatcatgatagttctggacatgatcatgcacattctttagccgatctttccataggaatatccatccttgctggaattgtactctttcttcttgtggagaagttagtgaggtatgttgaagaaaactcaggaagagctaattcatggacacatggacaccaccaccatcaccacaatagcaaggaaaaattgaaagatgataacagttctactgccaactttcagtcagaatctaataatgcaaaagaagagagattgatagatgagagaaaagaagacgatcaagtgtcacttgactccttgaagggagataatccatctcaatctgaaagctcactcagaaagagaattggaagcaatgtgaccaaaggtgataatctcgacgataatactgtagatagtgccacatataatgtaaaatcttcaaatgttaaggaaccagttagatcaccaacaagtcttgtgtttggttatctcaatcttttctctgatggagtgcataacttcaccgatggaatggctttaggaagtgcattcttgctttatggatctgttggtggctggtctagaactatgtttttgctggcacatgagcttcctcaagagattggtgattttggcattctgataagatctggtttcagcataccaaaagcgttgttcttcaactttctgtcagcactagtggcacttgcggggactgcattggctctgctgtgggggaaagatcctggacagtcatctttgattgagggatttacagcaggtggatttatatacattgcaattgcgggagtacttgcagaaatgaataacggtgggaatacaacattaagaagtactgttgtccaaataatctccctgaccattggcatggctgttgcccttggtatttcccttgtagaatgaatggaaattggtctctataggacttgcatgtcttgattcctgatttgccaattatttcacaaaaaatattccaaccagtttacaaatgttctctttatatttttgctttatgctaaacggtgaacccagaaaagcttgtagggaggaggaaccgagagaaaatgatggatcaaacagaatggtcaggctttaacaccaaatgattccttactccctaacagagtgaactttgtacagtacatgttttttcttttcgtcgttaatactaacctatcacaagccgtttgtctttgtcaaactatgtattttgtaacatttttctttcttatgagctgtatagcagtcaaaatgctttcctcttctgatgcacgttaaatgaagacactgattgtgtctgatggattttgt

SEQ ID NO: 29377 - DNA, 780 bp, Glycine max
  Clone ID: UC-GMFLMINSOY028G09_FLI
ttggacatgaagccaccattttgaagtctttaataatgttcacagttctcatcttaatgttgtaacaccaaataaagcagaactcttaattggacatgaagccaccattttgcagtctttaataatgttcacagttctcatcttaatgttgttctagctagtagtggtatttaatataatatgtttcttaatttcattgaagactactccggatgtgtcaaaatctccctctactccaaagccaacagtttcaagtccaaccaaaacaaataatagtgcaacatggtgtgtgccaaaaggaggagtggcagatgcacagttacaagcaaatttggattatgcttgtgggcaagggattgattgtaccgcaattcaacaaggaggggcttgttttgaacctaacactttggtaaaccatgctgcatatgccatgaatctattgtatcaaacagctggacggaatccattgacttgtgatttctcgcaaacagccatgttgtcaacgaataatccaagttacaagagttgtctttatgctggaggaaatgcctaacccagaaaacaagtagataaaggagggcactttttgttgttttaattattctctcttaattgctaagaaatgttctggttcttggagtgttcatgtatggaggaggatcttcttcctctatttgtagtctcaccttttttagtctttatcagaagcaaattgatgctttgtttatgtgtgatctgtgaagcgtggtttaggtatgtgtgttgttcaatcatcgtttg

SEQ ID NO: 29378 - DNA, 1234 bp, Glycine max
  Clone ID: UC-GMFLMINSOY028H12_FLI
gttaagaacgcgttttatcatcccggctgtgatggtggacccaagtgttcttccgctcaaatagaccaggcagtggaagttgcaaagaaagtggattatgtggtgctggttatgggattggatcaaagtgaagagagggaagaacgcgatcgcgttcatcttgacttgccgggcaagcaacttgaactcattaacggcgttgctgaagcttctaagaaaccagttattttggtcctccttagtggagggcctttagatatcacttcagccaagtataaccacaaaattggaggaattctctgggctggttatccaggggaacttggaggcattgcacttgctcagattatctttggtgaccacaatccaggagggagactaccaactacttggtacccaaaagattacatcaaagtaccaatgacagacatgaggatgcgagctgatccttcaaccggctatcccgggagaacttaccggttttacaagggtccaaaggtgtatgagtttggctatggactaagctactcaaagtattcctatgagtttgtttctgtcacacatgacaagcttcacttcaaccaatcatccactcatttgatggttgaaaattccgaaaccataagttacaaactagtttcggagttggatgaacaaacctgccaaagcatgtcactctcagtcacagtgagagttcaaaatcatggaagcatggtggggaagcatcctgtattgctgtttattaggcctaaaagacagaaaagtggaagtcctgtgaaacagttggtgggtttcgagagtgttatgcttgatgcaggggaaatggctcatgttgaatttgaggtaagcccttgtgagcatcttagtagagcaaatgaggctggtgcaatgataatagaagaagggtctcatatgttgcttgtggatgatctagagcatccaatagatatatatgtttgatgctacagatttattcttcaacgatgtcaagataattttagcgaacatgtctctgaaacacgctgcattttgggattatgagaccaagaaatgtactataatttgatttgaatcttggctccatggtatttgcatctgaaattcagatgaacgaagaactatttgagtgttgcatgtaaaagttggtcctcgtcgattattgatcgggataaacctggtcactaaatagaattgttgtatgcatcatcttatagtgtgtttttttttttctttc

SEQ ID NO: 29379 - DNA, 1297 bp, Glycine max
  Clone ID: UC-GMFLMINSOY029B07_FLI
catatccctcaaggtttggcttgtgcctttgtgtgctcatttttcactaaacaccaacccaaaccttatacacaaacattcttaattttgatatttttgtttatatattctaggtttttgttaattaattatattaagcatcatgggaaccccacaatccaataacttgccaccagggtttaggttccaccctacagatgaagagctcattcttcactacctaaggaagaaggttgcctccattcctttgccagttgccatcattgctgaggttgatatctacaagtttgatccatgggagctaccagctaaggccgcgtttggggagaaagagtggtacttcttcagtcctagagaccggaagtacccaaatggagcgaggccaaacagggcagcagcttcagggtattggaaggccacaggcactgataagaacatagtggcatcactggcaggaggagtgagggagcattttggtgtgaagaaggctttggtgttctacaaaggaaaacccccaaagggtgtcaaaaccaattggatcatgcatgaatatcgccttgttgacaccaatagacccattaggatcaaagacacctccatgaggttggatgactgggttctatgccggatatacaagaagttcaagcatgctgtatctccaaccacagaggcagcatcaacactgcaagtgatcaatgagcaattagatcaagcagtggtagaagaagaggagcaaatcaaagacacccttttaccaattttgaagaataacaacacttttgtccctcctccacaagccacaatactcatgtctcagaaatccttatccttctcaaatctcttggatgccacagactactccatgcttagcaccatcttatctgagaaccactccaataattaccctactccaagtgaaaccagcttattcaataattgtgagaatctggatcaggaaattaccccccaaaactactacatcaacgatactaatagtattaataataatagctacttgtttcagaagaacccttccaacatggaaaacattgctaggccaaaacgccaccttccaaacatggatcatgaggacaacatgttattataccctttaaagaaatatcatagttcctcttgcaatttccccaacaccaacctccaaaaccagaatccacaatggaacttcatgttcaagcagccactcatgagtcctcaatatcttcaatttcagtgataaatagcaaacaattatacgagtcacataaagaaaagaagaaaaaaaggttagggagaaaat

SEQ ID NO: 29380 - DNA, 1180 bp, Glycine max
  Clone ID: UC-GMFLMINSOY029B09_FLI
aaggatgaaaaatgtaatttaaaggttgcattaacggcaaagtcatttggccaaaatcttggttgccgtgccggcttcaacggcttttgactttagttgtaaatccggccaacagaacactgatacgtgttcgatttagttacaacttagtattgtacttactaatattaatatatgatgatgtttagcttggttagcaaaactgttgaaataaatatggagtaaattgcttttgaggggaaaaaagaaaagaaaaaggagaattattgtatgcgtgagagagtgttactcaaattacgagactataaagaagcatcacagtctgtaaaggaactaggtttcttggatcttcttcttctattctggagtaaataagggaggttgcaatggacactagtattagtattagttaaagaaaaccccattgcattccatttggcaactattcctatccaattttaaatgctcttccacctcacgagatctccgtggccctagcctaccactactcacttcttcaatgtcctactcctcttcgatatgagtcaactcggcgccgtgttgcggactcagagggagcccaggaggagtaccattctgggtttgttgacggagcaaatggacggcgttgatagtgggacccgcaggaggcgcagcttcaaggaacgcttcggattcatcggcatggggtgctgtggggccacctggggcttccgttccgacgcgctaagtgtcacccaaggagaacagcaacagcaggaaacggatccagagtgcgtgggtccagcaggtttgggttcgggtatgaatctcgcggcggcgttagcggcggagaggcagctccgggggccgcaggaggaggcagtgagagcgccggggacgccgtggagggtgtcgctgatgaggctgctggaggagaccgaggcggagaaggagaaggagaaagagaaagaggagaatgttgtggggaatgattcggtgtgctgcgtgtgcatgggaaggaagaaaggcgcagcgttcatcccatgtggacacactttttgcagggtgtgttccagggaactgtggcttaatcgaggctcttgtcccctttgcaatcgctccatcctcgagattctcgacattttctagaatttcttctaactactttttattattcttgatccagaaccaaccactt

SEQ ID NO: 29381 - DNA, 1480 bp, Glycine max
  Clone ID: UC-GMFLMINSOY029D03_FLI
attacttctttccttctctctctcaccaaaacaatttgctcacaaaggaggaaaaatggcacctttcgtttccctctctttgttgcttctctttctcaaccaccccctcctttccctctcaaccaaccctgaagctagcaagcagacttaagcttggccttaatagttttgatttgatccaaataatttgcgtagggaacgctctgcatgctttgagaagcaggctttctgatcccaacaatatgttgcagagttgggacccaacactggttaatccctgtacttggtttcatgttacctgtgactccaacaatcatgtgattcgcttagacttgggcaactctaacgtttctggaactctgggcccagaacttggccagctacagcatctgcagtacttgtatgagttttttcccttgcctgttacagctgagaagttcatatatgagcttctgtgtttaatctgttctttaaacatgtgccttctgacattattcaaacagtgaaattgaacatgataatttttggattttattttgtttgtacttgtacacattatttttgccccaggctagagttaggagactaccaaattatgaactattcccacaatttaatcctatctcacacatgcttggagattatttatgaggaaataatcacttatttttctgaagttctctctagtatccgataaaaatgaagccattatgtctttaaattaagctgaaccaaatgcgaacacaggagcaaatagatgttatatttgtgcctaatcaaatatgtatttaaaattttatttttggggtgggagttagttttgcaaaaatggattatgcataagagatactgaaattcttgattacagggagctctacaggaatgagataacaggaaagattcctaaggaacttggtaacttgaaatcacttattagcatggatttgtatgataacaagttggagggtaaaattccaaaatcatttggaaagttgaagtcacttaaattcttgcggctaaacaataacaagttgacaggatccatcccaagagaactcactcgtctcactgatctcaaaatctttgatgtttctaataatgatctctgtggaacaataccagttgagggaaactttgaatctttcccaatggaaagttttaaaaacaacaggtttagtggtcccgagctgaaaggacttgttccatatgattttggatgctgaagaaagatagaaatcgcattattatcatctaaacagattgcaatgaagaggcttagtttacgtagggagaaagggaaaggatggtgttattttcagatcaatatttcctcaccatttttacacttttcttaactgaaaaaagggagtatgagttggaatctacgtttttcttattttattataaaaaaaggaagctatgtaagaatgctctgaaaataattgtatgtaaataacattattgatgtatgcttgactcg

SEQ ID NO: 29382 - DNA, 944 bp, Glycine max
  Clone ID: UC-GMFLMINSOY029D06_FLI
atgcacacgggttagggaaacagtttcgagttgtagtggtagactctcgtccaaaacttagagggaaacttttgcttcgtaggctagtggagaaaggtcttagctgtacatacattcatataaatgctgtttcctacataatgaatgaagttactcgagtctttctgggtgcttcatcagtgttgtctaatggaacagtttattcaggagttggtactgcttgtgttgcaatggttgcccatgcattccatgtccctgttttagtatgttgtgaggcttataaatttcatgaaagggtacagcatgattccatatgctcaaatgaacttggtgatccagacgtcatttctacggttcagagtagagaggatgtcaaccacttggaagcttgggccaatactgaaaatctgcaacttctaaacctgatctatgatgctacaccttcagattacgtttccatgataatcacagattatggcatggtcccacccacaagtgtaccggtaattgtaagggaatatagcagagaacaggtgtggatatgaatgcttcaaatgtggatcatctcaattttgtgtgcatgcagcgaatccctattttagcaataatttttttcaaagtttgggatgatgcatctttctgtatcattttcttgtcctggaataatgtaacggccctcttgttcttttcgaaattttgatcgcttgtctggattcacctgtcgcagtgaagagtgtggattgtcgcctctccagacagattttggccttgcattctctgtaacagttttttttttctttttcttttttgttctagtggtcttcaaattttggatagttgttcggtcagttttggtggttattattctatacccagttttttatatctttgattataaaaaccatcaccatcaccacgagttactggtgaaattgtcactgaat

SEQ ID NO: 29383 - DNA, 820 bp, Glycine max
  Clone ID: UC-GMFLMINSOY029E06_FLI
ccctctggtcgtgttttcttctggtcctacgttttctacctctcgcgtttccttcacatgttgagaaccgtcctcgtcgtcctacgacgtcgtaagctcgttttctttcagctcttctaccacgcgatttccaccttcatgtctttcctgtggctcgagttctcgcaatctttccaagttctggcgatcctcttcaccacgctcgcgttctccgttatgtacggctaccgcttctggacatcagtggcggcgcgtggcgcgtgcctgccactcgtgctcaactgccagattgcgctgcttgggtgcaacttggtttgccacgtagcagtgctcttgttgcattttctaacaggagggtgtaacgggattggcgcgtgggtcttcaattccgtgctcaacggtgctattttgttgctgtttcttaatttttacgtgaggatgtatttagcaaggaggaggaagcgtaagggtgtcgtcattgatcatcgttgtgagaatgataataacattgctcgctcctctgtcttgggcgctggaaaagaaccacatagtaataaagtgaagtccaattaaagcacagatatatatttgaaggttgagtcatggcttgcaaggtcccaaactttgtggaattgggcatccgagtttattttttttttgtaattaaaagcacgcgtgcaggttctatataaaaggccaatgtgattgtaggaagatagagagttttgttgagtactctttttgataacattgtaagttatatataatcgttcttcatctctttcacggattgattattgaagtcttctcaattctaatc

SEQ ID NO: 29384 - DNA, 1440 bp, Glycine max
  Clone ID: UC-GMFLMINSOY029E07_FLI
ggaaaccccaacaacaacaacttgtttgatgggtgccaaggagagagtgatcattggagtgagcttgacactgatctttatcactggacaaaggcattgcgccctgtgcagtggtttcctggtcatatagcaaaagcagaaaaagaactgaaggagcagctcaagttgatggatgttgtgatagaggtgcgggatggacgaattccgatgtccacaagtcatccacagatggatctatggcttggaaatagaaagagaattttagttttaaatagagaagacatgatatcaactgcagaccgcaatgcttgggcagattattttactaggaatggcacaaaggttgtcttctccaatgggcagcttggaatgggaacgatgaagcttggccggttagcaaaggaattagcagctgatgtaaatgttaagcgtagatccaaagggctacttcctcgtgcggttcgagctggaatagttggataccctaatgttggaaagtcatctttgatcaaccgtttgttaaagcgaagaatgtgcccagcagctcctaggccaggagtcacaagagaattgaggtgggttcgttttgggaaagatcttgaactgctggactctcctgggatactcccaatgcggatcagtgatcagtccgctgctataaaacttgccatatgtgatgacattggagagaggtcctacgatgtggccgatgttgctgcaattcttgtgcagatgctttcgaagcttcccacagtaggcagagatgctctttgtaaaagatacaagattgatgtagattgtcgagatggtagaatattcatagagaagcttgccgttcgagtatttaatggagatgttcatcaagcagcattccgcgtcctagcagattttagaaaaggtaagtttggttggactgcactggagaggcctcctaagtgaaggcagatgtttgcttttaaaagcagaactctgaagcttgaattgaaaattacgctagagacgtcctggaactgactgtagaagacaactccacatggtgttggatgaatatggatattgtgattatgaatgacattatggaagggaaaggtgaatgctccctcaagacaatctttggatcctcggggcacacgaaacaaaggatttgaagccatggatgcttcttgttattaccttgtaatttggtctcttttgcatctgtctgactgtctgtatagaaccattatgccatgggatgggagttcgtagtcatgatgcacatatgttgtagtatatacttaattgttgtagtgagatgtttcttaaaattagggcagatgcttgttgcacttttgggatggtcttcagctcatatcgtttaaccagataaacatgactatgccaaagcaataagacagtaagacgattcaatagttacatatactacctgatcttaccccc

SEQ ID NO: 29385 - DNA, 928 bp, Glycine max
  Clone ID: UC-GMFLMINSOY030B04_FLI
ctcagatacaggaaattaaagaagcagtcgaacttcccctgacgcatcctgaactgtatgaagacattggtatcaagcctcctaagggagtcattttatacggcgaacctggaactgggaagacgttgctagctaaggctgtggcaaactcgacatcagcaacctttttacgtgttgttggtagtgaattaatacaaaaatacttgggagatggtccaaaacttgtaagggaacttttccgagttgctgatgatctttccccatctattgtcttcattgatgaaattgatgccgttggtacaaagaggtatgatgcccactcaggtggagaacgtgaaattcagaggactatgttggagttgctgaaccagttagatggtttcgattcaagaggtgatgttaaagtgattcttgcaaccaacagaattgaaagccttgatccagccctgctgcgacctggtcgaattgacaggaagattgaatttcctctccctgatatcaaaacaagaagacgcattttccagatacatacttcaaggatgacattagctgatgatgtcaacttagaagaatttgttatgactaaggatgagttctctggagctgatataaaagcaatatgtactgaagctggcttacttgctttacgagaacgccggatgaaggtgacgcatgccgacttcaagaaggcaaaggataaggttatgtttaagaagaaagaaggggtgccagaaggactgtatatgtgaagcatcttcatcatttaccccggccttctttctttattacagtctttttgttgttctgtgaacggatgtttgtattttgatttgtggtcgtttatgggtctacattatcacgggatttaatctcaactatagttacatagctttctttgatttaaaaaaatcgggaaaattttcctgcc

SEQ ID NO: 29386 - DNA, 2179 bp, Glycine max
  Clone ID: UC-GMFLMINSOY030C07_FLI
gcagcaactccggagcagttaagggaagagaattccctcttcctcgctgcccctgcccctcctcaaattcaaatgccccttcccttgatctctggtcacaaatcgttgccgctgaaacgccccgccccgaacgaatcgacgtcgtttaccggagaagacaccctcgcaatcctcaaaaccacgccaactcaaagcctcccgattctgctataccgcgcccgcctcggcagagtttggccgatccaaacaagcgagtcagttggaaccgttctctttccacccgagggaggacaagtatagccgttggggcttttatggtataccagcctcagttgaagaaggacaaaaggaaaggaaaacccgctcttcccaaaggaaaggttgtgcaacctccaaacgttgacaaggagaggatatactttcaagaggttgatgcttatgagttgttggaggaaagcccctcccccaagaaaagcacatggaccataggaaatatgacacaacaggaaccaattccagctgtatgctccagattagaaaaatggttgcactctagaaggttaaaccccttctgcggtccatctagcacactatcgaagatactggatactccttccacacgtttggaaactattcgtgacattgacttcggtgcttctgacttgaaaacattggaacgaactgaccgaagcaattctcttctgcataccatcaaaactgaggagaaggaaacttctattgagaatggcagtcatttgcaaacaaatgaaaagatgctgtttgctcaaagtggtgaaggatgtgaagatattgaagctggtgttaagaaactttctctggtatcaacgtcatcttcaatagatgatgaccacattaatccattttctgttttattatcgatttgtggacagtctgcaccttcagtgttacaagatattttctctagtggctcagaaactattgtgaaagttggtgaaggaacatatggagaagctttcaagattaacaattatgtctgcaaaatagttccttttgatggggaattcagagtgaatggggaagtccaaaagagatccgaagaattgctggaggaagtgcttctttgcaaaactctcaatcaattgagaggaaaagatggagattctgataatctttgcagcgcattcatagattgcatagaatttagagtatgtcagggcccttatgatgcgtctctaattcaagcatgggaagattgggatcttgagcatggctcagagaatgatcacccaaaagagttcccagataaacagtgttatgtggtgttcgtacaagaacatggtggcaaggatcttgaaagttttgcactcctgaattttgacgaggcaagggctttactggttcaggttacggctgggcttgctgtggctgagtctgcgtttgaatttgaacatcgagatcttcactggggaaatatacttgtgggccgaagtgattctgaaacgttgcagttcactctcgatggcaagactatgttggtcaaaactcatggattaataatatctattattgacttcactttatcaagaataaacacaggtgatagcatactgtatttagatctttcctctgatcctgacctatttaaaggaccgaaaggggacaaacagtcagaaacatatcggaggatgaaggaggtgactgaagattggtgggaaggaagctgtcctaaaacaaacgtgttatggttgatctacttggtagacatactcctcatgaagaaatcatttgaacgtactacgaagcacgagagagatctacgatccttgaagaaacgtcttgacaagtatgattcggccaaggaagcaattcttgatcccttcttcactgatttgttcgttgagtctgacccaaacttaacaatctaaagctccttttcccacctaacatggcattttgtcaaaactttactcgactttcttgcatctttggaggcagctttactccattgttcaacttgatccgtacaaggtgaattttgtttttgccaagttaaaatattaatgtatagatcgaagtgtgataactgaatatatagctgcaaaacttctacagcaatgcaggttaattgtgataatttcttctgtatatttttcctagttaatgttatcacattttaattttaatgtttatacttgac

SEQ ID NO: 29387 - DNA, 1269 bp, Glycine max
  Clone ID: UC-GMFLMINSOY030D03_FLI
ctaaaatggattgtcaatgctcatgccctgatataatttcatttcttgattgttagaagggtgagtaaaagtttttaatatgatttgaatcaaataagcagctgtaatggcccttgatgtttataggtagtgaaaacaagcagcttaaattggactggcccacgaggtttaggatttgcattggcatagcaaaaggtttagcatttctacatgatgagtcaagattcaagatagttcacagagatatcaaggcttctaatgtgttactcgatgacaaattgaatccaaagatatctgactttggcttggctaagcttgatgaagcagagaagacgcatatcagcacccgagttgctgggactataggatatatggcaccagaatatgcattatggggctaccttactgacaaggctgatgtttacagttttggagttgtggcattagaaattgttagtgggaaaagcaataacaattatttaccagatgatggaagtgtttgtcttttggatcgggcatgtcagttaaaccaaactcggaacttgatggagctgattgatgaaaggttggggccagaccttaataaaatggaagtagaaaaggtggtcaaaataggtctcctgtgctcaaatgcttctccaacacttaggcctacaatgtctgaagtagtgaatatgcttgaaggacatgcagatattcctgatgtaatcccagaaccaagtacctacaatgatgatttaaggttcaaagccttaaggaatctccatcaatatcaatcaaaacagagtttgagtggaaaccagagccagagttcaatgacacatacattcacctcagcatctggtggtaatactcacactactagttatattgaggatcatagttcagttgacagtagttagttttctcctttcaccaacttgacgcactttaccagatagcagtggtagctccagatcttagggcttgaaaattttgaccagcatggaaccttctattttcacttgtgtagttttctgctttctgaagaggtctccaaaggagtatgagaagatttttcctttcttccttatgtcacccttatttgatttgattttactttttttgtttctttaatgtacaaatatattgctacaaataaagcaatctctaaatcataaatttaggttacttctttatttatttctatgtgtatccatataacggaagttcaattcatacctgatgtaaaatattataataaattataaattagattgtgtatgtttc

SEQ ID NO: 29388 - DNA, 1414 bp, Glycine max
  Clone ID: UC-GMFLMINSOY030F06_FLI
ctcgtctgtctttttttctctttctctctctagattttctttcttcttcttctttatgagccctaactcggggccccatagtcgtcgctgctagctagccatgtcgctgaggaaggtcttccgctcccgcaagttctccaaatcgttcaaagaggtgctgccggcggagggcgccgccgtcgagggcggggtcgccggcaccgtcgaggaggcggcgaatgggaataataatgggtggtctagcatgctgccggagatcctcggcgagatcgtgcggcgcgtggacgccgccgaggagcagtggccgaaccgccaaaacgtcgtcgcctgcgcgtgcgtctgcaagaggtggcgtgacatcacgcgcgaggtcgtgcgtgtgccctcgcataccgggaaaatcactttcccttcgtgccttaaacagccaggaccacgtgacgttccccaccaatgtcttataaagcggaaccagaagacctcaacgttttatttatatcttgcccttacaccatgtaacattcacagataaagggaagtttctgctagcagctaggagatataggtgtggtacccatactgagtatataatttcacttgatgctgatgacttatcccaaggaagcaatgcttatgttggaaagctaagctcggattttcttggcaccaacttcacaatttatgacagccagccaccccatagtggtgcaaaaccatcaagtggcagggccagccgtcggtttgccagcaagcagataagcccgcaagttcctgcaggtaattttgaggtggggcaggtctcctacaagttcaaccttttgaaatcaagagggccaaggagaatggtttgctcattgaagtgtcctgtaactcctgtctcaccaacgagtggaagttcagatagcacgcctgtcaatggccataagatgcacgataaagaacaagctgcatctggctacacaatcttgaagaataaagctccaaggtggcatgagcatttgcaatgttggtgcttgaatttccacggccgtgtgacggtggcctcggtgaagaactttcagctggttgcaacagtggaccaaagccaaccaggagggaaaggagatgaggaaacagttctcctccagtttggtaaagtaggggatgatacttttaccatggattatagacagcccctatctgctttccaggcttttgccatttgcttaactagctttggcactaaacttgcttgtgagtaatataattttggtgtcactgcttatttattccgtggatggatgttttaagtgaatagttgttttcttttttactcggctttaagtctacaatttgattgcaggaagcttgttgtaaatgttatatcatcaataggacatgacatcttccataaatcaaatatattgccttattc

SEQ ID NO: 29389 - DNA, 1228 bp, Glycine max
  Clone ID: uC-gmflminsoy030f07_FLI
gtctctctctctctctttctctctcatgctttaattctccaacacgagaagttaaattttagagtgagttgggtaattgttggagggtctattttttctgtccataaatacctgtctgctaggccaacccacttccatattttgcatcctttgtacctcagttccaggttaacaccaaacaacacatatagtgcagattcataagcttccaaccatggaggatccaaatcaagctccagaagggtcttctcagaagaaaatgggaagagggaagattgaaatcaaacggatcgagaacaccaccaataggcaagtcaccttctgcaagcgccgcaacggtttgctgaagaaagcttatgaattatcagttctgtgtgatgctgaagttgcccttgttgtcttctcaacccgtggccgtttgtatgagtatgccaacaacagtgttagggccactattgagaggtacaagaaggcaaatgctgctgcttcaaacgcagaatccgtatctgaagctaacacacagttttaccagcaagagtcatccaaattgagaagacaaattcgagatattcagaatctaaacaggcacatccttggtgaagcacttggttctctgagtctcaaggaactaaagaacctcgagggtagattggagaaaggattaagcagagttagatctagaaagcatgaaacattgtttgctgatgtggagttcatgcaaaagcgggaaattgagctgcaaaaccacaacaattatctgcgagctaagatagctgaacatgagagagctcaacaacagcaatcaaatatgaatatgtcaggaacactgtgcgagtcccttccttcacaatcatacgacaggaattttttccctgtaaatctcatagcttctgatgatcaacaacaatactctcgtcaagaccacactgctctccaacttgtctgatatgctggaagttaaagctactggaagttcatggctctagctagctatttgaatagttacgtgtattgtctatatagtgctgagcaaataatattgccatacaggcatatatatatatatgcctgcgttaatttcctgaatcagttgcgtctttagaattgacgttaattggctagctaaaggtcattattaaactgtgaactaaatgaaccattttggactcatatttcatacgatatatataatgttaatgtatcttttaataagagctagctagtttct

SEQ ID NO: 29390 - DNA, 1628 bp, Glycine max
  Clone ID: UC-GMFLMINSOY030F10_FLI
gttcgggtgttctgcgtttttgcgaatccgatttggcctcaattccgccattcctttttggattcgtctttttttttcttcttcttctttttcatggaccgcagagtctatcaccatcgtcctgctcctccggcacatgcttctccccctgaatactttgtcctccaggggaacacaacttataaagacgatctatatttaaggaagaggacagggatgcgtcggtggctttgttgcacatgtcaggtggaagagtcttacccatcaaatgaaaatgagcacctgaaaagcccaaggaattatggagatggaaatcaaaaaggctcaaaggtgtcagctcctgtcaagcctgaaacacaaaaggcacctccacctattgaagctccagccttatctttagatgagctgaaggagaagacagacaactttggttcaaaggcattaataggtgaaggatcgtatggaagggtgtattatgcaaccttaaacaatggaaaagcagtggctgtgaaaaagcttgatgtttcatctgaacctgaatcaaataatgagtttttgacccaggtttccatggtctcaagattgaagaatggcaattttgttgagttgcatggttactgtgttgaaggaaatcttcgtgtacttgcatatgagtttgctactatgggctctcttcatgacatattgcacggtagaaagggagttcaaggtgctcaaccaggaccaactcttgattggatacagcgagttagaattgcagttgatgctgctcggggattggaatatttacatgagaaagttcaaccaccgattatacacagggatatcagatcaagtaatgtgctaatctttgaagattacaaggccaagatagccgactttaacctttctaatcaggcccctgacatggctgcacgccttcattcaactcgtgtattgggaacttttgggtatcatgctccagaatatgcaatgactgggcagttgactcaaaaaagtgatgtctatagttttggtgtggttcttcttgagcttcttactggcagaaaacctgttgaccataccatgcctagaggacagcagagtcttgtcacatgggctactccaagattaagtgaagataaagtgaaacagtgcgttgacccaaaactgaagggagaatacccccctaaaggggttgctaagcttgcagctgttgcggcgctgtgcgtgcagtatgaagctgagtttaggccaaatatgagcattgttgttaaagcactccaaccacttctgaagtctcccgctcctgctgctccagaaagttgaagcaaataaaatcgcttagatgtctgcatcgtctgcacagttcgattcagttatctccagatttcatcaaatactgcggatatatctatacatctatatttttttaaaatttttgtttgagattggatgtgtaggattgaattggcttgtttcttgttgtcattgttaaattccatgtatttatttcatcgcacttgtagtgccgagtctgctgacacccattgagccataatgcaacaataggtttgggttgtgtgggtaaatgttgtttgtcacttaacgttaatgccctccatattctttatttgtttcttgctatc

SEQ ID NO: 29391 - DNA, 3156 bp, Glycine max
  Clone ID: UC-GMFLMINSOY030F12_FLI
cattcaacaaaaccatttttttttctctcactcacttcacacaatgaagcacccaaaaccccaaacccaatcaaccccaacaccatcaccttcttcaagatcttcttctctctcgtcccacctcgctatggtggagctgaagcagaagatcttaacctctctttcgaagctctccgaccgcgacacgcaccagatcgcggtggaggacttggagaagactatctcggggctctcgccggacgccattccgatgattcttaactgtctttacgacgccgccaccgaccccaagcccgccgtcaagcgggacgcgctccgcctcctcgccgccgtctgcgccgcgcactccgacgccgcggcggcccacctcacaaagatcatcgcccacgtcgtccgccgcctcaaggacgccgactccgccgtccgcgacgcctgccgtgacaccgtgggcgccctcgccgcgcagtatttgaagggagacggcggagggggtggcgggggaggtgtagggacggtggtggggctgttcgtgaagccgctgttcgaggcaatgggggagcagaacaagggggtgcaggcgggggcggcggtgtgcatggccaagatggtggagtgtggcggtggcggcggaggaggggaggcggtgccggtggcggcgtttcagaagctgtgtccgaggatctgcaaactgctcaacagtcccaatttcatggccaaggcggcgattttgccggtggttgccagcttgtcacaggttggagcggttgcaccacaaagcttggaacatttgctgcctagcattcatgaatgcctttctagtactgattgggcaacacgtaaagcagcagctgaggcattaagttctctggcattgcattcaagcaatttggttaccaatagagcggaacccacactggcagttcttgaggcttgccgatttgacaagataaagcctgtaagagatagcatcaatgaagcattgcaattgtggaaaaagattgcagggaaaggagatgggtctcctaatgattcaaagccctcatctgatggtggtaatgaatcagctatttcgtcagaagcaagtgacccgaaaaaagtaaatcttgatgagaggaagactgattcaccagtaaaggattcatcaaatatttcttcaaatatggattcaaccaaggccaaagcagctggcatctcagagaaggcagttgtaatactgaaaaagaaaccacctgtattatctgataaagaactaaatccagaatttttccaaaaacttgaaagaaggggttcggatgatttaccagtggaagtagttgttcctcgtagaggcctcaattctttgaactccaacaatgaggaagaatcagaggcaaatgctaaagattcgaaagaaagaataaattctgttggaaacatccctaatgatgattttcatggatcctctagtaataaatatcgtatctttgagagaggcaatgatggaaattcaaaacaaaggaattatgatgattttggccatgacagattctctgaaaggagagtgaactcaaaagaactgaggacaaaagcatatgatactgatgataggactgaaaatgatcagagggagggttctgccaatgtttcaggtttttctaaaattgatggtcaatcagaagtacccttctccaataacagaggaaactggttggccatccagaggcagttgctgcaactggaaaggcaacaagttcatctgatgaatatgctgcaggatttcatgggcggatctcatgatagcatggtgactctagagaacagagtgcgaggtcttgagagaattgttgaagacatgtcacgagatttatccatatcatcaggtcgtagaaactttgcaggatttgaaggatcatctaataggccttctagcaagtataatggttttaatgactattccagttccaagtatggaagaggtggtgatggacgcattccatttggtgaaagatttgcccaatctgatggaaatgctttgggaatgaggggaagagggccatcttggagatctgacatgtctgagggctgggatcatcctgggtatggtgcttctagaaatggtcagatgtcctcaaggagggcttttgggggtagttctgctgatggaagatcgccaaaatctgtgcatgagagtgatcaagcaggcaacagaagagcttgggataaagcagcaatgcccattcggcttggtgaggggccttctgctagaagtgtctggcaagcttctaaggatgaagctaccttggaagcaattcgggttgctggtgaggacaatggaacatctcgagcaacaagggtagcaatccctgaaatgactgctgaagctatggctgatgacaatgttgggcaagagaaggatgccatctggacttcttggaccaatgcaatggatgcccttcaagtaggtgacatagattcagcctttgcagaagtattgtccactggtgatgatattttgcttgtaaagataatggatagaacgggccctgtaattgaccaactttcaagtgaagttgcatgtgaaattgtgaatgccattggacaattcttacttgaccagaacatgtatgacatctgtttgtcttggattcaacagttgctggagatagtattggaaaatggccctgacacctttggtattcccatggaagtgaagaaagagctcttgctgaatttacacgaagcttctacagatccagctgaggcctgggaaggggtacagccggatcagcttttattgcagttggcatcagcctgggaaattgatctacaacagcatgacaaatagcttgtagagaacaaattatgctgctattgaatcttgaattggatggtattgagtgcaatttgaaatataatgctgttcatgtttttggcctccacacaacaactacattgccacaaatttatgctcctttttctcctgtatcttggtgaacttaggctaatcctataccggtcagagcaatgttcgaccgttgatatcattgtttttttttaccaaatgtctacagatattgtcattactaagaggtagtgtctggttgtcactaagtgcctgcttaaagacaatgtgtaaattgagacgaatgaacaaatcttccatgtaattattaatgt

SEQ ID NO: 29392 - DNA, 2834 bp, Glycine max
  Clone ID: UC-GMFLMINSOY030G11_FLI
cgccgcttacaacggcttcgctgccactctcgaccctcaacaagcccacgcgcttcgagcttcccattccgtcttggccgtctacgaagacacgcgctacacgcttcacaccactcgcacccccgagttcctgggccttcaggcccattccgccttctggcaagacctccaccaggcctcacacgacgtcgtcatcggtgtcctcgacactggcgtctggcccgaatcgcaaagcttcgacgactctcaaatgccgcaaatccccacgcgctggcgcggtaactgcgagtccgcacctgacttcgacccttctctctgtaacaacaaactcatcggagctcgcagtttctccaagggctaccgcatggcctctagtaacgctagaaaaaccagagaccctgctaccccgcgtgaccttgacggccacggcacgcacaccgcctccaccgccgctggctccgccgtcgccaacgccacgctcctcggctacgccaccggcactgctcgcgggatggcgccacaggcgcgcgtggcggcctataaggtctgctggaccggcggctgcttcgcctccgacattctcgccggaatggatcaggcaatccaggacggcgtcgatgtcctctcgctctccctcggaggctcctcctccgtcccttactacttcgacaccatcgccatcggagccttcgcggcgttggagagaggcatcttcgtcgcctgctccgcggggaataccggacctcgcggcggttctgtcgcgaatgtcgctccgtggatcatgaccgtcggagccggcactctggaccgtgattttccggcgtacgccactctcgggaacggaaaacgcttcgccggagtttcgctctacagtggagaagggatgggagacgaacaggttggtttggtttatttcagcgaccggtcgaactcgtcgggcagcatttgcatgccgggttcgctcgacgcggagagcgtgcgcgggaaggtggtgatttgtgacaggggactcaactcgcgcgtggagaagggtgcggtggtgcgcgacgccggcggggttgggatgatactcgccaacacggcggcgagcggggagggactggtggccgatagtcacttggtggccgccgtggcggtgggggaatcagcgggagatgagatcagagagtacgcgtcgttggatcctaatccaaccgctgtactgagcttcggtgggaccgtgttgaacgtgaggccctcgccagtagtagcagcgttcagctcccgagggccgaatggagtcacggcccaaatactaaaacccgatgttattgggcctggagtgaacatattagcgggatggtcgggggcggttggcccatcaggcacagaagacagtcgcaaaactaactttaacattatgtctggtacttccatgtcctgtccccacataagtggtttggctgcgttgttgaaagcagcacatccagattggagtccaagtgcgatcaaatcagcactgatgacaacggcttataccaatgacaacacagagtcaccaattcgtgatgcaaagggagaagaaaccatctccacaccatgggcctatggggccggtcatgtcaacccacaaaaggccctatctcctgggcttgtttatgaagcctccacccaagactacattgcgtttttgtgctccttgaactacacgctcgaccatctcatacttgttgtgaagcatcctgatgccaattgctcaaaaaaattcgctgacccggccgagctcaactatccatccttctcgcttgttttcggaagcaacaagcttcttcgatacacgcgcaccttgaccaacgtgggggagccgggatctgtctatgatctggtgctcagcgtgccatccacggtccacgtcaccgtcaaccctagaaggcttcagtttcgacaactaggggaaagccaaacctacacggtcacgtttctctctaataggactcttaatgattccgttacttctgattttggtactattatgtggaccaatcaactacaccaagttaggaccccacttgcttttacatggacatatttttgactttgttattcgttggagtacactataatatttaaagcctaacggtaatagtctatagactagagtgcagaaaaaaaaaaaaaaaaaaagctgcatgactttagtcttcaggcaccttcctgttaccatcatagtcaagactgaaattgtattaacagattgtaaaagctaatgcaacatgacactcgcgtctcacgttccataatgctatgtatcaagagtgcttacgactattattaatttcatagtttcagaatcctcaatcagcgttgaattgaataatgcttcaaatggtgtacatgtttctccagatcatgcatggtttactaaaactaaagtttcacagtgaaccaaacgtggactgacaaaggctgagcgagatgctggtaatgactattttttaccgatcccgggatcaggtggccgatttcacaaaaacggaaacagattacgggcaattttgcgctcctgaacaacccatgtgcaattgatggattttgttttatttttctcttcctgtgttggtacaggcgtgcagttaaaggttgtggcatgttctaccgcagtacatactacacacggtcatttcaaagttaacacttcctctgaattactaattactagttatttcgaagggtcttattccaaacgatctttggccatgaatggctactaatccgtgtaccaaatgaatagacatttccagtgtcctgtgtcccgtgtcagatatgcagaaaaaggtagttcacagcaatcactt

SEQ ID NO: 29393 - DNA, 1006 bp, Glycine max
  Clone ID: UC-GMFLMINSOY030H10_FLI
ctgataaccaatgccggagcagttaagtctctgatttatgttctaaaaaccggaactgaaacttcgaagcagaacgcggcctgtgcgctcttaagccttgcattggtggaagagaacaagggctcgatcggggcttccggtgcgataccgccgctggtttctttgcttctgaacggttcgagcagagggaagaaggacgcgctgacgacgctttataagctgtgttctgttaggcagaacaaggagagagcggtgagtgccggcgcagtgaagccgctggtggagctcgtggcggaacaggggaacggcatggcggagaaggccatggtggtgctgaacagcctggcggggattcaggaagggaaggacgcgattgtggaagaaggcggaattgctgctcttgtggaagctattgaggatgggtctgtgaaagggaaggaattcgcggttttgacccttcttcagctctgtgttgatagtgtcataaacagagggtttcttgttagagagggtgggattcctcctctcgttgctctttctcagactgggagtgctcgagctaagcacaaggctgaaacgcttcttcgatatttgagggaaccaagacaagaggcagcatctacttcaagttcttagataagtgattacattgctacttgggaaggtggtaattatacaatgtaattggttattgtgtatatagtgtttttgatggtttgtacagtgtggctaagatagttggaatgggaaccgtgtttatcgaagttagatgaagctagcgatctatagactgaccctttagatgtatgaatatagctaggtttgggagtttgctttcccttgttttgatttgctggtgtttcctggagttacatggttgtctttttaagggttgattaggttcccttttgtttaggtgaccctagttttgtggaaagggtttctgattgtattattatatggtaattaatttgcgctcgtaatgaaagtacggagcttgtacttc

SEQ ID NO: 29394 - DNA, 2561 bp, Glycine max
  Clone ID: UC-GMFLMINSOY031A10_FLI
gcgttctctctctctctctctctctctctctctctctctctctctcggatcggagcgaggctggcggttccggcgttggggacgttagggttagggtttccgagagatgtggtatgctccaggcattgatgaatctgttctcgctgtgttggaagccgtttggccgcgatgctgatcgaatcgattccatcggagttatcggaagagaaggcaaagacggcttgctctggttccgcgacttcggaaaatatggctccggtgatttctccatggctgtcgttcaggccaaccaggttctcgaagaccagagccagatcgagtctggtcctctcggcaccttcgtcggcatctacgacggtcacggaggacccgacgcatcaagatacgtttgcgatcacttgtttcgccattttcaagcaatatcagctgagtcacgcggggttgtgacaactgagacaatcgaaagagcatttcgccaaacagaagaggggtacatggccctcgtgtcaggctcgtggaatgctcgacctcatattgcaagtgctgggacctgttgtctagttggagtgatatttcagcagacactctttgtggcaaacgctggagattcccgtgttgtattgggtaagaaagttggcaacactggaggtatggctgcaattcagctgtctacagaacacaatgcaaatcttgaggctgttaggcaggaacttaaagaattacatcctcatgatccccaaattgttgtcctcaaacatggagtgtggagagtaaaaggcattattcaggtttctagatctataggtgatgtatatttgaagcatgcacagtttaaccgagaaccacttaatgcaaaattcagacttcctgaaccgatgaacatgcctatcttgagtgctaatcccactattctttctcatgctctccaaccaaatgattccttccttatatttgcatctgatggtttatgggagcatttgagtaacgagaaagctgtggatattgtaaacagcaatccacatgcggtaagactctttcttccatgtttggattttcttgttgtacttatttctgtaatggttgtttcctcgtctggccataaaatgcatggctggggggggcggctaattgagcccagtggttgcataaaaaattggatgagggctagtcctgtttattagcattagtaatgtgaaggacctataatatttattacatgctttacatgttggtcgggacaagattggaaaatcccccctacaactttgatccgtaatttcatcatgtctctatctgattctgacatgagagattgaagattactgcttttggttgatttgatagtgtgtagaacaatagaagtgcatgactagtggatgcagtaataagtagtgtctgtactttatctgaagtcttaagctttacaagtcatgtatgttccttaattcctttatcaagaagttgccatattccaattcgatcttacattttatgatgttcagatatttatttgatcatcactgtagcttttaatatgatagtttattcattaatacaattcctatgatgagtttgtttcctacattcttacctttcagtaagttattctttttgtaatttattattattgaatatttctgctaattttgcttcacaaggtggtaatactgaggtcccatttgaataaatttcttcataaacattatttatacgagaagaaaattaaaaggtatattgaatcgagattctcccacaagttaaaatcaatttttgcacttaacttttataggtctcatctaacttctccaaaatctgaggtgcattagttgaatttaatttatgggaaaaaaaattattttctttttacaagtgtttatggaaaagtttattcagaggcctagctcatctcccagcatttgacttgtatgaaaattcaaatcactccccccacacactcacctctctctctctctctctctctgtggtcctttccatattctatgcttattaaaaagggaatcatgatgacattgtgttatttcgttgttattcaagaagcctgttttattgaattctttgttattcttccttgcgttgctattgtactacaattgtgttactgcagggtagtgccaagagacttatcaaggctgctctccatgaagcagcaagaaaacgagaaatgcgatattcagacctccgtaagattgacaagaaagttcgacgccattttcatgatgatatatccgttattgttttattcttaaatcacgaccttatttccagaggcacagtgctagacccgacactttcaattcgaagcgctctcgatcactgacttgtatcactgtaagcagtcttgtacgagtttttggcaactgtaccgatacctgaagcattggtaggtacctggctataatatgtcatttctatggcacatatggcttctggtaccgacatcattcttgaggcacgagaatttattaagttataacatattattagaaatttattcataaagaggaaaaaaataaatacaaaaatatcttattcccttttct

SEQ ID NO: 29395 - DNA, 1190 bp, Glycine max
  Clone ID: UC-GMFLMINSOY031A12_FLI
ccacttcagaacctctctgcactgatctctgccagcggcaatgccacaacagctacagcacggcctccgagagggcggccctgggcggttcacgcggcgtcgtcggacactaccaccgccgcgcaagcgcagttgggtaggtacgaagaagggaagctggagcgacccaagtgggttggggagacccctctttcacgtctcgttcaagctctcatctccttcaagcccttgttctctgtcctcaagcttggtgctagaagggctttgataagtacagctgagaagaacaatataccttggaggaaaatggcacaagagattttagagtcagaagtgtatagggagctggagagcattcaaaaccagtctttagtgtatcctgattattatttgaatccatttcatgcatatgaagagggaaatcttacatggctggcagcagcagaagcagaggctgctacaatgtcaatggccagacgagcacttcctgatgcttcttcaatacaggaagcaaatcagatactgcgtggcaattggcttcatgcaattgaacaacaccatatgcagtattcagaatcatgtgtgatcgatgacattctagatattggatgctctgtaggtataagcacaagatatcttgcagacaagttccccacagccaaagtcaccggacttgatctgtcaccctattttctagctgtggctcagcataaggaaaagagagcaatgcctagaaaatttcctataaaatggatacatgcaaatggggaagacacaggcttgccttctaaatcgtttgatcttgtctctattgcttttgtgcttcatgaatgtcctacaagagttatagtgaatttggtaagagaggcattccgtctccttcggcccggtggcacactagctttgacagatttttcgctgaagtcaaaggtccttcaggaattgtctccggttctgtttacattggttaagagcacggaaccctttctggatgagtactacttgactgatatggatgaaacacttagggaagctggttttgtgaacataacatcaattcttacggaccccagacacgtgacaattacagcaacagtgcctcaatgaaacatcacatcttcttgagatattttatttgtcaagatgcttaaaaaggattttatttattcataatgcatggttgttcctat

SEQ ID NO: 29396 - DNA, 1790 bp, Glycine max
  Clone ID: UC-GMFLMINSOY031C06_FLI
ttgaaaagtaaaccacgactctgatgtgaccattctccattcccatggcaccaccatcctctcctccgctcgtcgacaattccgatgccgagcgccgccttcgcgaagcggaggagcgcctccgcgacgccatcgaggagctccagcgccggcagcgccgcgccgccgctcacgcccagcagcaccgccacgtggactcgctgccttgcgatcacggccccgacgagtcctgcgtggctcacgccattggcaacctctgccagaccttcctcctctcctacggcgtcagagtcggcattggcatactcctccgcgccttcaagcttgttcgaggccaatcctactcctctctcctcgatctcaagcaacttgtttcagaaaaagatctgatagtaagggaagaagcatgccgcattggtcttctttttggtggtttcactggatcttatcatgctcttagatgcttgttgcggaaattgagaaagaaagagacaccggctaatgcagttttagcaggttctatagctggtttctcgattatggcattgaatgattcaaataggagacgtacactggctttatacctgttggctaggctagcccagtgtgcttataattctgcaaaatctaaaaacaagtttcacctttgggggagtcattggagacatggagattcattgctgtttgcccttgcttgtgcacaggttatgtatgcctttgtaatgcgtcctgagagcttgccaaaatcctatcaagacttcattcaaaagaccgggccagttgcagagcctgtatacaaggctgtaagggatagctgtagaggtcatccagttgatgttgcgtcactgcatgcttatttatctcgtgtaggaagatctgactatgtaaagttggaagaatttccctccattattccatgttccattattcatccagcaacaaattcatgcttagctcatcaaggaaatgcaacatcattaacgtttaagaaaacatttccgctttacttctctttgacctttgtgccttttgttgttctgcacctacagaagttcactgatgctcctttccgcactttctggcttgccattaaaggtgctgttcgctcgacaacctttttatccgcttttgttggaatctttcagggagtcatatgttcacatagaaaagttttttcaagagatcacaagcttgtatattggatagcaggtggaatagctgccctatctgtgctattggagaaaaaagctaggcgtggtgagctagctttatatgttcttcccagagcagtagattcattgtggtatatcttggtgaacaggcaccttcttccaaatatcaggaatgctgaggttttcttgttttctctgtgtatggggggaatcatgtattacctggaacacgaaccagaaaccatggccccatttcttcgaggcttgatccgtcgcttccttgccagcagaatcagcaatccaagcccacctaatcggactgcttcctacacatacctgcaagctcttgatggcataacgaaaccaacattacaggagaagagggatactgaatcttccgaaaagtacaaccttgaatctattcctgggctttaacgttgtttttttgggttgggtaggttaataggttatcttgtatcgggagccagattcaatatttggctccccatttttttattgattgctaatgaaggtgctctcaatgttaggtgttttaaagcttttataattatgtgagaaagtaaataaataaaaagaacatgatctgatgatgtcttc

SEQ ID NO: 29397 - DNA, 1442 bp, Glycine max
  Clone ID: UC-GMFLMINSOY031D07_FLI
gtacactgtttgtaggcaggggagtgttgcgttggacaaggctcttggcgttgaaggtgaggataagaaagctcctaagcagagcgttatcattgtgtctgagttcattgggtgttccccttcgctcagtggagccatcagggtgaatccgtggaacattgatgatgtcgctgaggctatgaattcggctgttacaatgtcggaggcagagaagcatctgcgccacgagaagcattacaagtacataagctctcatgatgtggcgtactgggctaggagttttgatcaggacttagatagagcttgtagggagcattactctaagaggtattggggtgttggattgggtttggggtttagaattgttgctttggatcctacctttaggaagctctctgtggatcacattgcctcagcatatagagatacacacagtcgattgatccttttggactacgatggcacaatgatgccgcaggcaacaataaacaagactccaagcagggaagttattgctgtcttgaattatttatgcagtgatcctgaaaacatggtgttcattgtgagcggcagggataaggattgcttgggcaagtggttttctccgtgtgagaaattgggtctctctgctgagcacggttacttcactaggtggagcaaggattctccttgggagacttgcggattggcgactgattttgaatggaaaatgattgcagaacctgtgatgtcgctttatacagaagcaactgatggttccttcattgaacataaggaaagcgcaatggtttggcaccatcaagaagcggatccttattttggatcatgccaagctaaagagcttcttgatcatctggagagtgtgcttgccaatgagccagtagtggttataagaggacaacatatagttgaagttaaacctcagggtgtgagcaagggtaaagtggtggaagaccttatctcaatcatgcgaagtaaggggaagtcaccagattttctactgtgcataggagatgatcgctcagatgaagatatgtttgaaagcattgctcgttcagcatctaatccagctcttcccaccataccaaaagtgtttgcttgcactgttggacagaaaccaagtatggctgaatactatttggatgatactagcgaagtaatgaagttacttgaaggacttgcaaccgcttcagcaccatctgcgtccatagcttctcaggaattgtgaggaacattatagaaactgacacagaaaaacaatcttgtacagaatgatactttcatagctggattttaaaaggtctatatttagaaatttacagattagctgattcatgttcttcataacttgcagtaaaaaattcttttttttttttatgacaaggattatgactttctgcaccgttcaatgaaaacatgcgtaacagcaatctttcaacaat

SEQ ID NO: 29398 - DNA, 1785 bp, Glycine max
  Clone ID: UC-GMFLMINSOY031D08_FLI
ggtttctctggtgtcttgtgtacaaaatttccccaaaagccggggtcctgtggtgggaattctaaagggctttgctgggttgagtggtgcaatcttgactcagatatatgcactgttccattcccctaatcaagcatcattaatatttatggttgctgttggtccatcattggtaggaataggtcttatgttcattgttaggcctgttggaggtcacaaacaagttaggccatcagatggaaaatgcttcacattgatctatggtgtgtgcctcctgttggctgcatatttgttgggagtcatggttgtccaagatttggttgaagtgagtgaaactgtaatctcaatattcacaggggttctcttgttgatcctccttgtcccaattgttattcccattacattgacttttggcccagagcaaaggcatccggaggaagaggcacttcttccaccaccacagaataaagaagcagggaaatctcagctggattctgatgaagtgatactgagcgagttggaagatgagaagcctaaggaagtggacatgctccctgcatcagagaggcagaaacgtatcgcgcacttgcaacaaagactgctccaagcagctgcagaaggagcagtgagggttaagagaaggagaggaccacacagaggggaagatttcaccttgacacaagcattgatcaaagcagacttttggcttcttttcatttccatgatcatgggttctggatccggattgactgtaatcgacaatctgggtcagatgagccagtctctaggattcgacaatgcacatatatttgtttccatgatcagtatttggaacttccttggccgtgtcggaggaggttacatatctgagcttgttgtgagggatcatgcatatccaaggccagttgcattggctgtatttcaactcattatgactcttgggcatgttttccttggtatgggatggccagggtcaatgtatgttggcacgttactagttggacttggttatggagctcattgggcaattgttccagctacagcctcagagttgtttggtttgagaaactttggtgctttgtacaatttcattactatagcaaaccctgcaggaaccctggttttctctagtctcattgccagcaccatctatgatgctgaagcagagaaacaacatcgccaaaatatgattttgcaagtgctgaatgccagtgagcctctaaagtgcgaaggttccgtatgctttttcctaacatccatgatcatggcaggattatgcgttgttggagcaggcctatgcatggttctggtgttaagaacaagaattgtttatgccaacctatatggaaaagcttcttctagcagacttcgattatgagagtttgggctgtgtattttggtgtctgtatacttgagaaatcagtgttgctgattttaattcaagaatgattgaagaagctgagccaatcatctgatctgaatccgtctccagtgagtgtggaaagccaaagaagggataattttactcaaaacaaaaggagaaaaaaaaagtgtgttttgtcaaatctgtgtattcttttccatttttgttgtgttatattctttccttttgcaagtaaaagtttgattggcattgaaatttgacactcagaggtattgcaaaatatttcacttgttttgttgctaagaaagcaaaagaagctgttctcgttagtggtagtcctaagattatgtactgtattttttttattaaaaattttgatgggatattccacaagtatcatc

SEQ ID NO: 29399 - DNA, 2281 bp, Glycine max
  Clone ID: UC-GMFLMINSOY031E04_FLI
atatgagagctgggatgatccggaggtcccaaagtttcactatggatctcattattctagtgctggaattgtcctattctatcttctccgcctacccccattcagtacagagaatcaaaaacttcagggtggccagtttgaccatgctgatcgccttttcaatagcataaaggatacttggcttagtgctgctgggaagggaaacacatctgatgtgaaggaattgattccagaatttttctacatgcccgagttcttggagaatcaattcaatcttgacttgggagagaaacagtctggcgagaaggttggggatgttgtcctacctctatgggccaaaggtagtgctcgagagttcatcagtaagcatagggaagctcttgaatcagattatgtctcagaaaatttgcatcactggatagacctcatttttggatataagcaaagagggaaggctgctgaggaatcagttaatgtgttctatcattatacatatgaagggagtgtagacatagactcggttacagatcctgcaatgaaagcatccattttagcacaaattaatcattttgggcagacacctaaacaactattcctcaagccccatgtgaaaagacgaactgacagaaaacttcctccccatccccttaagcattcctgtcatcttgctgcacatgagattcgcaaaagttcttcacctatcactcaaattgtcactcttaatgataaaattctcatagctggaactaacaatttgctaaaaccaagaacatataccaaatatgtggcttggggttttcctgatcatagcttgagatttattagctacgaacaagataaacttctttcaacacatgaaaatttacatggaggcaatcaaattcagtgcgctagtgttagtcatgatggtcatattctggttacaggggctgatgatgggctagttaatgtatggagagttagcaagtttgggccccgtgccttacgtcgcttgaagttggagaagccactttgtggtcacacaggcaaaattacatgccttcaggttagccagccttacatgcttattgtgagtggatcagatgattgcacggtcattatatgggatctcagctccatggcatttgtacggcagctcccagaatttccagcaccagtttcagcaatttatgttaatgacttgaccggagagattgttacagcagctggtattcttctggctgtttggagtataaatggggattgcctggcaatgatcaaagcatcacaactgccatcagattccattctctctgtgacaagcagtacgttttctgattggttggacacaaagtggtatgcaacaggtcatcagagtggagctgtcaaggtgtggcagatgattcactgctccaacccagataactcccttagcaaatcaggttttggtgggtcgggaggtttaaatcttggtggattagaaccagaatacaagttggtcctacgcaaagtgctaaagtttcataagcattcggttactgcccttcacctcacaactgacctgaaacagttattgagtggggattcaggcgggcatttgctttcctggacactgcctgaagagagtctgcgaggttcattaaatcaggggtgagactggtaaaagatggttcgttctgctgacttcagcttttggccagcctttaatttgttgaatcctaccattggcttgagtggatctcaattgttgaaagatggattcatgttcataattcgagagaattgcaaaagaatgctggccagattgaaacagagcaagcaaggttgcaaaagaaaagatggtatcacagcgtatagagggctatgaaactatatgcgtgtaagagtacaatatattcactaggtgggtgaagaagcatctgtcaagtaagatggatttttggtggaagaggagaaagcaaatgttgcccgcggttttgtattttgggtgactggcggagaatattttgattttgccagagaagtctactgttttttctttgatgtaaatatgtgattttagtgtgtaattaaggtgtatagtaaaagggtagtcatgaaatggattgtgattgcaatgataggcccaatgtgaggtatgatcgtggcattagtgcaatcctttatctggaattctttttacatgttgacattggggcatttcttttattgagcccctgaaagaaaacaaggacactaagaaggtcattgcctgtgatttgtacattttttttttataaatattcctcccatttagttattt

SEQ ID NO: 29400 - DNA, 1951 bp, Glycine max
  Clone ID: UC-GMFLMINSOY031G02_FLI
cactgaccctcaccatcacgtatctgccaccaaaccccacaaacacagtattcccaacttgtttttattatttatacggtaaacaaaacacaacacaccaacatcatttgatcatactcattgctgttcaccattttcaattcattcctgtgttagattccaagtggtttggtttggtttgacataaataaacctttcaagatctcagaggggcagaagatcaaagccaagacaacacactctcatatataaaagagtgtctctgataatttgatctttgtttcttctctttctctcctttgagatttttcagcaccccaccaaggttttgtccgaaaagcttgaatttttcgcctaccctttacaatgatctcttcattgagacaacctgttgtagggatcagtggttctgatcttcttttgaggcaaagacatgcaaccctaattaaggcaaggtcctttttaccctctttgtcaagagaaaagggtcaaagatctcttgtttcagttcaaaagccacttcacattgctgcttctcttggtgttggaaattttgtgtcagtgaagagtgatgatgacaaaaggggtgatttggtgaagtgtgaggcctatgaagcagacagatcagaggttgagggtgcaagcacaccatcagaagctgcaaagaaggtgaaaattgggatatattttgcaacctggtgggctttgaatgtggtgttcaatatttataacaagaaggttttgaatgcttacccttacccttggcttacttcaactctctcacttgcatgtgggtctcttatgatgttgatctcttgggccactgggattgctgaagccccaaagactgatcctgagttttggaagtctttgttccctgttgctgttgcacatacaattggacatgtagcggcaacagttagcatgtcaaaagttgcggtatcattcacacacattatcaagagtggtgaacctgcttttagtgttctggtttcaagatttcttttgggtgagagctttcctgtgccagtctatctgtctttaattccaatcattggtggatgtgcacttgctgctgtgactgagctcaatttcaatatgatcggttttatgggggccatgatatcgaatttggcatttgtattccgtaatatcttttcgaaaaagggcatgaagggaaagtctgttagtggaatgaattactacgcatgtttatctattttatctcttgctattctcacacccttcgcaattgctgtggaaggaccgcaaatgtgggctgctggatggcaaacagccatgtctcaaattggaccccaattcatatggtggctagctgctcaaagtgtattctatcatctatacaatcaagtgtcatacatgtctctggatcagatctctcctttgacgtttagcattggaaacaccatgaaacgtatatctgtcattgtgtcttccattattatcttccacacaccagttcaacccatcaatgctcttggtgccgccattgctatccttggaaccttcttgtattcacaggcgaaactatagagttggggaactaagattcctctagggacttgtttgttacagttcttcatgctcaaccagggacaaggaagttgattttgtaatgtgtcactgctggatttttgtaatactaggatgatctggctatcagtccatctgtagatataataataaaaataatgctgctgaggaaacattatcataatacagatgattaggtaggttttatttatttttttggaatttcagaaatgccaatgatttaaaataaatgcgttttgtttataatttagtctgagaagaatttctcaaaaacattgtttactataaggagcttgcaataatgtgatgctgtgataatttttatgctcacttgtcatgattcacataaatatataaatgtttgatgttgttagtt

SEQ ID NO: 29401 - DNA, 877 bp, Glycine max
  Clone ID: UC-GMFLMINSOY032A06_FLI
caaagaaccactaagttggagtactcgaatgaagattgctgttggagctgctcgtggccttgaatatctccattgtaaagcagatccacctgttatctacagggacttgaaatctgcaaacatcttgttagataatgaattcaacccaaaactgtcagattttgggcttgctaaacttggacctgttggagacaatacccatgtttcaaccagagtgatgggaacatatggttactgtgcgccagagtatgccatgagcggcaaattaactcttaaatctgatatatatagctttggtgtggttttgttggagttgatcactggacgtagggcaatagatactaatagaagaccaggagagcaaaacttggtttcatggtctcgtcaatttttcagtgaccggaaaaagtttgtacaaatggttgaccctctgttacacgaaaacttccccgtgcgctgtttgcatcaggcaatggctataactgctatgtgtatccaggagcaaccgaaattccgtccacttattggtgatattgttgttgcactggaatacctagcttctcatagtaatccctgaagtccatagacatggtgggcgcagctcaccacaacagtcaccttcagaaatggacaggatttaatattcaaaggtatctgattctagcttgagttccattttgtatgattttgggtgcagatttccttaccggtttggtcagtgtaagctaccaacttggctatttaaagtgttatgtgttattgctttaattaacttattgccacagcagtagtgaagataaacttcttgatatagcagtagtaaacatgtgaattgatttaattgcaatggacatgagtttatgcttgtttaggcttt

SEQ ID NO: 29402 - DNA, 2342 bp, Glycine max
  Clone ID: UC-GMFLMINSOY032B07_FLI
cttttattgtgcttcaggtgctttcagattctgaaacagtccggtggttgaaccatgcagttgaaaacatatggccaatatgtatggaaaacattgtctctcagaagatattattccctatcataccgtggttcttagagaagtacaaaccttggactgctaaagaagctgtcgttcagcacctatacatgggaagaaacccacctttgatcactgaagttagggttcttcgccagagtgatgatgatcacttggttctggagttaggaatgaattttctcacagctgatgatatgagtgcaatacttgctgtgaaactaagaaaaagattgggctttggaatgtgggcaaaactgcacatcacgggaatgcatgttgaagggaaggtcttagttggggtgaagtttctcccaacatggccttttattggccgtttgcgtgtatgctttgttgaacctccatattttcaaatgactgtcaaacctatgtttactcatgggcttgatgtgactgaacttccaggcattgctgggtggctagataagctgctgtctattgcttttgaacagacccttgttgagcccaacatgctggttgttgatgttgagaaatttgtttcaccacaacaagagtcttggttcaaagtgaatgagaaggagcctgttgcttatgcaaaagtggaagttattgaagcatctgagatgaagccatctgatctaaatggattagcggatccttatgtgaaaggtcaaatgggtgtatacagattcaggacaaagatacaaaggaaaacacttactccaaaatggcacgaggaatttaaagttcccatcataacatgggagtctgataacgtgctggttattgcagttcgtgacaaggaccatttctatgatgatatccttggggactgtaccgtgaacatcaatgaatttagggatgggcaaagacatgatatgtggctgtcacttaagaacatgaaaatggggaggttgcgtttggcaataactattcttgaagataatggaaagggagttgatactactacacgtgaccaggaaacaatggactttgaagaacgaaaaatctcctttgaagcaaatgagactactgataatagttccttctcacctgttccacctgaaaaatctgagaagttggcagataactatgagcctatagacatcgacgggcaaaaagagacaggagtttgggttcatcacccaggaagtgaagtttcccaaaggtgggagcctaggaaagggaagagtcggcgccttgatacagaaattcatggggagcctaatgattcagttggcagtggtaattcaactgtatcaggatccttgaacaatgacagcagcagtcctgataataatcctgaagaaaagcatcgaatgagaacggttaggaagggccttcacaagattggttcagtattccaccggagtaaaagaagggagggtttttcaggttctgttgatgaggagattctgtctccacatgataacattaggtcagagaatgctaaggggatgattgctgtgaagtttgtcatggacgagaacatttccggctttcaaactggtaaggttcaggcagaagggggatcaacagaagggagtggtcctgagagccctgccagtgccaagggaaatgtgaaggatatggcgaagaatatttttaaacatgcagaaaaatcggctcgtggcttgaggcacgttctttcttgtaaatcaaggaaattgaaatttaaaggtgagtctccaacagttccagaaagagaacatgaatctgactcttctgacgaggaatctattgcagctcaatctcccatagatgtaataagaactccagttggttctcatgctgtggtctcaggtagcaatggttcccctggttctggggtgaacgtggttcaaatagttccatcaaacactaatttggacaatgaagccacagctaaaatcacgaatgaaaaagatgaccctgaaaatgcatgctcccctgacaggtctagccaagaagttgttaaatctgctgaagtggagcatgataaagaggaaatgggggcacagataaaagagattctatcggtttgtcctactgaagaaagtttcaagtagcatatagcatattttctccagcatttcatacccgtgttcttatatacagtcttccaagtgagtgtttctacagtacttggcagattttgattgtagtaatagtcctgtgatcgtcatagaccgttttacataaacatgttcatgtttcaggtgctgtagtttgtaagcatgtaaataactttatacaaggaataaaaaagaaaaggttttcaatct

SEQ ID NO: 29403 - DNA, 913 bp, Glycine max
  Clone ID: UC-GMFLMINSOY032C09_FLI
ctttttttcaatcattttctattattaattaaaatttattaaaaataacaagtttaagtgaatcacacttttaaatctttcctaatcttgtaatttttaatcaactttattcaatagtatagttgttagaaagagtgtagagattgttttgctagcagttagcaccactttttatgctatatatataacccagttaagtctgtcctaattataatataaattaagcactaataaatactgtgatttatgaaataggtttttggtgctgcatggaaatccgttttcacagctgatgagaaagagcgtgagaagaatgttgaggaagcaattgaggctctgcagtttcttgagaatgagataaaggacaagaagttctttggaggagaggagattgggttggtagatattgctgctgtctacatagcattttgggtccctatggttcaagaaattgcagggttggagttattcacaagtgagaaatttcctaagctccacaattggagccaagaatttttgaaccatccaattgtcaaagaaagtctgccccctagagatcctgttttctcctttttcaagggtctctatgaaagcctttttggttcaaaatagatttgatgatgtggtgtgagacttagtatttctaagaattatgtgtttgttaaaggcttctatgaaagcctcactgcttcaaaatagattcatgtatgtgagactcagaatctctggggaaaattgtgtgtggtgtggactacttgttttgtttgtcattgagctatatcgctgttaattaggattttgtttcaaaatgatgcttataagttgtaatctaggatttctccctttgaaatcctaggttgttcttgacatttgctatttcaaagaataaatatatagcatctttctatttctc

SEQ ID NO: 29404 - DNA, 1611 bp, Glycine max
  Clone ID: UC-GMFLMINSOY032D03_FLI
gttttagcttcttcctcttcacttcgttctttttcgcctctacaatgagcaacgacaaggacacattcaacgtcgccgatctcacttctgctctcaacgaggacaatagagcagaccttgtcaatgctcttaaggttagtattttctttattctttctctgtgaagttgatattgagatttgaatttctcaatttttacaagttcattttactgtttgcattgtgtgtatttttttttttcaatgtttaattgtgagcagagcaagatacagagtttggctggacaacactcggatattctagagtctctgtcgcccaatgtccgaaagcgtgttgaggttcttagagagatccagggccaacatgatgaattagaggctaaattttttgaagagagagcagctctcgaggccaaataccaaaaattgtatcaaccactttacacaaagcggtacgaaatagtaaatggtactacggaagttgaagaaggggcagtgaaagaaacagcacctgataatgaagaggatcaagagaaaggagtgcctgcattttggcttactgctatgaaaaacaatgaagtgttggctgaggagatttcagagcgtgacgaaggtgctcttaagtatctcaaagatatcaagtggagcaggatagaaaaccctaaaggattcaagcttgactttttctttgataccaacccttattttaccaattctgtcttgacaaaaacatatcatatgattgatgaggatgaaccaatattggagaaagcaattgggactgaaattcaatggcacccaggaaaatgtctgacacagaagattcttaagaaaaaacctaagaagggttcgaagaatgctaaaccaattaccaaaactgaaaattgtgaaagcttcttcaatttcttcaaccccccgcaagttcctgaagatgatgaagacattgatgaagatgtggctgaggaacttcagaatcagatggaacaagactatgacatagggtccacaataagagacaagattattccccatgctgtatcatggtttactggggaggccattcagggggacgagtttggagatctggaggacgatgaggatgatgaagatattgaagaggacgatgatgaagatgaagaggacgatgacgatgatgatgatgacgatgatgatgaggaagagagcaagaccaaaaagaagtcatcagcacctaagaagagtggaagagcacaacttggtgatggccagcagggtgagcgacctccagagtgcaagcagcagtagaagtatttatgcagaatgtcatttatgtagttgagttttgttggtgttcgagaatgtcctaatgtgaaagtgggtttcatgttgttttttaatgtttcttaaattgattttcctccctatatcttggcagtccgaatttgttgcgagtcccttctcttattttgcgcctggtagagagaatgtggttataggtagagatgctgtgatttgtttatgctggaatttgtactgccatcagtatacttgattatagtttgtgcgccaactagtaatttttgctgttataagaacttgattatagctcgatcaacattgttttaagtattgg

SEQ ID NO: 29405 - DNA, 3160 bp, Glycine max
  Clone ID: UC-GMFLMINSOY032F12_FLI
ggaaaggtgaaagctgttccttcgggggattgcgtggtcatcatggccatgcctaccggcaaacctggtcctttgcctgaaaagtccatcacgttatcatctctaatggctcctagactggcgcgtagaggtggtgtagatgagccgtttgcgtgggaaagtagagagtttctacggaagctttgcattgggaaggaggtggccttcagagttgactacactgtgccatcgataaatcgtgactttggcacagtttttattggggataagaatgttgcaatgctggttgtttctgcaggatgggccaagataagagagcaagggcaacagaagggcgaggcaagtccttacctagcagaattgttacggttggaagaacaagctaaacaagaaggccttggtcgttggagcaagattcctggtgctgctgaggcatccatcagaaatctacctccatcggccattggtgactctagcaactttaatgctagggctttattagatgctaacaagggcagtcccatggaaggaattgttgagcaggctcgcgatggcagtaccctacgcgtctatttgctcccagaatttcagtttgtccaagtttttgttgctggaattcaggccccacaaatgggaaggagagctgtacctgaaagtgctactgaatcagaggttacagctgatgcgactaatggagatgtacctggggaacctcgagccccactaacatctgcccaaagacttgcagcctccacatctgcattggcatctgcatctgctgaaactactgctgatccttttgcacatgaagctaaatttttcactgagattagagtattgaaccgagatgttcggattgtcctggaaggtgttgataagtacaacaatttgattgggtcagtgtattatcctgatggtgactcagcaaaagacctggcattggagcttatggaaaatggctttgccaaatatgttgaatggagtgcaaatatgatggaagaagaggcaaagcggaagctgaagacttcagagcttcaggcaaagaaaaacaggttaaagatttggacaaactatgtaccaccagcaacaaattcaaaggcaatacatgaccagaattttacaggaaaggtggttgaggttgttagtggagattgcatcattgttgctgatgattcgattccatatggcagtccactagcagagcggcgagtcaacctttcaagtattaggtgtccaaaagtgggcaatcctcgtagagatgaaaaaccagctccatatgctcgcgaagcaaaggagttcttgagaacacgcctcattggtcgtcaagtaaacgttcaaatggagtattctagaaaggttggtccagcagatggatctgctgttccatcaggagctcctgaagctagagcaatggattttggatcagtattcctacccagcactgttaaggctgatggtgttgatgccccttcatctgttccaccagctggaagtcagcaaaatggggtgaatgttggggagttgatagttagccgtggctttggaactgtcattagacaccgcgactttgaagagagatcaaactactatgatgctcttcttactgctgaatcacgtgctatttctggaaaaaaagggatccattctgccaaggattctccagccatgcatataactgacttgaccacagcatcagcaaagaaagccaaagatttcttgcctttccttcaccgaagtagaaaaatccctgctgttgtggaatatgtccttggtggccatcgctttaaattgttaattccaaaagaaacttgcagtattgccttttcattttctggtgtcagatgtcctggtcgcgatgagccatattctgacgaagccatcgcactcatgaggcggaaaataatgcagagagatgttgagattgaggtagagactgttgaccgaactggaactttcttgggttccttatgggagtcaaggaccaatatggcaattacactgctcgaagctggtcttgcaaagctgcaaacctcctttggcagtgacagaattcctgattttcatcttctggagcaagccgaacaatctgccaagaagcaaaagctgaaaatttgggagaattatgttgaaggggaggaagtatctaatggtgcacctgttgagaacaaacagcaagaagtgctcaaggtgtcagtaacagaagtattgggtggaggtaaattctatgtccagcctgttggggatcaaaggatagcatccgttcagcaacagctttcttttttgaaccttcaagaagctcctctgcttggagctttcaatcctaagaagggtgacatggtcctttgtctttttggtgctgataaatcttggtatcgggcaatggtagtcaatggacctcgaggacctgttgaatcttcaaatgacatgtttgaagtattctacattgattatggaaatcaagaagtagtaccttactctcagctacggcctattgatccatctgtatctgctgctcctggtattgcacaattgtgcagccttgcttatgtgaaggtcccaaacttggaagaggattttggtgaagaagcagctgaatatttgagcgaactcactttaaacagtggcaaagagtttagggccaaggtcgaggagagagatacgtcaggagggaaagcaaaagggcagggtactgggccagtgcttgcggtaacgcttgttgctgtagattctgatatcagtgttaatgctgccatgctacaggaaggacttgctaggctagaaaaaaggaataggtgggacagaaaagaaagacaacaggcccttgataacttggatccgttccagggcgaagctcggaccaataggtgcgggatgtggcagtatggagatatccagtctgatgatgaggacactgctcctcctgctagaaaggctggtggtagaaagtgagtgtattttaagaggggcgataagttataaaatagacattttctaagaaaatgaacaagttataggcatgaacattttacttcaaggtagtggaaaaaaatgccatatgtaatccttagtaagttttgttttgttttaaattttgttggtaggctgagacaattttttgaacagatgttataataaaaggtgcatgtggcaggtgtttcat

SEQ ID NO: 29406 - DNA, 3611 bp, Glycine max
  Clone ID: UC-GMFLMINSOY034B02_FLI
gcttgtcgcattttgagtctctgtgggtcttttggggctctctctctcgccgagctccgcactcttcagggaatttcctcactcagattccagctgaaaattgcgcagtgagttcacttcaaattcagagatgattaattgaagttttttgcaataatagttcaataactgattcctgtctctaattctgaagttattacttttaaaggtttaatggctgtgtcatgacttttgtaactttgcctactgaagtgaaatgatagattttttgaactcttactgggatccttctaagaaacttgcgtgccacatctcaatttataaaatacaaatatgcttacatggtggggaaaatcatcatcaaaagaaaccaagaagaaagcaaataaggaaagtttctttgacacactgcaccgaaaacttagaatttcatccaaaggtaaagtaagcattagatctggaggatcacgtagacattgcaatgacacaatttcagagaagggagatcattctccatgtggatcaagatcgccttcaccttccaaagtggcaaggtgtcaaagttttattgataggcctcatgctcagccacttccacttcctggtctgcatccttcaagtgtaggccgagtagattctgaaattagcatatcatcaaaatcaagattggaaaaagtctccaagccattatcgtttcttacgcttccaacacctggatgcatacgttgtaggccaaaccctgcagatttggatggagatatggtcactgcttcagtctttagtgattgctctgctgacagtgatgagccggcagactcacacaatcgtagtcctctagcaattgactgtgagactgggactagaactgctgctggcagtccttccagcttaatgctcaaggatcaaccacctgctgtttcccaactgaattcaacgggagtaaagaaaccaggaaatattctaagtaatcatatgtcttctacttcaccaaaacgtaggcctttacgcaaccatgttccaaatcttcaggttcctcctcatggtgccttctatagtgctcctgatagttccttgtcaagtccatcaagaagtccattgagggcatttggcacagatcaggtgttgaattctgcttttttggctggaaagccatatccagagatcaattttgttgggtctgggcattgctctagtccaggttcaggtcacaattctgggcacaattcaatgggaggggacatgtcaggaccgttactttggcaaccaagcaggggtagccctgagtattctccagtacctagtcccagaatgactagccctggtccaagctctagaattcagagtggagcagtcacacctattcatcccaaagccgggggaacacccacagaatcacagactcatcgattgcctcttcctcctttgtcagtttctaattcctcactgttctctcattcaaattctgcagcaacatctccgtctatgccaagaagtccagctagagcagataatccaaactctggctcacgttggaagaaagggaagctgcttggcagcggctcatttggacatgtctatcttggcttcaatagtgaaagaggcgaaatgtgtgcagtgaaggaggttaccctgttttcagatgatcccaagtctatggaaagtgcgaagcaatttatgcaggaaattcatttattaagccgcttacagcatccaaatattgtccagtattatggttctgaaacagtcgataacaagctttacatataccttgagtatgtatctggaggctccatacataaacttcttcgagaatatgggcaatttggtgaactagttattcgtagttatactcaacaaattttgtcagggcttgcttatttgcatgctaaaaatactctccatagggatatcaaaggagcaaatatactggtagatccaactggtcgggtcaagttggcagactttggcatggcaaaacatataacagggcaatcgtgcccattgtcattcaagggaacaccttactggatggctcctgaggttataaaaaattctaatggatgcaaccttgcggtggatatatggagtcttggatgcacagttttggaaatggctacaaccaaacctccttggtttcagtatgaaggggttgctgccatgttcaagattggtaatagcaaggaactcccaaccatccctgatcatctctcaaatgaaggaaaagattttgttaggaaatgtcttcagcgtaacccacatgatcgtccttcagccagtgaattgttggaccacccctttgtaaaaaatgctgcacctttggaaagacctattccggctcctgaagctttggaccctgtttctgggattacacagggagcaaaagctctggctattggacaaggaaggaatctttctagcttggattcagatagactttctgttcattcttctagatttttgaaaactaatcctcatgaaagtgaaatccatattccaaggaatatatcttgccctgtttctcccattggaagcccacttttgaggtcaagatcaccacagcacaggaatgggaaaatgtctccttctcctatatctagccctcggactgcttctggggcatctacacctcttgctggtggcagtggtgccattccatttggtaatcactctaaacagtccatttactttcaagagggttttggaagcattcccaagtcctcaaatggtgtctacatgaatggccattctcatcacgactcgaatgttgacatttttcgaggaatgcaaatggggtctcacatttcaccagaactggtttccagtgaaaatgatgttttggttaagcagtttgcaaggcatcctcatgcagagccatatgattttcagtcggtcttggcagatcgtgttggccggcagctgctgggggaacatgttaagattaacccatccattgatctcagtcccaactcgtctttgcttagccggccaaacggtttatgacatcaagatttttcctaaagtttctcataatacctttggttagcagatctgttcattgttctatttgcaagaatataactatacaataaggagccaaagcacaagagaatcaatgtaaataaatttgtatccaagaataggctacatggggcacaaaagtgcattttgcatggcttcggctcgggctgatggagttcattcgtgccacagcattaaacattctgacaatttgtccatatcaagcaatcaactcatacaaatgctcacttgttcgaagaggaacttcttgttgtatgtaacatatttaaagcatcaacgcatgagaggtttctctcctgcacttaagatactagaaatgacagtttatgcaatgacaaatgcatcttctagaattggaacaccatatagatgccagagaaagggttaaattgatacaaaacttaacttgcagacttttttttgggaggttagacattgctgtacggtagatgggaaactgtattgtgatcatgcatttatggatggggaagtcaaggtttgtagagagtccatgcatgatgcatgttatgtttaattgtgggagatgaagtattattgtcattgtatagtct

SEQ ID NO: 29407 - DNA, 776 bp, Glycine max
  Clone ID: UC-GMFLMINSOY034E05_FLI
tgctatctcaatgctgagtgagcaaggtaaggtgcaggaggctttctttattattcaaagcttgggtagtaaacaaaacttccctatgcatgatttttacaagaatttgattgcaagcctgtgtaggaaagggaacacatatccagcctttcagatgttatatgaaatgacaaagtatggattcactccagattcttacacttattcatctcttataagaggaatgtgtagggagggaatgctagatgaggctcttaagatattcaggattttggaagaaaatgaccacaggcccgatattgataactacaatgcacttatacttggtttttgcaaagctcagagaacagacttgtcaatagagatatttctgatgatggttaacaaaggatgtgtgcctaatgagaatacctataccattcttgtggaagggcttgcttttgaagaggagacagatatagcagctgatctgatgaaagagttatatttgaaaaaggttctgagccaaagtactgttgaaaggctttgcatgcaatacgacatcaaggaattaatagcaacagggcagtgacctgtactcccaaagtatataacagaaagtaagtagaggtacatcactgacttcatatatgaatggagttgttttctcaactagattgcctttagattttttattagtcaggtaaacaaaaggttcccgtatgcttggaattttggctgaatataatgtttagagatgaataatgaaaaaggttcgagcatataatttaatgctg

SEQ ID NO: 29408 - DNA, 1898 bp, Glycine max
  Clone ID: UC-GMFLMINSOY034F03_FLI
gaagaagaaacagaattgaattgaattgcgtttgcgccattgaaaatcggaagtaatggaattgcattgctccgtgaaaaaattggaaaacgagaaagcgtttgagtttctcggaggcgttcctcttctgcagaggcttccgagctcgtctctgaggaagatagctcaacttgtggatgtcaaacactgtgagccaggagagtatgttgttcgcgagggtgaacctggagatggcgtgtacttcatattggatggagaggtatgcttatatattcatgccatagaccttagagaaacaaaaccagacagccaggtttcattggattgcttgtggatttgtgtagagcagttttggctgaggttcttggatctgctagggccaatgatgaaaatcgaccagagttccaattgaaacaatatgactactttggttatggtttgtcaaacacagttcaccaggcagatgttgttgctttgtctaagctcacatgcttagtgcttccccatgtgcactcaacactgctgcagccaaagtctatctggagagcagaaaattctctccagacatgctcacctgtggagaatatattgcatttggagccccttgagtaataccctggaattcagccttaaattaaagcatttttttattctctttggaaggtagatatcttccaaggagttacccttccagatgctccaagatttggaaaggtgtttggggggcagatgattggacaggcactggctgcagcttcaaaatctgttgactgtcttaaggttgttcatagtttgcatgcctattttattcttgcgggggatttaaacaatggcgaagactttttggtcgtaagcactgaattttgcccaaaagataaggcaccaatattatatggacatcactaaagccaggagctccttcatgtaatttgatttcagcaaagaattatctaaaagagccttgttataataagctatgggtctgaactcctgcattgcaatagctcctatgcccaactcgaaagcatcacattcaacaatgaatggttttgagaaattagtgccaattacatatcaaattcaccgtctccgtgatggaaagagcttcgcttcaaggaaagtggatggaattcaaaagggaaatgtcatattcactctgatggcttcatttcaaaaagaagaatcagggatggtccaccaagaggtagctataccatctgtccctgctccagataagcttctgccgatggaagagctacgggagagacgtcttactgaccctcgtttaccaataacctatcggaacaaagtagctacatctcaattcatcccatggcccatagagatacgattatgtgaatatgaaactgcaacaaatatgacaaaatctcctcccagtttgagatactggtttagagccaagggaaaactttcagatgatcaagccttgcataggtgtgtggtggcatatgcttcagatctaatatttcttcaagtaagtttgaatcccccccgtgagaagggtttcaggacacgttctgttagtctggaccactcgtacgtacctgaatcctacagtatgtggtttcaccgatccgtaaaagctgatgactgggtgctatttgcgatctttactcctagtgcccatagtgcacgtgtctttgtcaccggccaaatgttcaatcagaagggagagcttcttgtatcattggttcaagaaggactagccaggaaaattaatcccggaaattcagccattaaatctatgttatgaactgctgaaaaatgcacagattagcatgtatccattttatagttttattttaaaaaaattccatgtatccatcaccataacatcttagtatctaaattatatatgtaaatttttgtattgctct

SEQ ID NO: 29409 - DNA, 1627 bp, Glycine max
  Clone ID: UC-GMFLMINSOY034F04_FLI
tgttcccatacatcacctggatcgctctcttgattttcatgcactatgtgctttgtatgctgttacggatgtagcacttgtcacatctttgagggatggaatgaatcttgtaagttatgaatttgtggcctgccaagataaaaagaaaggggttctcattctcagcgaatttgctggtgctgcacagtcacttggtgctggggctattctggtcaacccttggaacatcacagaagttgctactgcaattgccaaggctctgaatatgccatcggcagaacgagagaagagacataagcataactatgaacatgtaaaaactcacactgctcaggaatgggcagaaacttttgtaagtgaactaaatgatactgttgtcgaggcacagataaggacaaaacaagttccaccacggctcccaacagagactgcagttgaacgttatttgcagtcaaataatcggttgcttattttgggtttcaatggaactttaactgaaccagttgagagagaaggtgatcggtttaaagaaagggaactcactgtgcatccagaactgaaactgcccttggcagaattatgcagtgacccaaagaccacagttgttgttcttagtggaagtggtagagcagttctagatgaaaacttcaaagaatatgacatctggctggcagcagagaatgggatgtttttaaacccttcaaagggagaatggatgacaacaatgccagagcaactgaatatggaatgggttgacagtgtgaagcatgtttttgattacttcacggacagaacacctcgatcatattttgaagaaagggaagcttcacttgtatggagttacagacatgcagatgctgagtttggaagattgcaagcgagggacatgctgcagcatctctggacaggtccaatttctaatgcatctgttgacgttgttcaagggagccgatctgttgaggtgcgagctgctaatgttacaaagggagcagctattgaccgcattctaggtgagatagtccacagtaaattcatgacaacaccaattgattacgttctgtgtataggacattttctgacaaaggatgaagatatatacgccttttttgagccagagctaccttcaataggtgtgggtcttcaaagaagcaagggaacagaaggagtaaagtttccagttgagagggtatcgtcattgaagaacccagcaagtagaaatggagcagcaaagtcgtcatcccaaaaaaagggacaacgccctgtgtcaaataatgagaagaaaagaaacaatcatgtctgccgcgggccacgtcggctggctcccgaaaagatatcttggaatgtccttgacctgaagaaggagaattacttctcgtgtgccgttggacgaacacagaccaatgctcggtatacgcttggatcaccagatgaagttgttgcatttctcaaggaactagccaatgtctgagacttacccagcttcagaaattccctatattgccaacattgcaacttgccaaatttactctcttgtacacgatttgcttttattctacgggggcaccccataatcataacttcacatcctaacctttttagacaatataataatcaaattaattatcgt

SEQ ID NO: 29410 - DNA, 1545 bp, Glycine max
  Clone ID: uC-gmflminsoy034g10_FLI
gtttagcaacaaccaaaccctctctactctttcttcttctcttcgctagggttttagcttcttcctcttcacttcgttcttctggcctctacaatgagcaacgacaaggacaccttcaacgtcgctgatctcacttccgctctcaacgaggacaatagagcagaccttgtcaatgctctcaagagcaagatacagagtttggctggacagcattctgatattctagagtctctgtcgcccaatgtcaggaagcgtgtggaggttcttagagagatccagggtcaacatgatgaattagaggcaaaattttttgaggagagagcagctcttgaggccaaataccaaaaattgtatcaaccactttacacaaagcggtatgaaatagtaaatggtgctacggaagttgaagaaggggcagtgaaagaaacaacaccagatggtgaggaggatcaagagaaaggagtgcctgcattttggcttactgccatgaaaaacaatgaagtgttggctgaggagatttcagagcgtgatgaaggtgctcttaagtatctcaaagatatcaagtggagcaggatagaaaacccgaaaggattcaaacttgagtttttctttgacaccaacccttattttatcaattctgtcttgacaaaaacatatcatatgattgatgaggatgaaccaatattggagaaagcaattgggactgaaattcaatggcacccaggaaaatgcctgacacagaagattcttaagaaaaagcctaagaagggttcaaagaatgctaaaccaattaccaaaactgaaaattgtgaaagcttcttcaatttcttcaacccaccgcaagttcctgaagatgatgaagacattgatgaagatgcggctgaggaacttcagaatcagatggaacaagattatgacatagggtcaacaataagagacaagattattccccatgctgtatcatggtttactggggaggccattcagggggatgagtttggagatctggaggatgacgaggatgatgaagatattgaagaggatgatgatgaagaggaggaggaagatgaagatgacgatgatgacgaagatgatgaggaagaaagcaagactaaaaagaagtcatcagcacctaagaagagtggaagagcacagcttggtgatggccagcagggtgagcgacctccagagtgcaagcagcagtagatgcagaaggtcatttatgtagttgtctagttttgttggtgttcgagaatgtttgatgtgaaagtgggtttcatgttttaatgcttcttaagttgattttcctcactatatcttggtagttcgaatttgttgagagtcccttctcttattttgcgcctggtagagagaatgtggttataggtagagatgctgtgatttgtttatgttggaatttgtactgccgtgtcaggtatacttgaaatatagttcgtgctttcaactagtaatttttgctgttttaaagaactcgatctacattgttttacgtatttgaagggaagcctctgtaaaggtttatat

SEQ ID NO: 29411 - DNA, 2278 bp, Glycine max
  Clone ID: UC-GMFLMINSOY035A10_FLI
tttaattgcccgcaagcctttgtttgactgccacaacaatgtgaagatgtacatgaataccttgacttacttatccagtgacgcattctcatctatcccatcagaactggttcctgacttgcaaaggatgctttctccaaatgagtcttcaaggccaacagcaatggattttacaggctcaccattttttaggcatgacactaggttgcgtgctctacgcttccttgatcacatgcttgaaagagataacatgcagaagtcagagttcttaaaagcattgtcagatatgtggaaagattttgattcgcgcgtattgcgatataaggtccttccaccactttgtgcagagcttaggaatgtggtgatacagccaatgattttaccaatggttctaaccattgcagagtctcaggacaagaatgattttgagcaatcaacacttccagcccttgtccctgtccttagttctgctgctggtgagacactattactgcttgtgaagcatgctgagcttataataaacaagactagtcaagaacatttagtttcacatgttcttccaatgattgttcgggcctatgatgatactgatgctcgtttgcaagaagaggtcctgaaaaaatctgtatcccttgtcaaacaactagatgcccagctcgtgaaacaagtggttttgccccgtgttcatggattagcacttaaaacaacagttgcgacggttagagtcaatgcgctgttgtgcctaggagacatggttaatcaacttgataaacatgctgtcttggacatcttgcaaactattcaacgctgtactgctgttgaccgctcccctccaacccttatgtgtaccctaggggttgcaaattctattttcaagcagtatggagtagaatttgtagctgagcatgttcttccattgcttatacccctgctgactgctcaacaattgaatgttcaacagtttgccaaatatatgctctttgtcaaggatatgctccacaaaatagaagagaagcgaggagtggctgtgactgattctggaacgccagagataaaactatctcccgtggttaatggccttcaatctgaagccacgcggacaagcagcagctctgtacctgcttcaacaaaaaaacagctcttgggatgaagattggggtcccaaaccaaagggcactgcctcttcgatccagaattctattgatgcaaccagtcaatctatggcaggcaaccctgtggatcaagtaacatctttacaaaagcatttgtccttagcggctttatctgctaagcaaacagccaagtcatgtccgtcagtggatgtagaatggccacctcgtgcatcttctggtgttaccccacaatttggtgatactgaaaggcagacaatagcagcaggaacttcatccacatctaatcttgaatctgatgatccttttgctgattggcctccgcatcctaatggctcagtatcaggtggatctggaatatccaacaatggtactttaggaatgccactaaacaaagttgggtttaattcaatgacaagcacttcaagcaatatggctccccaaactagcaacagttggcctgttaattcccaaagttctgccgagtccattagtttgaactcaaggagtgctagttcaacaacgggtagcctgaatactggtggccttggacaacagaaatctcttgggttcctaaaacaaagccaagcttttccagcatcgaatgtttcatataataatgttcagtcaacagcaacagatcttggatcaatattttcttccaacaagaatgaacaaattgcacctaaacttgcaccacccccttcaaccactgtgggtagaggacgaggaagagggaggggagctgcttcaaccactcggtcctctcataccaagtcacatgctgagcagccaccccttttggatttgttgtgatagcttgcatctattgttgttcatgtattagggtgagttactgttgagattgtacattttatgcaacatcctgtgttgagtgcttgtgaagggagatttcaaaaaatcttgccaggcaacatgttttaagggacggctactctttgtaaaggttttgttgtatgttgcttagtctatagtgattttgcaaaatttggattaatatttttgatttttttgtcctcgcatcatacttcattcttagggcatcaggcaaagtgtattcagaaaagtcctgattactgtgactgggttgaaaataataaaggctgtcatgaagtaacttctgtacc

SEQ ID NO: 29412 - DNA, 880 bp, Glycine max
  Clone ID: UC-GMFLMINSOY035B11_FLI
gttgaccgccatagataatcttggtcagataggaacctcgcttagatacccaaagaaaactagaagcactttcgtgtccctagtaagcatttggaattatctgggaagggttttttctgggtttgtgtctgaacattttctacaaaagtacaagttccctcgtcctcttatgcttactttgactctgctcttatcatgtgttggtcaccttctgattgcctttgatgtgccaaatggcctttacgtggcttcggtgattattgggttttgttttggtgctcagtggcctttactttttgccatcatatccgagctttttggacttaaatattatgcaactttgtacaattttggaagcgtagcaagtccactaggactatatgtgcttaatgtgaagatgactgggtatctgtacgacaaagaagccaagaagcaacttgcagcgtcggggcttacaagagaggaagggcatgaattgaattgtgttggggtcaattgcttcaagttatctttcattattatcacagctgcaactttctttggtgccattgtttcactcattttggtggctaggacaagaaccttttacagaagtgacatatacaagagatacagggatgcagccacggaggcagaaactgaaatggcggagaaagattccaaacatgtggtgccagctcagacgtaggactaatggtaaaagatatacgatgttgcttgattagatcaatgttcaaacgataaattaattaattaataatgtagtcatacatgttggacaatatgtaatattcaacattatagtttgctacattttcttttcccttatgtatacttctcattttctttgtcacacaaaacgacgtgcaatttttttcgc

SEQ ID NO: 29413 - DNA, 707 bp, Glycine max
  Clone ID: UC-GMFLMINSOY035C02_FLI
cgcaaattgttttcttttgctgtcactgttgccgaatccctcactttctcactcctcagcaccattcaatctctttcctctactggcaataagcataacaacagaaagctattacccttacacagcacaagatggaacatgtgatgcatccaaggcaaatgacctagctgtatcaattgatggccatgagaatgtacctggtaacgatgaaaatgcattgctcaaagctgttgccaaccaacctgtttctgtagccattgatgccgggggatctgatttccagttctactccgagggagtatttactggtgattgtagcacggagctaaatcatggtgtggcgattgtggggtatggagcaactgttgatgggactagttactggatagtgaggaactcttggggaccagaatggggagaactgggttacatcagaatgcaaaggaacatatctaaaaaggagggactttgtggcatagctatgttggcttcctacccaatcaaaaactcctccaataatccaacaggaccttcatcatctcctaaagatgaactttgaagtttgaatgcttcccacaaaatcatactctaattagctttggttgttgttttctattagtatctcagattcaatgccagtgtatccatcaatatatttatgcttattacatcacaaagaaataaatattttatatgatttgagtgct

SEQ ID NO: 29414 - DNA, 1909 bp, Glycine max
  Clone ID: UC-GMFLMINSOY035C06_FLI
aaaccccaaaaggccaagggaaaacataagtgtgactttggtcgtagcaaatgcgtggtaccaaaaagatgcaattaaactattgaattggaagctgagttagtagtaatttgagagagagagagagactcatccacttcttccatttccacgccttcttcattcacacaacacaacataacacaaaaagctctccctagtatctagagacagaatttccaacacactcgcttctcagagcgcgtgcccttcaaacatgatcatcatccacttcttcctaggacctgtctcagattcttcatagaggagtactgctgctgatcactggatctttcaaatttggaatggtttgatgggaaacatgagttgcagcttcaaccagactgattcagttgagtgctgtgaagctgaaattcagaaggctgattctcaggaatctggtcctcccttgaagaagtcaaaaactgaaattttggcctctcaaaatgtagataactgtgaaatggaggaaagtgaggatagacttagtgacatgccggattgtattatccatcatatcttgtcatttatggaaacaaaggatgcaattcaaacttgtgttttatcgaagcggtggaggtacctttgggcttcagttccctgcctgaatttcagcagcaaatcattcatgcgattggttgactttaagaagtttgtgctgtgggtcctaaaccatcgcgattcttctcatgtcaaacttcttgtttactaccgttttggggtagattatgcgacagatcaaggtctattgaataaggttattgaatatgcagcatcacatggggtggaagaaatcaaaatcaatctccgggcaaaaactgctggcagaacctctggcagtccaccagttgaaattcctttttctttatttacttgccaatctttgaaaaagctcgagttaaaagattgccatcctacgaatgggtcatcatcccttttaggttgcaaatcattggacattttgcatctggaacagttttcaatgcatcctgttgcagctgacttttcaaatccatttgcaagtttggcagaactatttggttttacaactttgacaactctgcatctaaataacttcattctgtgttatacaggaactgactgtctggatccatttgctaattgtgtccatttgaagaatttgcacctaagtgaaatgtcctttaagtcagatttgaaccctaaggattttgtgatatctgctcctaaacttagtaacttgaatctgatgtgcaaccgctttaaatgcaagattgtagttgctgcaccacagctttccaatttcatttacttgtattctacaccttgtgccttttttgagtttcggcttccttctatggatggcttggtcattgatatacatgaaccacatgatcgattggaaaaatgtcgtcgaaggaaaaaagaggagactttacatggtttgatcaatatgttacagggacatcataatgcagaagctgttaaactatccttctgtacagttaaggttacttgtggagcgtcagcccttgtgaagccagcatgtttgccttctactaaattgaagtcattgaactttggagttggatcaacatataaaatcttcatcaacaaccttgaccatataacagcctacttccgcaattgttctcagcatgcagactttgagattgtgactgtttagaatgtattcaaaggatactttgcagaggaggtttggctcatgctgaggttaaagttaaccccaatacttggatccttatgatctgaaacaagaattagtgcttggtataatttgattgggaagaaactgggatatattcatatatgtggttgatttttgaaaaacaggctataatgaaatagaaattcaaatacttttttttgc

SEQ ID NO: 29415 - DNA, 1614 bp, Glycine max
  Clone ID: UC-GMFLMINSOY035C08_FLI
gaacccccttacttcaagagcatgaccatggatcctcctggacctcatggtgtaaaagatgcttattgcctactgaattttggtgacagtataaccactgatcatatttctccagctggaagcattcacaaggacagtcctgctgccaaataccttgttgagcatggggtggaacgcaaggacttcaattcttatggaagtcgtcgaggcaatgatgaggtgatggcaagggggacttttgccaacattcgtcttgttaacaagcttttgaatggggaagttggcccgaagacaattcacattccaacaggggaaaaactttatgtgtttgatgcagctacggtgagttatgtcctactcaaatatggcaattttttgtttactgctttatagcctttcaaatggcaaaacatactgtattagtgtattttatttttaatgatatttgctggtgctgatgtttttctatatttatttcaaaatactagcagagattcagagaatgtctttatgacaaaatctcttccaaatgctacatttgtaacatatccgtttacttccctctatgcatcaactatcgagtcttgtttgttcaaatagataatactaagggcatgtgaagattatctcttgatttggtagcaactctcctttaatgacgtggtggagggtattattgtggctctaaatccactgtgtactgtgcatgaaatacaattcccccttttcttctctcaagaaaaaagagaattagtgactcccattgtaccagagactgtgacaggccatcattttctaatcccctggaattgttctctcatgccagagatacaaggcttctgggcaagacaccattgtgctagctggagctgaatatggcagtggaagttctagagattgggctgccaagggtccaatgctactgggagtcaaagctgtgatagccaagagtttcgagagaattcatcgcagtaacttggtaggaatgggtatcattcctctttgcttcaaacccggtgaggatgcggacacattgggattaactggtcatgaacgttatacaattgaactaccaagtattatcaatgagattaggcctggccaagatgtgacagtcacaaccgataatggaaaatctttcacttgcacagcacgctttgacactgaggtaatttaaccttctcattgatgcattttttttatggtcgcatcgcatactagagcttcactgttgtattttcaggtcgaacttgcttacttcaaccacggaggcatacttccatatgtcataaggaacctcattaagcagtgaagccatagccgattgaaaattccaaggtcattgttcccatatgcttttaaagttgtaaaatgtgagaataattttctgagagataggaaaagatccctttttttagagggggatttcgacagttttcaagcttattaattattagaccagaccggtaaacggtgattcatttgattgtgcgataaccctgccccttgaaaatggggacaattgtgtaaaagccgacgtgaagtgtgaaccctgccaattgcgcgcggcactcggtctgctaatgcagtgttatggtagtgaaaatttctttc

SEQ ID NO: 29416 - DNA, 1500 bp, Glycine max
  Clone ID: UC-GMFLMINSOY035H06_FLI
accttaccaagatcatcgcccacgtcgtccgccgcctcaaggacgccgactccgccgtccgcgacgcctgccgtgacaccgtgggcgccctcgccgcgcagtatttgaagggagacggcggcggtggtggcggtggagtcgggacggtggtggggctgttcgtgaagccgcttttcgaggcgatgggggagcagaacaagggggtgcaggcgggggcggcggtgtgcatggccaagatggtagagtgtgccggtggcagcggaggggaggcggtgccggttgcggcgttccagaagctatgtccgaggatctacaagctgctcaacagtcccaatttcatggccaaggcggcgattttgccggtggttgccagcttgtcccaggttggagcgattgcaccacaaagcttggaacatttgctgcctagcattcacgaatgcctttctagtactgattgggcaacacgtaaagcggcagctgaggcattaagttctttggcattgcattcaagcagtttggttactgatagagcggcacccacactggcagtacttgaggcttgccgatttgacaagataaaacctgtaagagatagcatcaatgaagcattgcaactgtggaaaaagattgcagggaaaggagatgggtctcctgatgattcaaagccctcatctgatggtgggaatgaatcagctatttcgtcagaagcaagtgacccgaaaaaagtaaatcttgatgagaggaagactgattcaccagtaaagggttcatcaactagttcttcaaatatggattcaactaaggccaaagcagctagcatctcagagaaggcagttgtgatactgaaaaagaaaccacctgtgttatctgataaagaactaaatccagaatttttccaaaaacttgaaagaaggggttcagatgatttaccagtggaagtagttgttcctcgtagaggcctcaattcttctaactccaacaatgaggaagaatcagaggcaaatgctaaagattcaaaagaaagaataaattctgttggaaacatccctaatgatgatcatggatcctccagtaataaatatcgtatctttgagagaggcaatgatggaaattccaaacaaaggaattatgatgattttggccatgacagattctctgaaaggagagtgaacacaaaagaactgaggacaaaagcttatgatactgatggcaggactgaaaatgatcagagggacggttctgccaatgctgcaggtttttctaaaactgatggtcaatcagaagtacccttctccaataacagagcaaactggttggccatccagaggcagttgttgcaactggaaaggcaacaagttcatctgatgaatatgctgcaggatttcatgggtggatctcatgatagcatggtgactctagagaacagagtgcgaggtcttgagagaattgttgaagacatgtcacgagatttatccatatcatcaggtcgtagaaactttg

SEQ ID NO: 29417 - DNA, 1611 bp, Glycine max
  Clone ID: UC-GMFLMINSOY036A11_FLI
ctcgagagctttcagtttgtgtggttcatctttcttcttctccttccctcccccctctgtaacaccccgcttctctgaatccctttctgttaatcatctgtctttcaagctaagattttcgggtttgtctattaattcaccaagaagcaaacttagaaggatttttcgaaagccaggtgttttcagaaacgagatccaggttttattgtcgaatttcgctagtcaaattaattttcataattatttttttctttgaaaccagccaagagggttatttttgatccctcaaagctaatttctctctctctttttttatttccgggactgaagaggttgtctatttgaaatctccttcatcctttcctttcttgtagaaaactttttaaatttttttgtcagtgggtgttttaattaaccacctgttcttcaagttttagaaagacgcaggttgaattaattagtatcatggcagctttgatggatttttacagcagcagcccagagtttcaacttcactcagatccattcaggggagaactaatggaagttcttgaaccttttatgaaaagtccttctcccaactatttcccttcctccccctccctccctaatctttactcaaacgggttatccagcaacacccaaagcttaattggcttcgggcaagcgcaacccacatctcttgtgggcctgaaccacctaaccccatctcagatctctcagatccaagcccaaatccagatccaggcccagcagcatcagaatcgcagcaacaccctgagcttccttgggccgaagcccatccccatgaagcacgcgggcatgcctccgaagcccacgaagctttacagaggggtgagacagaggcactggggaaagtgggtggctgagatcagacttcccaagaaccggaccaggctgtggctgggaaccttcgacaccgccgaggaagccgctctggcatacgacaaggccgcgtacaagctccgaggtgacttcgccaggctcaacttcccaaacctgcgacaccagggttcctccgtcggtggtgatttcggggagtacaagcctcttcattccgctgttgacgccaagcttcaggccatttgcgaaggcctggctgagctgcagaaacaggggaagaccgagaagcctccgaggaagtcgcgttccaaactcgcggagaaggttgtttccgacaaggagaacaacaactcttgtaaggtggaagctgcgtcctggtcgtcggaaggttcttcgccgctttcggatctgacgtttgctgacgtgagcgaggctcagtgggaaggtgattcggataattataatctccagaagtacccctcttatgagatcgattgggattctctgtgaagtgtcctattatgtatggtctagtctaggtcttagtgtctcttaggtggctgctactgcaatggagtttttggcaattgcagggctagtactattctgtgtataatctctctaccttgctcacagctggtttttttcttgcttgaccagggagaattagtccgcttaatatgtttttcaagtgcatcgctgtaatctacttcaatttcatcatcttataaaatatattattctact

SEQ ID NO: 29418 - DNA, 1563 bp, Glycine max
  Clone ID: UC-GMFLMINSOY036D10_FLI
accacccttatcaaccccatcatcatcaacaacacaacgtatccaacatttctacaaacaccttcagcaccacccctaacactgattactcctactcctactccttctctcccacgcaacctgttcaagacttcaacttcgaattctcctcccccaactggtcccacaacctcctcctcgaatccgcacgcgccgtcgccgacaacaactccacgcgcctccaccacctcctctggatgctcaacgagctcagctccccctacggcgacaccgaacaaaaacttgctgcgtatttcctccgagccttgttcagccgcgtcaccgaagctggcgaccgaacctaccgaagcttagcttcggcgtctgagaaaacatgctcatttgaatccacaagaaaaacggtcctgaaattccaagaagttagcccttggactaccttcggacacgtggcatccaatggcgccatcttggaagccttggagggaaactccaaattgcatatacttgacatcagcaacacttattgcacccagtggccaatgcttctggaagcattggccactcggagcgaagaaactccacacctatgtttaacaacaattgttactggttctagaatcggtaacaacgtccagcgcgtgatgaaggaaatcggaacgcgaatggagaaattcgccagactcatgggcgttccttttaagttcaacgtcgttcatcactacggcgatctatccgagttcaatttctcagagcttgatatcaaagacgatgaggctttggctgtgaattgtgtgaactcgctgcattcggtttccgcgctaggaaacaaccgcgacgcgttgatatcggcgttgcaagcgttgcagccgcggattgtgacggtggtggaggaggaggctgatttggacgttggaatcgacggttacgagttcgtaaaaggctttgaagaaagtttgaggtggtttagggtttactttgaggctttggatgagagttttgtgaagacgagcaacgagaggctgatgctggagcgcgcggcggggagggcggtggtggacctggtggcgtgctcgccggcggattccgtggagcgccgcgagacggcggcgcggtgggcggcgaggcttcacaacggagggctaaacgcggcgccgtttagcgacgaagtttgcgacgacgtgagggcgctgttgaggaggtacaaggaagggtggtcgatggcggcgtgctccgacgccggaatattcctctcgtggaaggacacgccggtggtgtgggccagtgcatggaggccataacgtaaagatcgtatcataatagtatcatttggctttgacatgggtgaatccctcgcacgtgttctcggtttttttggcacgtgcggaaggatatatattgatggagttttttttcttcttttcagtattattaattattattattattgggctttatttcctatttttgttcttttggttaaatatatataagtttggtaagacaccgggattcatgggcgtttgcttgtgttgaaaaaggaactaagtaaattattattttctt

SEQ ID NO: 29419 - DNA, 1370 bp, Glycine max
  Clone ID: UC-GMFLMINSOY036D11_FLI
tgaaattgaagatggaaagcgaaaagaaatcgtcagcaatatctgatgtgggagcatgggccatgaacgttgtcagctccgtcggaattattatggccaacaaacagcttatgtccaacaatggctatgctttcagctttgccagttcgttaactgggttccactttgccgtaactgctctcgttggtctggtgtcaaatgctaccggttactcagcgtcaaagcatgttcctatgtgggagcttatttggttctcactggttgccaatatgtctatcacggggatgaactttagcctcatgctcaactccgttggattctaccaaatatcaaaactgagcatgattcctgtggtttgtgtgatggaatggatacttcacaacaaacactactcaagggaagtgaaaatgtcagtggtggttgtggttattggtgtcggtgtttgcactgtaactgatgtaaaagttaacctcaaaggtttcatgtgtgcctgtatagcagttttgtcaacatctttacagcaaatttcaataggttctcttcaaaagaaatattcaattggatcttttgaattgctgagtaaaactgctcccatccaagcgctttttcttcttattcttggtccatttgttgattactacctcagtggcaaattgataaccaactataagatgtcttctggtgccattttattcattcttctttcatgctcgctagctgtattttgcaatgtgagccaatacctttgcattgggcgcttttcagctgtttccttccaggttttaggccacatgaaaacagtatgtgttctgactctgggatggctgctatttgattcggagctaactttcaaaaatatcatgggaatggtcatcgcagttgttggcatggtaatttacagttgggctgtagagcttgaaaagcagtcaaatgcaaagaccttacctcacgcgaaaaacagcatgacggaagaagaaattagattattgagggatggagtagaaaagagtcccctgaaggatgttgaacttggtgaggcccaaggatagattgactcagatttggtggtgaaattgatgagaaatgatgcaggcaattatattgtgtattgctttataatttggtttgttcttttgtctagtttacctagtagtaaaacttggtttctatttgctcacactggcacggatccagttttagaaattgtgttcccgttcatcagcaatgtttctttgttagttttatttcatttgttgttatgttgaggttatttatttggcctgccaggaaattgctagatgaacaatatgatggcgccattaagatgtataatgtgcacgctaatgatacgcgatatcaattccctcttc

SEQ ID NO: 29420 - DNA, 894 bp, Glycine max
  Clone ID: UC-GMFLMINSOY036F09_FLI
gaagaaacagaagcatgcgaaaagggtgtggtggaaaatgcttcatggaaaactgaaactcagaataccgaagaccatcccgaccaatctcttgctacaacaccattaccgctttccagatcattgcttccattatccttttcatcaaagggtaagccaccaagatcttttgttactaccatctccagttctggattgtttgtgagccaaaagcttgggaaatcaaatgctccgcggtctcaacatcaacccaaatgtgtaaagcctttgcaaactgttccagatgatgactctcctgtcacctgcatcaaaacttcttctcccaacggcaagaggatctcctctcctaattgtgacgtgggatcatcacctactactcgcagaggtgggaggaagttgatattacaatctatctcttcatttccttctctcacccctcaccattagaatgaagatcttcttcttcggcttaagttagcctacccccacccctcttcccttggttcacgttttcagtttgttgcagttggagctgtatgcttagggtgaatgtacatgattgagtttcgttttactttcgtaatatgtttgttccgttcatttcataatgtacaacttcagttcagttgtataatatctatcttaactgatggttatcatcactcctaagagtacttggagaatgatttgttatcaagtccccattagtcatgttggactattcctttttaatgtgttacatgaagtaaatgtggttggtgctgtggaatttaatgatgctacgttggcagtgaaatcgatcaaattaagcatataatagcttttcaattaaaatttcctttgtattggtaaatattgctccttcaggggaataaagtagttccgaaatttgtg

SEQ ID NO: 29421 - DNA, 1559 bp, Glycine max
  Clone ID: UC-GMFLMINSOY036H07_FLI
agcagacttaacaacagcacaaagcgggttactgtctgttcaagctaccatctctctctctctttcttagtgcctccttgccagaagttaaaatggcccaagaaactttcctattcacatctgaatcagtgaacgaggggcaccctgacaagctctgtgaccagatctccgatgctgtgctcgatgcatgcttggagcaggaccctgacagcaaggttgcctgtgaaacctgcaccaagaccaacatggtgatggttttcggagagatcacaaccaaggccaacgtggactatgagaagattgtgcgtgacacatgcaggaacattggttttgtctctgatgatgttggtcttgatgctgacaactgcaaggtcctcgtcaacattgagcaacagagtcctgatattgctcaaggtgtgcacggccacctcacaaagaggcctgaggagattggtgctggtgaccaaggtcatatgttcggctatgccactgacgagactcccgagctcatgcccttgagccatgtccttgccacgaagctcggtgccaagctcaccgaggttcggaagaacgggacatgcccttggctgagacctgatggcaagacccaagtcactgttgagtactacaatgacaagggtgccatggttccaatccgcgtccacactgtgctcatctccacacagcatgatgagactgtcacaaatgatgagattgcagctgatcttaaagaacacgtgattaagcctgtgattcctgagaagtaccttgatgagaagaccattttccatttgaacccttctggcaggtttgtcattggagggccgcatggcgatgctggtctcaccggccgcaagatcatcatcgacacctatggaggatggggtgcacatggtggtggtgccttctctgggaaggatcctaccaaggttgataggagtggtgcctacattgtgaggcaagctgcaaagagcattgttgcaaatggacttgctaggagggcaattgtgcaagtttcctatgccattggtgtgcctgagcccttgtctgtgtttgttgacacttatggcactgggaagatccctgacaaggaaatcctcagcattgtgaaggagagttttgacttcaggcctggcatgatctccatcaaccttgatctcaagaggggtggaaatggcaggttcttgaagactgctgcatatggacactttggcagagatgaccctgacttcacatgggaagtggtgaagccactcaagggggagaaggtacctgcttaactaaaaggggttccaacactcttggcaagggacttttgcactactactggcttcttattatctgattgctaaaattttctctatgtttccttccctcttactcaattctgtttttttttttctgtatttttttatgaatttcccccttttttttgtgtacttgtatgtgttctttcagatatatatattttatatgatgaaacaaaaaaaaatgttctctcaagatttatgctagaaatatgtaataatctcaaattatagagagtatacaattttact

SEQ ID NO: 29422 - DNA, 1500 bp, Glycine max
  Clone ID: UC-GMFLMINSOY037A03_FLI
ttgtggatgacaaatatgaagacttgcaaagaatgtataacttatttcgccgggtgtctgatgggctcacaattgttaaagatgtcatgacctcttttgtacgggatacaggcaagcagctaattatggatcctgaaaggttgagagatcctgtggattttgttcaacgtctcttggatttgaaggataaatatgacagggttattactatgtcatttaacaacgacaagacatttcagaatgccttgaattcctcttttgaatatttcatcaatttgaatgcccggtctccagagttcatttctttgtttgtggatgacaaacttcgcagagggttgaaaggggttggtgaggaggatgtggagattgtactagacaaagtcatgatgcttttcagatacctacaagagaaggatgtgtttgagaagtattacaagcaacacttggcaaaaaggcttctttcagggaagactatatccgatgatgcagaaaggagtttgattgttaagctcaaaacagaatgtggatatcaattcacttctaagttagagggtatgtttactgacatgaaaacttctcatgatacgatgcagggcttctatgcaaaccttggcactgagttgggggatggccctatgctatctgtccaggtgcttacgacaggatcatggcctactcaacctagcccgccgtgtaatcttcctgtagaaatactgggtgtatgtgataagtttcggacatattatcttggcacccataatggtaggagattgtcctggcaaactaatatggggactgctgatttgaaagcaacatttggtaagggccaaaagcatgagttgaatgtttccacatatcaaatgtgtgtactcatgcttttcaacagcgctgagcggttgacttgtaaggagatagagcaggctacagcaatacccatgtcagatttgaggaggtgccttcagtctctggcctgtgtcaaaggaaaaaatgttcttcgaaaagagccgatgagcaaggacatagctgaggatgatgcattcttctttaatgacaaattcaccagcaagttctttaaggtaaagatagggactgttgttgcacagagggagtctgaaccagaaaacctagaaactcggcaaagagtggaagaagacagaaagccacagatcgaagcagccattgtgaggataatgaagtctaggcggactctagatcataataatattgttgctgaggtcacaaagcagctgcagtcacggtttttgcctaatcctgttgttattaagaagaggattgaatcccttattgagcgtgagtttttggagagggataaagtggacagaaaactgtaccgctatcttgcttgaactgtatgtgcttttgatttggcatggcacttgtgtgattctgtctgtcataagtttgattgcacatcacaaattgccgcaagtagtgtaactctcctttgcatactcaacaaaacctagatttgttagggtt

SEQ ID NO: 29423 - DNA, 514 bp, Glycine max
  Clone ID: UC-GMFLMINSOY037B10_FLI
cgaagggccatggtttatcccagatatattggtcaacgtacacagggctggagaggaatctattggagttataagagaggctctcccggatggctcttacagggtaggtcttggatcaagtggtaatggtgaaacgattacagcccttcctaatgaaatggaggctgtggtaccaagaaaatcagacaaaataaagattatgggtggggcattgcgtggtgcaaccggcaagttgattggtgtagatggtacggatggaattgtaaaggtagatgacacattggatgtgaagattttagacttagttattttggcaaaattggctcaaccatgatataaaaagcttatgtagagaaattactttaatgccatatcttttctcgtgtcaactgttgctaggggttttgtctgtctataattcgctccctgcacctttgtccgcccaagtgacaagttccaactgcagataaacatttgcttctaacaaataccactataaattatcgttttcctt

SEQ ID NO: 29424 - DNA, 1344 bp, Glycine max
  Clone ID: uC-gmflminsoy037e05_FLI
tctacttcaaagagcgtcagcagttctagtgaagatgacaatgaacttagaagagggccttggactctggaagaggataacttgctctcccaatatatttttaatcatggggaagggcgatggaatttgctggctaaacgttcaggattaaagagaactgggaaaagttgcagattaaggtggctaaattatctaaagccagatgtaaaacggggaaatttaaccccacaagagcaacttataattcttgaactccactcaaagtggggaaacaggtggtcaaaaattgcacaacatttgccaggcagaacagacaatgaaatcaagaactattggagaactaggattcagaaacaagcaagacatttgaaaatttacactgacagcagagagtttcaagaacttgttaggcgtttctggatgcctagattgcttcagaaagcaaaagaatcatcttcttcaaacatgtcaattcaaaaccaggcaattcctatgccttttgattatgtttctcagcatttaactgttgggaccatacctccttggcagggaccttgtatgaatgaagctggtcccacttacatggaccaacatgagcagaactcagactcggaacacaacaatggttcatgcatctccttgtctgagtcagcaaatattccaaaagtgcctcagcattttggacacaccaccatcacccaatttcatgccttgaataccaatgactttggcaccttcacatatgaaggttataatgtaaacaacaatgtctatgagatggacaacttcaaaacgactactacatgggtggctgaggatgcgcaatacccaattggtgattgtcaaatggtaggaagcaattgggtaaacaacgattttgcatgtaacatgtggaacatggatgaactgtggcagtttagcaagttacaaaaataagattttagggttttgttttttttggaataaccaaaagtccaaaactctttctttgatgacgttattattgttatcatgaactgtggattagctaccgaattaattaatacagatggcgattgttttctgtacatctgtcttgtattactctgttcagataagtacttttgtaatttgtattgattgagaaaagtcattaattagtcactagtacaaaacacaaacagttggaaattgagtgctaataaagaattcgtaaatatatagaagtaaacacttttagaaactttggtgcatttgtaggggaaatcggaatgccgaatgcagccactatgatatctaaatgaagagggcccgtgattgaatgaggatgcaattgaagccaataaagatagttcgtttttcagt

SEQ ID NO: 29425 - DNA, 1789 bp, Glycine max
  Clone ID: UC-GMFLMINSOY037G04_FLI
cctgaagcattattccataataggatgatgatgatggcgcatcataatcatcaccaccgtccattgtcatcaccctttgataataatggtgatggcgatggtcccacgacttacatgtcttttactaatcatataaaccttgttagtggtgcttcttctgttcttggtcctgctattgatgctggctgtggtgctgctcctcctgcacctgtaagaactttgcagccttttgacatttcttcttatacttcttctcccaccaccactaccacaaccttcaacttcaaacccccttcagcaggtgtgatggcggcttcgttggggtttcctttcacaagtgcacaatggagggagcttgaaagacaagctatgatatacaagtacatgatggcttctgttcctgttccacatgatctcctcacaccctcttctcgctcttcctgcatggatggtggtttcaatctgaggttggcaaatagcactgaccctgagccaggtaggtgtagaagaacagatggtaaaaaatggagatgttcaagagatgtggctcctaaccacaagtactgtgagcgccatatgcatagaggccgtccccgttcaagaaagcctgtggaagttaacaccaacagcaccaccactcccactagcgtcaacaataacaaccatcaaatcaaaaaggctcgccatgagtgtaataataatccttttgctacacctgacgttactgcggctatttccaaccccacatccagaaaaaatggatcttctccccattttcttgggtctactaccactcagccataccttgattcttccctctcccttgataactttggtctaaaagctgctagttttgactccgtggcttctgtttctgctaataaggaacccaggggtttagagtggatgctgaatggagatcctatttccctgggtgcttctgactcacaatggcagtctctgatgcacaataaagatggaatgaccagtgttagttcctgtaacaccaccgagtctcagtatctgaattcattagcactatataactctggactagaacaacagaatagacgccatcctttgttcctgaaccctcttgttgttcccatggaaaatctccaaccggagaaaccaaggggttttattgatgcttggtctaacgctgaaagcaatgccaacaccaacaccaccaacaagaactctgctgcatcaattggtaaattatccctttcttctcttgatctatcaatggggggtgctgctgtgaatgaagatgtgggtaatgttaacatgggtttgggcctaatggagcctaatggaaaaacgcacactggtactaaaatttctctctccaattggcaaaacccagcaccttgggtggcttcatcacttgggggtccactagctgaagttctaaggtcaagcacagtcactgccaccaccaccaccaatgaagcaacctccaacacaccctcgccagccaccactacacatgctgaatctccatctggggtgttgcagaaaacgcttgtttcattgtctgatagcagtaacaatagcagcccaagggttgcatcatcaagggccaattctgagatggccttgctaaggtttcaatcaaattaatgtaaattaattactagcattttctgctttagttcatttcatttcaaatgggataatagtattattattgtgtaatcttttgcatatttagctacctgtgctatcctatggcctattgttcaggacgtttgttataaactaaaaaacctctggtgaagtggac

SEQ ID NO: 29426 - DNA, 1934 bp, Glycine max
  Clone ID: UC-GMFLMINSOY039D12_FLI
ggccaaagggtgatgctgatgggtatgacctagttgttgttgatgccatgcacatggctaattatgccagtcgaatatgtcattcttgccgacctaattgtgaagccaaggttaccgctgttgatggtcaatatcaaattggtatttatagtcttcgtgaaattcaacatggtgaggagatcactttcgactataattctgtaacagagagcaaggaggagtatgaagcgtcagtttgtttgtgtggaagccaagtatgccgagggagctatctgaatctgactggtgaaggagctttccaaaaggttctgaaggactctcatggaattctcgatcggcattgtttgatgctagaagcttgtgaattaaattctgtgtctgaagaggactataatgacctgggaagagctggtttaggcagttgtttgctcggaggcctgccggattggcttgttgcgtatgcggctcgccttgtgagattcatcaattttgaaagaacaaaacttcctgaagaaattctaaagcataatctagaagaaaaaagaaaatatttttcagatataattcttgaagttgaaaggagtgatgccgaggttcaggctgagggagtatacaaccaaaggcttcagaatcttgctgtcactcttgataaggtgattctgcactctgctatccatatttcctttttcactattcttgtttttgatgttgataagaagaaaaacactttgcatttaaaatatgatcatagaggagagaaatggtaaaggccaatgcttttggtgtgggcttgttgttaaccattaatgactgagccgatactgttaagataaagaagctacatggtaaggtatgttatgagatgtatttttggcgatccacggaaagcaccacctcctcttgagaagctcagtcctgaagcaactgtttcctttctctggaaaggagagggttcatttgttgaggagcttgttcagtgcataactcctcatgttgaagaaggcatcttgaatgatctcaagtttaaaattcatgctcacgatccttcaaattctggagatattcaaaaagagcttcgtaaatctctgttatggttgagggatgaggtccgaaatcttccttgtacatataaatgtcggcatgatgctgctgctgacttaatccatatttacgcttataccaagtacttctttagaatacggaattatcaaaccattacatcaccacctgtctatattagtccacttgacttaggtcccaagtacactaacaagctgggagcagaatttcaggagtatcgaaagatatatggtgaaaattattgtttaggacagctgatattttggcataaccagagtaatgcagatcctgatcgtagcctggctagagccagcaggggttgcttgtctttaccagacaccaattccttttatgccaaggctcagaagccatcacgacattgtgtttatggtccaaggaccgttagatctatgctggctagaatggagaagctgccgcagagatcttggcccaaagaccggatatggtcattcaaaagttctccgaaattctttggtagcccaatgttagatgctgtagttaataactctccgctggacagggagatggttcattggtttaagcacagacctgccatattccaagccatgtgggatcgttaaaattttgcatggtttggggaattttggtcagagcacactcgataatttttagatatggaatggttcatcattcagagctgcctactgcctgttttagcttgggggggtctgtaattattaatccaaaagcttcgttccttgtaccgctttttagtcattcttgtgtacagttttctttgccattgatttgtaattcttttgattgtagggaattgtttaacacttatgtaatattaaatgaaagttaggaag

SEQ ID NO: 29427 - DNA, 2584 bp, Glycine max
  Clone ID: UC-GMFLMINSOY040C12_FLI
ctgcaaatggagattgaactaaaggctcaaatgattgctagaactgagataatggaaatgcgaaacacctttgatgctcaactcaaggaccatgttagtaatgccaacaagtttcaggagcaactttgtgaaagggagcagacaattcatgagcttgaaaggaaaatagaagagaaagacagagagctgcattctattaaattagacaatgaagcagcatgggcaaaacaggaccttctccgtgagcaaaacaaagaacttgcaacattcagaatggagcgcgatcattcagaagctgaaagagctcagcatataaaacaaatacacgatcagcaagaacatattcaagaaaaagataggcaacttaatgagttgcaggaacaacatagggttgctcaggagaccattatgtttaaagatgagcagttcagagaagcccaagcatggatagctcgtgttcgtgagatggatgtttttcaatcaacaacaaatcaaacattacaagctgaattgagagagcgcacagagcaatataatcagctctggatgggttttcagagacagtttgcagaaatggaaagagttcatttgcatgctattcagcaactacagcttgaactggctgatgcaagagagcggagtggaactttcaatgatgattcaagaatgtcccaaattaattcaaaaaataatgtaactcagtttggacaggaaaatggaagccaatttgacttgaatggaagcaatgcttcgggtggaaataatggtctccttccaagtgaaagcactgctaatgatggaccatttgtatctacaggcaatgcatcaatccagactgaacatgttgctggtgttcctattgctccatcatctctaattgtcccaccttcatacctcccacacagccaagtaactgcattgcatccatttgttatgcatcaacaaggagttcccaattcagttgcatcacatgttcctcaatcacatgttgggcattttcacccagtgccgtcaatgtcacctgtgcagcagtggcaaaatcatcagtctgtgtcagagggttcacaggtacctgtacaggaacattcttcaccatctcaaactgatcaacatttgatgagatcagatgctaagtttagctatgaaatgtctgttaatgggaaaactcttcatagagactatctggatgctcacatccagcaaggtgaggaggcacaaaccatgattttttcagctaccagtgaaacacagtcagtggataagggtcaacttgttgcttcccatcaagatcaaagcatgcaacaaatttcttcacagttctctgatgctttacaattgaactcttttgaaccaaatggtgaaatcaaggagcagaattctgtgacattatctaataatggacctgacgaccaagttttattggctgagcaagcgagttctgctgcaattgcatcatctgtcacaagccattcagttaatcataatgaaatgattcagaacaattctactgattctgttttgtctgaagtgttcacctcttctgcgttgacagcttcaacaattgcaaagacatcagagactactctcctcgatggaaaatcattattagcttgtattgttcgcactattccagctggtggccgaattcgaattagttcaacgctccctaataggctgggcaagatgcttgcacctctacattggcacgattacaaaaggaagtatgggaagctggatgattttgtggctagccatcctgaattattcttgattgagggtgactatattcagctccgtgaaggtgcacagaaaatggttgctgcaactgcagcagttgccaaagttgctgctgctgctgctgctgcatcaactccttattcttcatacatgtccactgtggctgttacaccaatggctcaatctcatcgcatgaaaaaggctccttcaaatctgggggatgatcctttaaaaatgtcagttatgcagcgtcagcaaactaatggtgcattcagtgttgctggtggtctttcaaatgtcaaaattttgagtaaatctaaggtttctcgggaaatggacggccctgaaagtagggttgtgcagtcttctgtacaattacctgttggcaatggtggaagcattgacaaatcaagtatgagcagtgcccaaatctcaggctcagcaaatggaaggctagtctcaagctttgcttctaaacagcagaccagggcaactggtgctgtgtacccttctcaaagataggaagatggaagggcgtgttagattatcctgtctcaccaggatgcggatgaaaacatacaagattatttatcgggtttgtgggagaatgttttttgaagcattgacggagtaatcttgtgccctgggcaaaatgtgattttaagttgccggtgctatctccatctccagtttctgtagtagtttatttctcccagctgttacaattcagtgtgctttcattaatgtgggcctcttgctgtggtattcttgctgcatacattgcatctgataaactgcgatttttttatgaatgcttgaaagattaatcagcatggttaaccttttc

SEQ ID NO: 29428 - DNA, 798 bp, Glycine max
  Clone ID: UC-GMFLMINSOY040G02_FLI
accatgtgcatcagatgcgcctattgacagagcttcttggcaccccaactgaggctgaccttgggttagtgaaaaatgaagatgcaagaagatatatcagacaacttcctcaatatcctcgccaacctttagctcaagtcttcccccatgttcatcccgcagccattgatcttgttgataaaatgctgacagttgatcccaccaaaagaattacagttgaagaagcactagcccatccataccttgaaaaactgcatgatgtagctgatgaaccaatctgcatggagccattctcatttgattttgagcaacagcaattggatgaagagcaaataaaagagatgatctacagggaagcattagcactgaatcctgagtatgcttaaagcagaagactcaaggacttgaagcaagcatataaggaaaaataataattcgtttttaatttttttatcacttaagttccctgcttacaagcaggaaacgatcaagttgaatgaaaattcaatcttgttgccaatcaaactcccttaggtaatttattcaatctgtgtgactaggtaggtgcaattacggcttcatgagcgcccttttgttgtaaagtgccatgtaactatattaatttccatatatttttttttaaccctgacggcttattgttgtaaagtgacatgtaacaatattccctgtttgccacacactaatgccatatggggagagggactaaaaaaatcattcctcaagtttgagggactaaataaaacaaacattaatgcagaggacttaaaaaaacattcc

SEQ ID NO: 29429 - DNA, 888 bp, Glycine max
  Clone ID: UC-GMFLMINSOY040G10_FLI
ctggactatataggcataaactactatgggcaggaagtggtttcaggtgcaggcctgaagctggtggaaaatgatgagtacagtgaatctggtcgtggggtataccctgatggcttataccgcatgctgcttcaataccatgaaagatacaaacatctaaatattcccttcatcattactgaaaatggggtttcagatgagacagatttgattcgccggccatatctcttggagcatttgcttgctatttatgctgccatgatcatgggtgtgcgtgtacttggttacctgttctggactatttctgataactgggagtgggctgatggatatggtcccaagtttggacttgttgcggttgaccgggcaaataatcttgcacggacccctcgcccctcttaccatctattttctaagattgtgaatacaggcaaagttacacatgaagatcgtgaaagagcatgggatgaacttcaaagagttgcaaaagagaagaaaacaagaccattttatcgggctgtggataaacaccgtttaatgtatgcaggtggacttgacaaacctgaacagcgaccttatatagaacgagattggcggtttggtcattatcagatggatggactccaggatcccttgagccgcttctcaagatccatttttcgaccattctccctcttctcccttaaaaggaaaccaaaatctcaaaagaagaatgccaaattgattctccagcctcttgaaacttagcaattgatttgtcttgtcccagattctatatttttgagtgatgagcactttccatttcaatattcaaccccagacacatctgtctaactttcattatatgtgtaatattgtactgggtgtattatggtgcattcttgttgt

SEQ ID NO: 29430 - DNA, 2138 bp, Glycine max
  Clone ID: UC-GMFLMINSOY040H04_FLI
actttgaagtcaaatttgaaactccaaagcactgaacgaactcaattgaaaccctagcacatagtcgtagatagtagagtggataacagtgtgtgatgtggtgatcctaatcgcaagcatgatgaacaactcgaacggcatgatttcgaagacgtcgtcttcgtcgaatacggcacaatcgcaacaatcacaatccactggcctcaagatgcatttcaagactcccgagggccgatacaagcttcactgcgataagacttatccttccactcttcttcactacgctcatggcaaaaccgtctctcaggtaactctggcacatctcaaggacaagccagtgcctttgactccgactgggcagtcttcgactttcagtgccaccagtggggtacggtcggcagcagcgagattgtggggaggaagcaatggaggccggtctcttagttttgttggaggcaatggtaccagcaagaaccttggggggaactctaggattggttcaattggtgcttctagttcaagtaattcaaccactaattcaaattttgacgggaacggaacgtacttgatcttcaatgtaggggatgcaattttcataagtgatttgaattcacaagacaaggatcctgtaaagtctatccacttcagtaattcaaatcctacgtgccatgcatttgatcaggattctaaggacgggcatgatttgatcattggcttgaatactggcgacgtttactcagtgtcactgagacaacaattacaggatgttggtaaaaagcttgttggggcccagcattacaacaaagatggttctgtcaataacagtcgttgtacttgtattgcttgggtgcctggaggtgatgctgcctttgttgtagctcatgctgatgggaatttgtatgtatatgaaaagaacaaagatagtgctggtgattcttcatttgcggttgtcaaagatcaaacacaattttctgtttcccatgcacgtaacagtaagagtaatccaatagccagatggcatatatgccagggttcaatcaacagtatttctttctcaaccgatgggacttacatagcaactgttggacgggatggttatttacgagtgtttgattacttaaaagaacaacttatatgtggtgggaaaagttattatggtgctttgttatgttgtgcttggagcatggatggaaaatatattttgacgggaggagaggatgatttagttcaagtttggagtatggaagatcgcaaggttgtggcatggggtgagggacacaactcatgggtcagcggagtggcttttgattcatattggtcatcacctaattcaaatgatgatgaagagaccattagatatcgatttggttctgttggtcaggacacacaattgcttctatgggacctggaaatggatgagattgtggtacccttgcgacgtccttctggtggatccccaacttacagtgctgaagccagtcatcccaatgggacagtgttgtcccgttgggtaccttgcaacctgctcctagcatgctggatgttccgaaaatctctccactcgttacccaccgtgttcataccgaaccactctcaggcttgatatttacccaggaatctgtacttactgcttgtcgggaggggcacataaaaatctggattagacctgcagctgctgagagccaatcaagcaactctgaaactctgttatccaccggccttaaggagaagcctttaattttgagtaagattggcaattctagccacagacaatgactaaaatcttgctaatacttgaaatatatgacagggttttcactttgaaaacccttttaataatttcttcaatgtccttcttagtctccctctattccttccttttcacaggactaaaagccatgcgatttacttctcattggtgccttgagtggcctctggtttttaatcgagcccaacggcaccgtgtgatcaatgtagttgatctcacctagtgggttaaaagctattattattgttcttaatatggtttatctttttatccggttgattacctggttaattttttttattctagtaaaggtaaaccaaactggttctattctatatactgggatgagcgagtactttttcgggcctcc

SEQ ID NO: 29431 - DNA, 2835 bp, Glycine max
  Clone ID: UC-GMFLMINSOY041A01_FLI
tagagatagagatagcgcgaattgaaactctctaatgtgagcaattcaaccttccagaccaccagtctcgtcgttcgctccaaaatgggttcttcccctgagcccatcaatttcaggtaacattgtccaaccaaaatggggtcacctcaatgaacttcacagtgctttgaaggcaatggaggaagctcttacaagtaggaacgtaaccgagactgatgtaggcaactctgttaagacttgatgtcaagcacgatgatccagtttggggtgaaaatgtgactcttaggattaacaatggcaaccatgtaattcatgcattcgtcaatggagaacatattgattcccattgggccacatatggtattcacaacgataaatttgactcgaagattaagttgaagcatggaacgaatactataagcttgcttagtgtcactgttggacttcagacacctatgacctctctctatcttctcttcacttacttactgcctttgctgcaaacactgttaataatgatgtcgtgtggctagaagttatgctatcaatcgctgctataccaaggtgaaagttataaatttcatttgccttgttatcccttttggaaattttatttaccaaggtgaaagttataaattttattatgcttaagaatcttaattaatttttcacatatttttcaattgaataataatcttttgttaatttcatgagatctataaaaggcatgttaacgtggtttgtatatatcctcttctttggtttgtatctatcttctgtatataattttattttaacgattatgatgtgtttattactgctaccaccaaacccttgcttaacaacgttatctcaattcaatttttttaacattttctaattttttttaaaaaatattctaagacggttctatcatagaatcatcttagaatgtcaacattctaagacggttttttttataaaatccttagaatctttaatatatttttttaaaaaagaaaaacattctaagatgattatctgaaaaactgtcttagaatgattctaagatgattcttcaaaaaatcgtcttaaaatcctaaatttattttatttttaaaaaaaaattatattctaagatggtttttgaaaaactgtcttagaatatgtaacttttctaagacaattttttaagaaccattgtagaaagttttaactttccacggatgatttaaaatcgtctttaaaagtgtcatagaaccgatgtagaatcatctttttacagtagtgagtaaagacttaaatttaaatcttatatataaaaaaattaattgaaaataaatagctcacaattaagttataagtttcatcgaagatgaatcattagttaaaatagtagatattttgcaattatgattacaaaataaaaacattttacgtatgagaacatagaattttactatccaattaagttacgagttttcacccaatcctaattaagatctcaatttaaaaaaccttgtgaacaacaattgtaggagatccaaatcatcatatctatatattatctataaaagagaagtgtttggaaaattctaaaatgcccttacccaagattgtgacacctatccattttctcggttttttggtcattttgcccctttatttttttgcaccttttttctgttgcccctgccacgtgtcgcgttgcatgtggagtttcaaacatatgtcactccctgattggcggatttcaactcttcatttaatttcacttaataatcgaaactctcctctctccctgaatcttctccacgttactctctcttcctcaatcttctccacgttactctctattcctcaatcttctttttctccctctttctctttctcaatcttctcctctttttcttttatcttttatctttctatttctgaatcttttccttcacaccttctctctccgtttctctttcttttcctcccttgcatgcacctctgccacaagaaaatggatttgtgggtgagtgagagattagatgggaccaaaaggagaaaaaaaaaacacgagaagaggggttttgttatacgattttttcctcttctacattattcttctttcattgtttggttttgttttttgtttttactaccgtttggtttttcccctttgtcagaaggatgttgagaaggcgaagaagctcagaggcttcatcgctgagaagagatgtgctcctttaatgctctgtttggtgtgcgttcttttttatttttttttatttaacattagatcactgttatttacaattgagtttatggattatcgttttgacgcgttttggtgtgtttcgtgtgcatatggcactctgctggaacctttgacaagggcacaaacaccggtggacccttccgacatcgctattaggcttttggagccactcaaggcggagttccctattttgagctacgccgatttctacccagtgatgtttttttgtctttggtgtttgtgcgcttaatgttgtgtttgtgctgacgcagttggctggcgttgttgccgttgagatcatgggtggacctgaagttccattccaccctggaagagagtcaacccaaataggaaaccaactcaacataacaacaatgggagaagttacatgtttcctttttcaaatactagcactttggaggattaacaacagctatgctctcgactttgcagttgatagataaacatgcaacagttgttaatgcaaataccattcaactacctgtgtatatgaacatacttgatactacggagaaattgtttcttttggataggcaataatggttgttatgactgccattaagagt

SEQ ID NO: 29432 - DNA, 2054 bp, Glycine max
  Clone ID: UC-GMFLMINSOY041A09_FLI
attctaagctctagagagagagagagagagagagagagagagagaagaaagaatcatgtggtgctggaaaggagacggaggctagaagaagaagaaaaaaagaagagctagagagagggtaccctcttgttaatttgcactgtttttgtgtctgttgctgcacttttaggagttcttctattctaacaacctctgccaaccaacacaagcctgaaaataaaataaagatgctgcctccttgctggagatcgttcgggaagaaacagtaatgctactgacatgggaaagaaggggagttggttttctgcaatcaagagagttttcacacaccactccaaggggaaggattcagataataacaaaggcacaaaagagaagaagaaaagtctaggaaaactaaagcatggagagaccaattcattcatccccctcttcagagagccaagcagcattgagaaaatcttcggggacttcgaaagggagcaacaattactggggttaaggcctgccactcctccggagagacctaaaacaccaccttatgtccctccaagagctccttctcctagacctccctctccgagggctccttctccaaggcctccgtctccaagggctgcttctccgagggtggcttctccacgagttacctctcccaaagccgcgtcttcccggattgctcatcaccacaaggaggttggctacagaccagagccaactttgaggcaacagcatgccacagctactaagatccagtctgtttacagaggctatatggccaggaggagttttagagctctaaagggtctggtgaggcttcaaggagtggtaagaggacagaatgtgaagaggcagacagtaaatgccatgaaacacatgcagctgttagtgcgagttcaatctcagattcagtctcgaaggatccagatgttggaaaaccaggcacgatatcaagccgatttcaagaatgataaggatgcagccagtatcttgggcaaactcacttctgaagcaggcaatgaagagtgggatgatagcttactgaccaaagaggaagtagaggcaagattgcagaggaaggtggaagcaatcatcaaaagagaaagagcaatggcatttgcatattcacatcagctatggaaagccactccgaaatcaactcacaccccgatgacagatacacgatccagtggattcccttggtggtggaactggttggaaagacaaacacctgcagcaactccacaagaaagacaaagcttgaagaattttcaaatcacacctccaagaccatactcagagcaaaagactagtccaagacctggctccagcactcaaaggcagccgcagtcgcagcagcagcagcctcatgtttcctttgataatatggacactcccacaccaaagtccacaaaatcaaccatagtggcatcttcaaaaccggtgcgaatgcctccatttagaactcctcaggctaacagctcaggctcaggctctaaatatccgagaccaagggatgtagggtccaattcaccctttgatttgccattgaaggatgatgacagcctcacaagctgcccaccattttcagtgccaaactacatggctccaaccctttcagcccgggccaaagcacgtgctagtagtaatcctagagaaaggcttggtggaactccaactagtactgattcaaagaggaggctctcattccctttatcacaaggaattggatcattcaagtggtctaaagggttctcaagcaaggatcaaagggtgccagacaaatttcagtcacttgaatctataggaaatgtgagtgtggattcaacggtgtctttgcctgcaagggtggtgggaagaaagccttttacaagatttgtgtgatttattctgttctattcttttcttcctttttttttaaccattttattttgtccatgttggtggtgctatcagttacattatgattatgatttgagtgtattggtgatagtttgataacaggtatacccgttgtaaactaataaaaacataatagaaaatgatggtttggt

SEQ ID NO: 29433 - DNA, 2217 bp, Glycine max
  Clone ID: UC-GMFLMINSOY041C09_FLI
gtctgggtgatgctggatatcccggggctgcctcgcttggggatgcagtttgtgggatggcggttgcttatattacagagaaggattttcttttctggttcaggtcgcacacggccaaagagatcaaatggggtggtgcaaagcatcatcctgaggacaaggatgatgggcagagaatgcatccccgttcttccttcaaggcgtttttagaagtggtgaaaagccgtagcttgccgtgggagaatgcggaaatggatgcaattcactctttgcagcttattctgcgtgactcgtttaaagatgctgagcatagaaattctaaggctgttgtggatccccatgtgtcagaacaagagttgcaaggggtggatgaactaagttctgtggccagagagatggttagattgatagaaacagccactgctccaatatttgctgttgatgtcgatggccacgtaaatgggtggaatgcaaaggtttcagaattaacaggactcccagttgaggaggctatggggaagtccttggttcacgatcttgtgtttaaggagtctgaagaaactatgaacaagcttctttctcgtgctttaaaaggtgaagaagataagaatgttgagataaaaatgaggacgtttggcccagaacatcaaaataaggcagtgtttttagtggtgaatgcttgctccagcaaggattttacaaataatgtagttggagtgtgctttgttggtcaggatgttactggtcaaaaaattgtaatggacaaattcatcaacatacaaggtgactacaaggctattgtacatagcccaaatcctttgatccctcccatttttgcatcggacgataacacatgttgcttagagtggaacactgcaatggaaaagcttactggttggggccgtgtggatgtcattggaaaaatgttggtgggagaggtttttggtagttgctgtcagttgaagggttcagattcaataacaaagttcatgattgtcttacacaatgcacttggtggacaagatacagataaattccctttctcatttcttgatcggcacggaaagtatgtacaaactttcctgactgcaaataagagggttaacatggagggtcagatcataggagctttttgctttttgcaaatcatgagtccggaacttcagcaggctcttaaggcacagagacaacaagaaaagaattcctttggtaggatgaaagagttagcttatatttgtcaaggagttaagaatcctttgagtggcatacgctttacaaactctcttttggaggctacaagcttgaccaatgagcaaaagcagtttcttgagactagtgttgcttgtgagaagcaaatgttaaagataatacgcgacgttgatcttgaaagcatcgaggatgggtccctggagcttgaaaagggggaattcttgcttggaaatgtcataaatgcagttgttagccaagtaatgttactgttaagagaaagaaatttacagttgattcgtgatattcctgaagaaatcaagacattggcagtttatggtgatcaattgaggattcaacaagtgttgtctgatttcttgttgaatatagtgcgctatgcaccatctccagatggctgggtagagattcatgtacgtccaagaataaaacaaatctcagatgggctcactcttctccatgctgaatttagaatggtatgtcctggtgaaggtcttcctcctgaattgattcaagacatgttcaataacagtcggtgggggactcaagaaggtttagggctgagcatgagcaggaagattctaaagctaatgaacggcgaagtgcagtatatcagggaggccgaacggtgctacttctatgttcttcttgaactacctgtgacacggagaagctctaaaaagtgttaaatatgtattctgtagctgtaagattaagtttaaagccctggcattgcccctcatgctgaccgtagatagtttgttgttatagattatgctctcacctaacaaggcaacttaaggggcaagcatttgaacaagctgatttggctagctatctcagtcacatgtaattctaccaaattggactgttgttttgcaccctgacaaaacttgttcggtacagcaagagtggctagttaatatgtggctaaatgtaaccttaaatcttactgataaagatatggcagagtagatgaaatgaagtttcgcc

SEQ ID NO: 29434 - DNA, 1648 bp, Glycine max
  Clone ID: UC-GMFLMINSOY041C10_FLI
tttagaggttatttggcaccagagtatgcgataggagggaagctaacaaggaaagcagacatttacagctttggcgtcctccttggggaaataatcagtggaagatgtaacacaaactcacgactaccaatagaagaacagtttcttctagagagggtatgcatgtctcatattccccatcgtattggcatatcttttactagcatcaattcttgcagccagtttttcttattcaatcatttattctaactaaacatgaattcaccatgttcatttagtaattacttgcctgaagtcacaaatgtttattggaccgtgtgctcgtctacatgtaaaacttgaactccctatttggtttgaactgctagcaaaatacagaatcatattcatatgtgaaaggatatgcaaaccaaaccattagtaatttattttgttccataaacataaagtataaattaaaatgatatcagaattgtgctaggcaaatacattggtgattcttataggaatatattaggaagccacctattactaaggtgcatattaggtaggagggcagagaatccagggcttagggagagcatgttgatataatagattgcaagacaagcaatcaaggggaactggttgggaaaatttgacctgcatagatatagaaaggagagaggagaagatagaggggtaagtaaaaaaatagtttagagtgagggagagcgaagggtctctcaaatactgtgctatcttttttctgtttcagttctttgaatatggttgtaaagcctccacataggtactgatttcagactgatatcagtatctgcagaagaataatacagtagattttaccatgtctgagtgtgttttgatccagtttttatcagaatatctgttctccctctctcaagaaaaaagtctttcttgtcataatctgaaattgctaacttcacattttttttctaggctttgtcatttcattgcataagtgtgatcatattctagagcattataatatgagatttctggaccatctcttaattagcttatgtttttgcagacatgggacctttatgagcgaaaggaattggttggactggtggatatgtcactaaatggggaattcgatgctgagcaggcttgtaagtttctgaagattggccttctttgcactcaagaatccccaaagcaccggccatccatgtcttctgtggtcaagatgctcactggaaaaatggatgttgatgacagtaagataacaaaacctgccttaatttctgatttactggacctcaaagttagagggaacgaagaaagtagtattgatatgaagaattcatctatgtatacaaccttttcttcagacaaccatgatactacctcgtcatttgccacaactacaaccttcacagcataatatgatgaaagcgtgtaaacatcgatcgatagagatttgtcctttaatcaaaaaaatgttttgatttgtttaggcatgtatctaatgtaaaattgcaacctttttcatactttttgagagtggttttgtttcctggatgtagtcctccatgactaggaagttgctatgtgctgtcctgtaaatataaaccgggcttgtgttcgatgataaatttgaagatcttttcatttcctatgt

SEQ ID NO: 29435 - DNA, 1330 bp, Glycine max
  Clone ID: UC-GMFLMINSOY042C11_FLI
cttcttccgccactcagcacttcgctccctctgtgcttcaccaaccatggccgaaatcgaagctaccgttccagatccctctcaaatcgacgtcaaacttttcaaccgctggagcttcgacgacgttgaggcacttcttcacttttccccctttttattcactctctgtatcgacgcttctttaaactatagcaaatttgattaattattaagtttgtcttagttattaatctagttatatcgtgaaattaccggattttgtttacgataactgtgttctgattgttattaggttaatgacgttgctctggttgattaggttaactaaaaatgtattttttgtggtatttagtttgagttacttttttgcatgttctgattgggattaggttaatgatatgtcccttgctgattacgttggggcgtggttgattagtttaactaaaatgttttcttttgttgtatttagtttgatttttttttgtgatattaggttactgatatgtctctggctgattacattggagtgtccccgtcaaagcatgctacatatgttcctcacactgctggtaggtactcagtgaagaggttcaggaaggcgcagtgccccattgttgagagactcaccaactctctcatgatgcacggaaggaacaatggaaagaagctcatggctgtcaggattatcaagcatgcaatggaaattattcacttgctcactgacctgaacccaattcaggtcattgttgatgccgtcatcaatagtggtccccgtgaagatgcaactagaattggttctgctggagtggtgaggagacaggccgttgatatctcaccccttagacgtgttaatcaggccatctatcttctaacaacaggtgctcgggaagctgctttcagaaacatcaagacaattgctgaatgcttggctgatgaacttattaatgcagctaaaggttcatccaacagttatgctatcaagaaaaaggatgaaattgagagagttgccaaggctaatcgttaaaccaacaaaggatacagtattggtgaccagaaagattttgtttcgacctttgaacttcattttcaaatattgtgtactagttttgatggctttagctattttttagttcgcacaaggatttacatgaacgattttgtttcctggacgaaaatttatatttaaagacttggagtttagtaagagcctgctttataaattgttgtgacgatttaaatggctaatggtgtcgcttctttgtttttgcctggagttcgtctgtgataattgctctaaagcccaaatctaatgtttaattagtgttgtcat

SEQ ID NO: 29436 - DNA, 1496 bp, Glycine max
  Clone ID: UC-GMFLMINSOY042E10_FLI
ccttccacacccttgagaaagaaaaaggaaatgggttctctggaagcaatcaagaagccccatgccgtgtgcgttccattccctgcacaaggccatataaacccaatgctgaaactagcaaaactccttcacttcaaaggctttcacataacctttgtcaacactgagtacaaccacaaacgccttctcaaagcgagaggccctgattcccttaatggtctctcttcatttcgttttgagaccctcgccgacgggcttccccagcctgacattgaaggcacacagcacgtgccttcgctctgtgactacaccaaaagaacttgcttgccgcacttcaggaacctcctttccaagctcaatgattccccggatgtcccttctgtgagttgtgttgtttctgatggcatcatgagcttcactttggatgctgcccaagaacttggcgtaccaaacgtcttgttttggaccaccagtgcttgtggattcatgtgctacgtacaataccagcaacttgttgaaagggaccttacaccgctcaaagatgctagttatctcacaaatgggtatttggagactagcattgattggatacccggcatcaaggaaattcgactgaaggatatccctaccttcattagaaccacagatccagatgatatcatgcttaatttcgcacgtggcgagtgcataagagctcagaaagcttctgcaataattttgaacacatttgatgccttagagcacgatatcttggaagctttctcaaccattttgccacctgtgtattccatcggccctttaaattttctcttgaatgaggtcaaggataaggacttgaatgcaatcgggtccaacttatggaaggaggagccagggtgtttggaatgtctcgacacaaaagaagtcaacacagtggtttatgtgaactttggaagcgtcacggttatgacaaatgaccaattgattgagtttgcatggggacttgccgccagcaacaaaaccttcgtgtgggttataagaccagatcttgtgattggtgaaaacgctattttacctaaagagtttgtggcacaaacgaaaaatagaggcctattgtctagttggtgtccccaagagcaagtgttggctcatccagcaattggggggtttttgacacacaacggctggaattcaacgttggaaagtgtgtgtggaggtgttccaatgatatgttggcctttttttgcagagcaacataccaattgtcggttctgttgcaaggagtgggggattgggttggagattgaggatattgagaggggcaaaatagagagccttgtgagggagttgatggatggtgaaaagggtaaagagatgaaaaagaaagctttggagtggaaaagattggcaaaagtggcagcttctagtccaagtgggtactcgttggttcaatttgagaaaatgattcgtgaagttcttatagcattttgaacgggtttttccaaggatttcttaag

SEQ ID NO: 29437 - DNA, 2128 bp, Glycine max
  Clone ID: UC-GMFLMINSOY042G08_FLI
aacgtgaagctgccggagacaacctatgtgtttgcgaacgggagcatgaacctaagggagtgtcaggatttgtgcctcagggattgttcttgcactgcttatgccaacattcagatcacaaacggaggaagcggatgcgtgacgtggagtggtgaactcgaagatatgaggctgtatcctgcgggtggacaacatctctatgttagattagcagcttctgacgtagatgacatagtaggtggctctcacaagaaaaaccatacaggtgaggttgtaggaattacaatttctgcagctgtaataattttgggattggttgtcattttctggaagaagaggaaactgttcagtatatcaaatgttaagacagcccctagaggttctttccgaagaagtcgggatttgctaacgagtgagaggatgttttcaactaatagagaaaactcaggagaaaggaacatggatgacatagagttgccaatgtttgattttaataccataacaatggccacagacaacttctctgaagcaaataaacttggacaaggaggctttggtattgtttacaggggcaggttgatggaaggccaagatattgctgtcaagaggttatcaaaaaactccgtgcaaggagttgaagaatttaagaatgaggtcaagttaattgtcaggcttcaacatcgaaatcttgttcggctctttggttgctgcattgagatggatgagaagttgctagtgtatgagtacatggaaaatagaagccttgattctattttgtttgacaaagccaaaaaacccatattggattggaaaagacgcttcaacattatatgtggcatagctagagggctactttatctgcaccatgattccagatttaggattatccatagggatctcaaggcaagcaacattctacttgatagtgaaatgaacccaaagatatcagactttgggatggctagactttttggcacgaatcagacagaagcaaacacattgagagttgttggaacatatggctatatgtcccctgaatatgctatggatgggaacttctcagtgaaatctgatgtttttagctttggagttctagtgctggaaattataactgggaaaaaaaatagaggattctattactcaaatgaagatatgaatcttctagggaatgcatggaggcagtggagagatggcagtacattggaactcattgattcatccattggcgattcatgttcacaatctgaagttcttagatgcatacacgttggactcttgtgtgtccaagaacgtgcagaagataggccaacaatgtcttcagtgttattgatgctgagtagtgaatccgcaataatgccacaacccagaaaccctgggttttccatagggaagaatcctgtggagaccgattcttcttcaagcaagaaagatcaatcatggagtgtgaaccaagtcacagtcacattactagatgctaggtagtcaaagaagcataacatcactaacacatttgtatattcctcaaaacataaaaaaatattctgtattctgtaaatcttccttcatctgatatttgcggcatctttgagatctaccttaatcttttttttgtttttgatcttaaccctctagttcatcaggagaaagaaactctaactaatccagagttcaattgggaggtaagtaaaacttgatcaagaattgtttctgctaaggattgaacttggatactacttaaacgattcaaccttaccattggcacattaattatttgttgtccaatcacttggttccttgatcttgttttgatgtaatatatgtaagagatacctttagtgaaaagaaaagcacactccttagcttaaggcttgaaattactttcagccgataatatgtagttttgttatttactcatgcggttgtttgtatgtctagcagtcgcagacttggacactgtcttaaactgagtcaggtttataatctaattggatttaatgctgagtttagttttggtgtggcttacacttttgttgaaatataagtgtgaggtaaagtcccattggtgtaatatctctctgcccttatgggcacaggtggtgttttcatttttagggaaacagttactatt

SEQ ID NO: 29438 - DNA, 982 bp, Glycine max
  Clone ID: UC-GMFLMINSOY042H09_FLI
ttgaatcgagtaccctagcgtccccgattacattcttctacttccagccaccctccaccgttcttccctctcgtcttatctcaccttcaacgagtttcaatcattagctctagcatatcctggatttgagctttaccaatggctgatgactctgctaaaggaattgaaaatgcttctttgaactcaacacaactagagaaccctcagattgagcccataagactgccctcagtagaggaaatccgtggtcaagacatttggaacaattgtgcagtgcgcagtgttgtcagtggagtcatgggtggtgggcttggcatcttcatgggtttatttcttggagcactggacaacccattgatgcaggaggaaatgactggcagacaacaatttatatatcaagcaaagcagatggggcgaaggagttggagttcggctaaagcatttgctgttatgggtttcatattctcagctgccgagtgtgttgttgagaaggctcgagcaaaacatgacataacaaataccgttgttgctggatgtgcaactggaggtgcaatatcagcaaaaggtggcccaaaagcagcttgtgctggttgtgctggctttgcggcattctccgtcgtaattgagaagtttttggagagacatcagtaagggaattgatattagcctaacatattttttgagttcttggtgaagtccttttgcccatttgatacgggacgcgattggggagcacacatattgcggtagttatatcaataattttgttgtatacgatgtcattgacaaatgcagttctaatctggagaaagctgatgtaatgatttgatttagtactaagtaattgaaatatagttgttttctttatgtattcgtatgtctgaataattctatggtgtattcattattcaccgctgtcattatctattttggtgaaaaaaacataatttggctgttaggtaaaaattgaatgtggctatgc

SEQ ID NO: 29439 - DNA, 2290 bp, Glycine max
  Clone ID: UC-GMFLMINSOY043B10_FLI
gctattcctgatttcagttcaatatccaagcttacctatttagatcttagctggaatcagatcactggacccataccatcaaataaagtggcagacaatatgacaacttttgatctgtctaataatcgtctcaatggatccattcctcacttcttttatcctcatcttcaaaaattgtcacttgcaaacaatttactgtctgggtctatccctggtagcatatggcagaacatgtccttcagtgcgaaagataaacttacaattgatctccagaacaactcattttcagatgttttgggaaacctgacccccccggaaaatgttaccttgaggctttctggtaatcctatctgcaagaattctaacatacaaagtattggtcaatattgtggacctgaagcagataataaggcagcccaagattcaacaaactcaactttctgtccagttcaatcttgtccagtggatgacttttatgaatatgccccctcttctccagttccctgcttttgtgcagcacctctgagaattggatacaggctgaaaagtccaagtttttcttactttgctccctatagaagtagttttgaagactatataactaggtccttagacttagatctctatcaactatcaatagattcagttgcttgggaagagggacctcgtcttagaatgtatttgaaactcttcccttcctataatgattccggttctagtatgttcaatgaaagtgaggtccatcgcattaaaggcatatattcatcatggcactttcctcgcactgatttttttggaccatatgaactgctgaacttcactcttcttggaccttatgcaaatttaaatgttgattcaaagaagaaaaagaataatgtgggcataaaaatttctgctgtgatagcagctgttgcttgtgctttagcaatatctgcaataatcattctcctgatttctaaaagaaatatgaaataccagaagaagatttccaggaaacgaatgtctactaatgtatctatcaaaatagatggcatgaaagcatttacttacaaagaactggctattgctaccaacaaatttaatatctcaactaaagttggccaaggaggttatgggaatgtctataaaggcattttatctgatgaaacttttgtggctgttaagagagcagaagaaggttccttacaaggacaaaaggagtttctgactgaaattgagcttttgtcaaggttacaccatcgaaatcttgtctcgctgattggatactgtaatgaaaaagaggaacagatgctggtttatgaattcatgcccaatggaacccttagggactggatatctggtaaaagtagaaaaaccaagggaagcctaaattttagtatgaggttgagaattgcaatgggagcagccaaaggcatactgtatctgcatacagaggctaaccctcctatattccacagagatattaaagccagtaacattcttctggactccaagtttacagctaaagtggccgattttggattgtcacggcttgtaccagacttatatgaagaaggaactggtcctaaatatgtgtcaacagttgtgaaaggaactccaggttatctagacccagaatatttgttgactcataagctgactgacaaatgtgatgtctatagcctgggaattgtgtatctggagcttttgacaggcatgcaaccaatatcacatgggaaaaacattgtccgcgaggttaatacggctcgtcaatctggtacaatatattccataatagacagcagaatggggttatatccatctgattgtttggacaagtttttaactctggccctcagatgttgccaagacaatccagaggagagaccatcaatgctagatgtggtgagagaactggaagatatcattacaatgttgcctgaacctgaaactcttttctcagatgttagcttactcaattctggtaacatagcacccccatcatctgcaacaacatcaacatcaaatgtgacaagggaggagcaacacatgtcctcatatgtttcaggaagtgatcttgtcagtgatgtcattccccccgttgttcctcgctgatgctgtactatgctatagtctccttcatatattacaaaaaatttaattataatttttttatactaagattttgataaatggtaaaggcaggaagtttattagagacatagctattatctgcagatgaggtgtaaagaaaaagagaatgatacatacaactactacattttaagaaaataataataatatgtttatc

SEQ ID NO: 29440 - DNA, 1242 bp, Glycine max
  Clone ID: uC-gmflminsoy043b11_FLI
gttgcagagaaacacaaacactgaaacactcaagtgagttcgatagtatatttgtttttctttttcacaaagatggtgagaaccccgtcttgtgacaaaagtggaatgaggaaaggtacttggactccagaggaagatatgaagttaattgcttatgtcactaggtatggctgctggaattggcgccaactccccaagtttgcaggtcttgcaagatgtgggaaaagttgtagattgagatggatgaattatctaaggcctaatatcaaaagagggaacttcactcaacaggaagaagaatgcatcatcagaatgcacaaaaaacttggtaacagatggtctgctattgcggttgagttaccaggaagaacagataacgaaataaaaaatcattggcacaccgcactcaagaagaggtctcaacaaaacacactcataaatgaagaaaccaaagccatcaaatcaaagaataaagaatcagttcacaacaacggtgtatttgttactcttccagcaacttctcagatttcagataattcatcattatcgccagtttcatccacctgcagcgagttttcctccataacttctgatctttccactgctgccagctgtatggaaaatttggtgtttgaagatgatgacttgggttttctggatttatacaatattgatcctatgaatggaaatttgtggacagaactaaatctcgatggcatttccttcaatacaccatgtgaaatagtttcaggagatactaatagcactttccaaagctcaagttctagcaatagcaacacccttgattctccgcatcaatcaaccagcgaaagtattgttgtgaataatgactttggtcgctttctcgattcatacgaagaggcaacagtcgataacttttggacacagtcatatgtagctgacatgtcccacgttccaagcgaactatttgttccctccgtggcagaatctgaatattttactccattatatgatgatctgtggggtcaaactcatttgtaccatgaaaatcattgcttattctgatgaacaaaattactccatctctagagatcaatagttttgagagtgttattagagttggtgattccaattcttgatccaacctagatggatgaatctttttatatttttggcttaggggtttgtatagtattgtagcagttgctctcctatatttctcttgtaccaattttttataaagtgaattgcttctgcttt

SEQ ID NO: 29441 - DNA, 1527 bp, Glycine max
  Clone ID: UC-GMFLMINSOY043C10_FLI
cttgatgagacgcaaatcagagtcatccactcaacagggccattcatggctgcctttacccctttatggaaactctcttaccatgacaaagaattcaacaatttcacagaagagtggaactgcaagctgcatttctttagcttcatcaaatcttggacgattcttcagtttccaagaaatcctagatgctagcaacaaatttgatgagaagctacttcttggtgtcggtggttttggaagggtttataagggaacgcttgaagatgggaccaatgtagctgttaaaaggggtaatccgagatccgagcaaggccttgctgaattccggacagaaattgaaatgttgtccaagcttcgccattgtcatcttgtgtccctcattggttattgcgatgagaggtcagaaatgattcttgtgtatgaatacatggctaatggacccctccggagtcatttgtatggtacggacctgccacctctatcatggaagcagcggcttgagatttgcattggagcagcaagaggccttcattatctccacactggcgcagctcaaagcattattcatcgagatgtaaagacaacaaatatcctcttagatgagaactttgttgctaaagttgccgattttggcctctccaagactggtccttctctcgatcaaacccatgtgagtactgctgttaagggtagttttggttatcttgatcctgaatacttcagaaggcaacagcttactgagaaatcagatgtgtattcatttggggtggtgttaatggaagtgttatgcacaaggccagccttgaaccctgtccttccaagggagcaggttaacatagctgagtgggcaatgacctggcagaaaaagggtatgcttgaccaaatcatggatcaaaatcttgttggcaaggtgaatcctgcttcccttaagaagtttggggagacagccgagaagtgcttggccgagcacggcgtggaccggccatcaatgggagatgttttgtggaatcttgaatatgcattgcagcttcaagagacctcatcagcactcatggaaccggaagataacagcacgaaccacatcactggaattcagttgacaccccttgaccattttgataacagtgtgagtatgattgatgggggcaactcttgcactgatgatgatacagaagatgttgccacaagtgcagtgttctcacaattggtaaatcctcgcggaagataagctcttgtgtatccacaattctggccaaaggccatcaaagtaattctggtctgattggtgaatgaaggttatttcttatttagttactgcttttgtaatccatttttccccacaatcaatttcctttgtaatatacttgagtgatagtgatgggtgccactaagctggttagtaattgcatgcaaggtaccccataaaattctgttgtactaaatataaaccaattaggagttctgctcctcaagttgttcttacaccttacagtatatgaaggttataagttctttcttatgaacatg

SEQ ID NO: 29442 - DNA, 2408 bp, Glycine max
  Clone ID: UC-GMFLMINSOY043C11_FLI
ggctgctgcagtcaaggatgcacctatttcagtcagtcgggtcacatggagccctgatggaagttttgtgggtattgcttttactaaacatttgattcacttgtatgcttacactggaccaaatgagctaacccagcgtatagaggttgatgctcatgttgggggtgtgaatgacttgtcatttgctcatccaaataaacagatgtgtattgtgacttgtggagatgataagttgataaaggtatgggatttaaatggacgaaaactattctcctttgagggccacgaagcacctgtgtattccatttgtccccatcacaaagagaacattcagttcatattttcaactgccattgatgggaaaataaaggcatggttatacgataacatgggttctagggttgactatgatgcccctggtcactggtgcactacaatgctttacagtgcagatggaactaggttattttcttgtgggacaagtaaagatggagagtcttttcttgttgaatggaatgaaagtgaaggcgccatcaagagaacatacaatggattcagaaaaaaatctactggtgttgtgcagtttgacacaacccaaaatcgctttttggctgcaggtgaagatggtcaagttaagttttgggacatggacaatattaatcttctaataagcagtgatgccgatggaggattacagagccttccacgcttgagattcaacaaggaaggtaatattcttgctgttactaccgtggacaatggtttcaagatacttgctaatgcttctggtcttagatctttaagaaccattgaaactccggcatttgaagcattgaggtcacccattgaatcaactccaattaaggtatctggctcttctactgttaatgttagtccggtcaactgtaaagtggaaagaagctcccctgtcaggccttctccaattcttaatggagttgatcccatgggccgaagtgcagagaaaccaagaactgtggaagatgtaatagatagagctaaaccatggcaactatctgaaattctggatcctgtccaatgtcggtcagttaccatgcctgagagcacagattcttccagcaaggttgtcagacttttatatacaaactctgctgttggtattttggcccttggttcaaatggtatccagaagctttggaaatgggctcgcagtgaacagaatcctactgggaaggctactgccaatgttgttccactgcattggcaacccaacaatggtcttcttatgactaatgatatctcgggcgtcaaccttgaagaagcagtaccttgcattgccctctcaaaaaatgactcatacgttatgtctgcctgtggtggaaaggtttctctatttaacatgatgacattcaaggtaatgacaacattcatgccgccgcctcctgcttctaccttcctagctttccatccccaggataacaacattattgccattgggatggaggattcaaccattcacatctataatgtcagagtcgatgaggtgaaatcaaaattgaaaggccaccagaagcgtattactggtttagctttttctaccaatcttaacatactggtctcatctggtgctgatgctcatctttgtgtgtggagtatagacacatgggagaaaagaaaatcaattccaatacagctacccgcaggaaagtcacctgttggtgatacacgagtacagttccattctgatcaacttcgcttattggtagttcatgagactcaattggcaatatatgatgcctctaagatggaacgcattcggcagtgggttccccaagatgttctgtctgcccccatatcgtatgcagcttattcctgcaacagtcagttaatatatgcgacattttgtgatgccaacattggcgtttttgatgctgatagcttgaggctcagatgtcgtattgcaccatcaatatgcttgtcaccggcagctttaagtggaagtcaaggtgtgtatcctcttgtggttgctgcccatcctctagaacctaatcagtttgctgttgggctgacggatggatctgtcaaagtgatagaaccgaacgaatcagagggtaagtggggaacctccccacctatggacaatggaatattgaatggtagggcaggatcatcatctacaacaagcaaccacaccgctgatcaggctcaaagataagatcaaatgtattttactagttattttcatctgtaattgtatcagcttagatgtttagatttcgattcaccaatatgtctcatcaatatcatgtcagcttggacataaaatggtaaatgcttagacgtagaatcgtgtatacccttgatttattctagttaataactcaattttattgtttatatttatgttgtaatgtccttgtatcttgctt

SEQ ID NO: 29443 - DNA, 2420 bp, Glycine max
  Clone ID: UC-GMFLMINSOY043G02_FLI
cctggtttgtggtgcttcagagactgcagaccttccgtctaactttgtaaaacttgctaaagatgcatatacgccggacattattgcggcatctgactgtatgcttggaaaaattggatatggcactgttagcgaggccttggcatacaagtgtccttttgtctttgtacgtagagactatttcaatgaagaaccttttttgagaaatatgcttgagttttatcaaggtggtgttgaaatgattagaagggatttactgactggtcactggagaccttatcttgaacgtgcaataagtttgaaaccctgctatgaagcaggcattaatggtggtgaggtggcagcccacatcctgcaggagacggcttttggaaaaagttatgcatcagataagcttagtggagcaagaagattgcgtgatgccatagttcttgggtatcaactccaaagggcccctggtcgagatattacaatcccagaatggtatgcaactgctgaaaaccaacttggccgctcaacacctggttcccctatggatgatggaagatctgcgtttagcttggacattgaaaactttgacattcttcatggagatattcaaggacttccagatactgtggcattcttacagaacctatctgaattacaggacaagcacactaggcgggagcgtaaggctgcggctaatctcttcaactgggaggaagaaatatttgtaacaagagctcctggaaggttggacgtcatgggtggtattgctgactattctggaagtcttgtcctgcagatgccaattaaagaagcctgtcatgttgctttacaaagaaaccatccaagtaaacataggctgtggaaacatgctgaggctcgacagaatgacaaagggggaaatccaactgctgtcctgcaaatcgtatcatatggctcagaattgagcaatcgtggcccaacatttgacatggatttatctgattttatggatgaagaagacaaaccaatctcatatgaaaaagcaaagaaatactttgctcaagatccttcccaaaagtgggcagcatatgttgcaggggcagttttggtcttaatgactgaaatgggtgttcaatttgaagacagtatcagcatgctggtttcatctgcagtcccagaaggaaaaggcgtatcatcttctgcatctgtggaggttgctagtatgtatgctattgcagctgctcatggattaaatatcagcccaagggatctggccatactctgccagaaggtggaaaaccacattgtaggcgctccatgcggtgtcatggaccagatggcttcttcatgtggtgaagccaacaaacttcttgctatgatttgccagcctgcagagattgttggccttgttgacattcccagccatatccgtttctggggaattgattctggaataagacacagtgttggaggtgcagactatggttctgttagaattggcgcctttatgggtatgaagatgataaaggccaaggcatctgaggaattgtctgagagttgggctgctaatgggttgaactatgatgaagtggaacaagatgacatagaactacttaaacaagaaacctccttagattacttatgtaatttgccacctcatagatttgtgactctttacgctaagacaattcctgagtccattgtcggtgagacatttttggagcaatatcaaaatcataatgatcctgtcactactattgatccgaagcgtacttacggagttagagctcccacaatgcatcccatatttgaaaatttccgagtcgtgaccttgaaagcacttttaacatctgcagcttcaacctatcagcttacagccttaggagaattgctatatcagtgccaccacagctacggtacttgtggacttggctctgatggaacagataggcttgtaaacttagtgcaagagttgcagcacagtgcagcatctaaagctgaaggtgggacattatatggagccaagataactggtggtggttctggtggaacagtttgtgtagttggcagaaactgtctcaagagcagtgaacacatttttgaggttcaacataggtacaagaaagctactggttatttgcccttcatttttgaaggttcatcacccggtgctggaaaatttgggtacctaaaaatacgtcgtcgagctaccccaaaaaaggctaacgccatcaaggatgatggtgcactcacctcagaaaaggctaacgctagcaaggatgatggtgcagtcacgatgaagaataatagttaatcatggcttatatttaaccactttaagagttctacctttgttgtctttccccagaacatgtatagtatggttaaattttgaaccatttcaacaattattaacatttttaaagcactttattttattactttttatt

SEQ ID NO: 29444 - DNA, 1438 bp, Glycine max
  Clone ID: UC-GMFLMINSOY043H04_FLI
cggaaattgaatggtacccgggaaaatgtttgactcagaaggttttgaagaaaaagcctaagaagggttcaaagaatgctaaaccaattaccaaaaccgagagctgtgaaagtttcttcaattttttcaaaccaccagaagtccctgaggatgatgttgacattgatgaagatttggtatgacagtctgtcccaataaacctaaggctaaaaatatgaagcttttgtctattgctataataacttaattttttcaacaggctgaggaacttcagaatcagatggaacaagattatgacattgggtatgcctaattgctaccttttgcttgtatgagctaccttatatatgagctaccttatatttttcttgtccaagctgttgcttgctcttagcataatttttcttgtccaagttgttgcttgctcttagcataatttttcttgtccaagttgttgcttgctcttagcataatttttcttgtccaagttgttgcttgctcttagcataactgttgttgctacttgcacctgtattcttgaatctgttcttagttaatcttgattcctgtgtaggtcaacaataagagacaaaattatccctcatgctgtatcatggtttactggggaggctgttgagggagacgagtttgaagacctggaagatgatgaggatggagatgacgatgaggatgatgaagaggaggatgaggacgaagatgatgatgacggcgatgaagaggaggaagacagtaagactaaaaagaaggtatactgttaattgatatggagtgttgaaaccttggtttattctttattttatttgaggtttgaacgtgagttaatgcatttgtttttcacctgcactgtgttgtcaatttcctctggaatgttgctgcagtcatctgctgttaaggtgagatattttgattttgtgatctgaatgaaattatatggacacatgattttgcccaagatatgtcatgtgttttctgttataaatttgttttgcttgatgttgtatactttacattctttatttttcattgctctggtcattgcattcctgatttccattttgggttataaattttcagaagagtggaagggcacaggctggtgatggtgagcgacctccagagtgcaagcagcagtaattgtttatttcttcggagtgtcatgtggctgatgggtgtttttgaggtcctatggtgcgcctgatggaaaagtgggtttcagtttcatgcaatttttcatggtccttgattcattttcctccttagatcctatagtctgaatttattgagagtccatttcttctttttcccatccattttgagagaatgtggggttatattatagtcagggatgctgtgatttgttactgttggaatttcattccagatacttaaaatatatcataggttgtgctttgttact

SEQ ID NO: 29445 - DNA, 3941 bp, Glycine max
  Clone ID: UC-GMFLMINSOY044A04_FLI
gtttggatgaaccctttgctgaataaagggtaccaaacacccctcaagcttgaagatgtgccttcacttcctattgatttcagagcagagaaaatgtcagagcttttccatagaaattggccaaagccagaggaaaacagcaagcacccggttggactaaccttgttcagatgcttctggaagcacatagccttcactggcttccttgcaattataaggcttggagttatgtacattggtccaatgcttattcagagtttcgttgatttcacttcaagaaaagacagcaccccctatgaaggccttgttctgatactggtcctgtatttggcaaaatcaaccgaagtcctctctgtgcaccaattcaattttcactctcagaagctcggcatgctcattcgttccagcctaatcacttctatctacaaaaaaggtctgagattgtcgagctcttcaaggcaggctcacgggaccggacagattgtgaaccacatgtctgttgacgcacaacagctcgcggatttgatgatgcagtttcaccccatatggctcatgcccctgcaggtaactacagctctggtccttatctacagcaacattggcgtgtcggctttcgcggcgctgcttggatcgagtattgtgtttgttttcactctcttccggacaaagagaaccaacagctttcagtttatgataatgaagagccgtgacttgaggatgaaggcaactaatgaattgttgaacaacatgcgtgtcatcaagtttcaagcctgggaggagtactttggcaacaagattggcaagtttcgcgaagcggaacatggttggattgggaaattcttgtactactttgctgttaacatgggggttctgagctctgctccgttgttggtaactgttctcacgtttggaagtgctactcttcttggtgttcctctgaatgctggcactgtatttacaatcacttcagtcatcaagattctgcaggagcccgtgaggaccttccctcaggctctcatcgtcatttcgcaggcgatgatttctctcgggaggctggatgagttcttgatgagcaaggaaatggatgagggagcagtggagagagtcgagggctgcaacggcagcgacacggccgtggagatcaaggatggcgaattctcgtgggacgatgtagatgggaatgcggctctgagagttgaagagatggaaatcaagaaaggggaccatgctgctgttgtgggagctgttggctctggcaagtcttccttgttggcttctgtgttgggggaaatgttcaagatatcaggaaaggtcagagtttgtgggtcaatagcctatgtagcccagacatcatggattcagaatgcaaccatccaagacaacatattgtttggtttaccaatgaacagagagaagtacagggaagccataagagtgtgctgcttggaaaaggatcttgaaatgatggaacatagagaccagactgagattggagaaaggggtattaatctcagtggtggccagaagcaacgtgtacaacttgctagagctgtgtaccaagactctgacatctatctccttgatgatgtattcagtgctgttgatgcacaaactggatcatttatttttaaggaatgtattatgggagctctcaaaaataagaccataatacttgtaacccaccaagtggacttcttgcataatgttgactgtataatggtaatgcgagaagggaaaatcgtgcaaagtggcaagtatgatgaacttctcaaagcaggcttggattttggtgcacttgtggctgctcacgaatcctctatggagattgcagagtctagtgatagagttggtgaagattctgctgagtctccaaaacttgctcggatcccttcaaaagaaaaggaaaacgtgggcgaaaagcaacctcaagaagaatccaagtcagataaggcttcagcaaagctcattgaagacgaagaaagggaaaccggtcgtgtggacctcaaagtgtataaacactatttcactgaagcatttgggtggtggggtgttgcactgatgctggcaatgtctctagcatggattttatccttcttggctggtgactactggctagcaattggaactgcagaagatagtgcctttcctccttctacattcatcattgtctatgcttgcatagcaggtcttgtatgtactgtggtgatgatcagatcagtcttatttacatattggggtctaaagacatctcaaagcttcttcagtggaatgcttgaaagcatcttgcatgcaccaatgtcattctttgacacaactccctctggcagaattttgagtcgtgtatctactgatatactttgggttgatatctcaattccaatgttggtgaacttcgtcatggttgcttacttctcagtaaccagcatcctcattgtaacatgccaaaatgcttgggaaacggtcttcctcttaatcccactgttctggctgaataactggtatcggaaatattaccttgcatcttctcgggaattgactcgccttgattccatcaccaaagctcctgtgattcaccatttttcagaaaccattgctggtgttatgaccatacgcggcttcagaaagcagaacgcattttgtcaagaaaatattgacaaagtgaatgctagtctgagaatggatttccacaacaacggtgctaatgaatggcttggttttcgcttggactatatgggagtgattttcctttgctttgccactatttttatgatctttctgccaagtgctattattaagccagaatatgttggtttgtctttgtcctatggcctggctctcagtagtctcttggcatttaccataagcatgacttgttctgttgagaacaaaatggtttcagttgagagaataaagcagttctccagccttccctcagaagctccatggaaaattgctgacaaaactcctcctcagaattggcccagtcaaggcattattgagttaaccaatttgcaggttcggtatcgaccaaatactcctctggttctcaagggaatctctctcaccattgaagcaggagaaaagattggtgttgttggtcgtacaggaagtgggaaatcaaccctcattcaggtgttatttaggttgattgagccttcagctgggaaaataactgttgatggaatcaacatttgcaccctgggccttcatgatgtgaggtctagatttggaattattcctcaagagcctgtcctctttcaaggaacagtacgaagcaacattgacccccttggactgtattcagaggaagaaatttggaagagtcttgagcgctgccaactgaaagatgtggtggctgcaaagccagagaaacttgaggctccagtggttgatggtggagacaattggagtgtggggcaaagacagcttctttgcttgggaaggatcatgctaaaaagcagcaaaatattgttcatggatgaggcaacagcatccgttgattcgcaaactgacgctgtgatacaaaagatcatccgtgaggactttgcggatcgtacaattatcagcattgctcatagaataccaacagtcatggattgtgacagggttttagtcattgatgcaggctatgcaaaggaatatgacaagccatcgcgtttgctagaaaggcattcactttttggagcattggttaaggagtactctaatagatcagctgaactagaggcttagattctaacaaggacccagttgatgcactcagtttccatccaacacacagcaccaaagtcaaaagacatgagtcgatgggtctattgagagatcaatatttttgagcattagttttgatgttttactctttcagtagtttaataattagactaggacaataggaaggaaattttaaaattttttactaataaaaaatcaagtttggctgc

SEQ ID NO: 29446 - DNA, 1373 bp, Glycine max
  Clone ID: uC-gmflminsoy044a10_FLI
ataggagtaccatggacagaagaagagcaccgaacgttccttgttggacttgagaagctgggaaaaggtgattggaggggtatctctagaaactatgtgacttcaagaaccccaacccaagtcgctagccatgctcagaagtactttattcgccttgcaaccatgaataagaaaaagagacgttcaagtctttttgacatggtatatatatacatagatccatcatgatcaacttcctaattatctcatcttatatcaatcacatatccatatatatgcacttaaattagttttttttataatacattttatacttttactatattctaattacttaattgataattaatttaattgataacaataaatttatcttaaatttataattttttaaaattatccttattattaatacttttctcttaattatttactaatatattattttttttctttgaaaaatatttgtagtttaaaaataattaatttaaaaaatattatagttccagtattagaaaagaaaaaaacaaacatcataggaagggaggcaataaataatttaattttctcgataccatgtgattggatatcaattatggcaggttggtaacggcatcacaaatccaattagcagctctaactgcaagtcttccaaatgtgaaattgaggatgatgtgaccttgtcacttgttcaattacaagatactaaattagatgagcagaaagatagtgataaatattgtgaagctggaccagcaggtgctgaacatgaagctgtgcctttgtggcttcatcttcagatgaaatcttcaaataataatgttgcagcagtagttcctgatctggagctcactcttgcagtctccaagggcaaggctaagaccctgctaggcctggaacaaacacaaacaaaatcatccccagattccttccttcttggaccaattagcgtgacttgagctatgaattctctagggttaatgcagttgcacccctcggcccctctttatttgttgtcaagtacaagatcttctgttcaaaaaagaaattaaacacatttttcttgttggtagtcattaaccaaccactaatctatgcaattacatcccttcatgatatataccgtacgttacatagagtagttgattactttatatacatcaatcaaaatctctctttgcatcactgcaaattaattagttcaatctgttcaacggaattattaaccaactatgaaattttagatacttttttgttcgcaattggcaagtcatccataccttcctaccgaatattatgtttcatatataccttttttcttttctttctaagttatgtttaatatatacctagtgtaccaaaagcttgttttc

SEQ ID NO: 29447 - DNA, 1140 bp, Glycine max
  Clone ID: UC-GMFLMINSOY044B02_FLI
caggaataaaattagcattgtggaagctggtgcattagagccaataattagtttcctcaagtcacaaaatccaaatatgcaggagtatgcaactgcatctttgctcactctatctgcctctccaaccaacaagccaatcattagtgcttgtggcaccattcctcttcttgtgaatattctaagagatggaagccctcaagctaaagttgatgctgtgacggctctgtccaatttatcaacaacacaacctgaaaacctcagcatcattctccaaacaaatgcaatgcctttaattgttagccttctcaaaacctgtagaaaatcctcaaaaatagctgaaaaatgttctgctttgatagaatccttggtaggttatgaggaggggagaacttccttaacatctgaagaaggtggagttcttgcagttgtggaagttcttgaaaatggtactccccaaagtagggaacatgctgttggagcactgctgacaatgtgccaaagtgatagatgtaaatatagggaaccaattcttagagaaggtgttattccgggacttcttgagcttacagttcaaggaacccccaagtctcagccaaaggcacgtacccttttgcagttactaagagagtctccatattcaagacctgaagctgaacctgacactcttgagaacatagtgtgtgacatcatatcacagattgatggggatgatcaatctggtaaagcaaagaagatgctagctgagatggtccaagtcagcatggagcagagtttgagacatttacagcaaagggctcttgtatgtacccctagtgaaatgcctattgcaagttgtgcttctgaagtttcttcaaaatattagttggggctcttcttaatttgtatcttttcaccctttttctctctactctttttctttccagttggaactagcaacataaattttctgtaacatataaagagaaaagaaaactgaaaaagaaaataacagtaaaaaaatgccagtccaggccatcgtgaaggtatcgagtgactggtaattgtcaataaaaatgatgttgtgtgatgataagagcatggtttttctagttgatttgtaaaggaactgttgtataaaataatttgcagaagtagttaagc

SEQ ID NO: 29448 - DNA, 538 bp, Glycine max
  Clone ID: UC-GMFLMINSOY044D08_FLI
ttattggtgggccaagagctttagatggaagggtaattgaaatcaatgcttgtgtcccaggtgaaggtgtgccagagtggaacctgcttgctagcaggcaatcggggagctttgtgtataactgtgcagtgatgggatgctgaggcatttgcttttggtgaatagtgttatatggatttattctgaatggaaattaacattcttcaatttcaaggagagatgattctggctcttgggtaatcagcccaccttttggggtaaatgtttagtcctatttagagtaacagatacagttttagaaggttcacaaaactgagtcttttcattttaagttatcatgatggtttttcaaatgttgacaccatgactggtgaataattagctcttggtacatgttggggttgcaatcacctttttcataagttcaattgaagtgttgcagaattgtaactggtctcagtttttgtctttttttttttttttttgctttctgttacccctttttaaatatgtattctaattgtcttcagatcttccc

SEQ ID NO: 29449 - DNA, 1547 bp, Glycine max
  Clone ID: UC-GMFLMINSOY044F12_FLI
ggaacttggctcaccggcagtttcaatctcacaagcaatttcacgctttttcttcaccacggtgccgttattctcgcctctcaggacccaaaagaatggccaataattgagccattgccatcgtatggaagaggcagagagaggctaggaggaagacatattagccttatacatggaaatggcattagcaatgttgtcattacaggacaaaatgggacagtggatggtcaaggaaggatgtggtgggaactttggtggaacagaacattggagcacacgagagggcacctccttgagctaatcagctcggataatgttcttatatcgaacctcacctttcgaaattcccctttttggaccatccatcctgtttactgcagcaatgttgtggtcaaagggatgacaatcttggctcctcttaatgccccaaatactgatggcatagacccagactcaagtaccaatgtatgtattgaagataactacatagaaagtggggatgatcttgtagccattaagagtggttgggatcactatggaataaccatggcccatcctagcacaaatattatagtaagaagaatatcaggcactaccccaacttgttctggagtaggcataggtagtgaaatgtctggcggaatttcaaatatcacaattgagaatttgcacgtgtgggattctgcagctggtgttcgcataaaatctgacaaaggcagaggaggctacataacaaatgttagtattagtgatataagaatggagagagtgaagatacccattaggttcagtagaggttcaaatgaccaccctgatgatgggtgggatccaaaagctgttcctagattcaaagacattttaatcagtaatgtggtcagtgtaaattcaacaaaagccccggttttggaaggtgtagagggttcatcatttgaaggcttgtgcttcaaaaacattaccctacatggtgtagccttatctgcgagatggcgttgtgaatatgtctctggttttgccaccgaggttttccctgttccatgtcctgagttgcggaacaatagctattcatcctggtgttcagcttcctgatctgctatatggatcctggatggttcaaagttccagcaaaggaaaaagcaggcttttgctcacattatgatttgatgaagcagttttcagtgttgcttaagtatattatttttgtgaggcacaacaaattgagctgaattgaactgggttttgaagcctgaattaaggtgacaatttcctattttgggtggcacgggcatataatctgatgagtaaggtttgtgattggaacgtgcagagtattatttgattgatattgtgccccctctctcgccacggttggtggctatagaacatggagtttcaatgcacattggtttggttagcggggaagcaagtgattcttttgttttactcaacgagatggtttttttaacatttttttgttactgttgtatagggcagtttattcttggttggagagcccaaagttgaatatagagtgaaccaattcattgaac

SEQ ID NO: 29450 - DNA, 3140 bp, Glycine max
  Clone ID: UC-GMFLMINSOY044G01_FLI
attattgagggactctgaaaatttcactattcattaccttactgaaaaaggatcattgctgaagattgatatggaaaagcttgtgggatctcttcctttgcaccttactacactgctgatgtcagctgttagagatgaagccctgttcagatacttattatgtggcattcgattattgcactccttgtgtgaattagcctcccgaaattctaagttcgagcagattgtgctagatgatgtgaaaatgatggaacagctgactgacttggttttctacatgcaaattgttcttggtggttacagacaggaatactgtgcttttagttatatgcaccttatgcattcaactcttgtagcctgcaatttacatcttttaacagcgtttatttcaacacaatggcaagatattgttcatgtattgcttgcgcaccccaaggttaacatatttatggatgcagcttttggatcagttcgcatggttgttagttttcttgagaatacactggtagcatatcatgaagatatttctgtggaatcaaatcttacagcagaacaaatggtttattatctctgtcagcagtgtgaagcttctctgcagtttcttcagtcattatgccaacaatttttttttaaggagcgcctgcttaagaataaggaattatgtgaaaagggaagcattctttttcttgctcaatccatcttgaagttacacattcagccatcttttccatccaggatcatggcagctatttctaggctaaaggctaaaatactatctattctgctgagtttgtgtgaagtggaaagcatttcttaccttgacgaagtagccagctcagcacgaagtttagatttggctaaatctgttgcattagaggtttttgacttgttgaagaaaacttttggaagagatcctggacatctcactgctgacagaagtttcccaatggggtttgtacagctcaatgcaatgcgtctagctgacatcttctccgatgattcaactttcgatcttacatgatactttgttttactaaagttctgacagcaataatttcgctctcccatggagattttttatcctgttggtgttcatctaatctcttaaagatggaggaggatgcaagtcttgaatatgatatatttgctgcagttggatggattttggattatacttcactggatgtaagaaatgctacaaatttggaattcaacctaatccctaacagcatgcctaaggcttcttatgcacatcataggacatcattatttgtcaagttctttgcaaatcttcattgttttgttcccaacatatgcgaagagcaggagaggaacctttttgttctcaaggtcatggagtgcttgcaaatggatttatctaacttgctgccggggttttcttttgcttctgatgctcctaaagctgccattgctagcaagaacctccactcattgttaagtcatgcagaatctctgattcctaacttcttaaatgtggaggatgtgcaacttttaagagtgttttttggtgaattacaatcactatttacgtctactggatttggggaaaatcaagtccaagatagcaaatttgaggagtcattatattgggataagctttctaaattcaacaggaatgaacattatcagaaggcacagagtgcagggggatgcccgtcatctttaactggaaaagaacatgccgatcttaataagaagggtggcaacttcaaggaaggaatgtctgagaattctgcatttccagacatggaccaacataataccagagctgaagacacaaatcaaggcaagggcctaaataggctaaatcaggtagatgataaaggcatagctggtaaaactgcatctggaggagctagagaaatggacaaggatgctcagaatgttgaaacaagtggttcagatagtagttctgcaaaaggaaagaatgttgttgataatatggataatggagagctttcaaaatcgaatgagcgtcttaaaagaactgcagttgaggaaaatccagaggatgaaaagattgaactttcacaaaggagaaaacgaaaacgaacaataatgaatgataagcaggtgatgctgattgagagggcactcaaagatgagcctgatatgcagcgaaatgcagcttcacttcaatcatgggctgataaattaagtgggcatggttccgaggttacatcttcacagcttaaaaattggttgaacaatcgaaaagctaggctagctcgcacagctagggatgttaaagcagcagcaggtgatgacaatcctgtcccagacaagcaaagagggccagtacctgggtcctatgactcacctggcagtccaggtgatgtatcacatgttgcgagaatagcttcaggtgataataaatccgagccttctctggctctggctcggtttgttgatattggttctccagaatttggtcattgcaatgcaggtcaatatgttgtgctcgttggtgtacgacaagacgaaattggcagaggaaaagtgtttcaggtgcatggtaagtggtatgggaagagcttggatgaattatccgcccatgttgtggatattagtgagctcaaagctgataaaggcatgcggctaccttatccatcagaagccactggcaacacatttgcagaagctgaaactaagttaggagtcatgagggtgttatggggttcaaacagagtttttgcattgccacctgaatgaatttaatcatgcttcattagcggcaatctgttgtcaatcttccttgtggttccctgtatgcgcatgtttttttttcccataaacattagctgaagcgataacagatgggtttgctatgaagaacaatactgaatagtaaagtctccagtttgttagccaaggatgggtagaaagtagaagaggacaattatggagaaaacaaggttgattcagcaatgaaagatagtttagtttaggatataaacaagagctgtagtcagcagcaaaaatgttggtagggtcttgtacaaaatttgtttctcagaattttccctgcagcatggcaattgacaatatgtgaaactatggtaacgagtgatgagatctgaatttaacttaaagggaaactgtgaacgtaaattctgttt

SEQ ID NO: 29451 - DNA, 1277 bp, Glycine max
  Clone ID: UC-GMFLMINSOY044H10_FLI
cttcgctcattgcagcctcaagaatctacacaaactaagggtagggcagagagagagagagagagagagagagagagagagagagagagagagaatgggagggtgggctatcgcggtgcatggtggcgctggtgtcgaccctaatctcccactcgagcgccaagaagaagcgaaacaacttctcacgcgctgtctcaatcttggaatctctgctctaaattctaatcttcccgccatagatgtcgtcgaacttgtggtgagggaattggaaacggatccgctgttcaattcgggccgtggatctgccctgacagaaaaaggaacggtggagatggaggctagcatcatggatggtccaaaacgacgatgcggcgccgtttcgggtcttaccaccgttaagaacccgatctcgcttgctcgtttggttatggacaaatccccgcattcctacctcgccttctccggcgctgaagaatttgctaggcaacagggtgtggaggttgtggacaacgagtactttatcacacctgacaacgttggcatgctcaagctggcaaaggaagcaaacacaatcctgtttgattaccgaatcccaacatcggggtacgagacgtgcggatccggtgtggagagtccactgcaaatgaatggactcccaataagcgtgtacgcgcccgaaaccgttgggtgcgtggtggttgaccgggagggccggtgcgcggcagcaacatccacgggagggctgatgaacaaaatgaccgggcgcatcggtgactcgccgctgataggcgccgggacctacgcgtgcgacgtgtgcggcgtatcgtgcacgggtgaaggcgaggccatcatacgtggcacgctggcgcgtgaggtggcagcggtgatggaatacaaagggttgaagcttcaagaagccgtggattttgtgatcaagcaccgtctcgatgaagggatggctggtctcattgctgtgtccaacgctggggaagtggcttatggtttcaattgcaatggcatgtttaggggctgtgccactgaaaatggcttcatggaggtcggaatctgggaatagcttcattattttccttcatggttgtttcgatgcaacttttggatttctgtaccatgttccactgtagtgtagggtcttcctgctggtgcccgatttagataaaaaatggtaaccttgtttctaagaattagaaaaaaatgtgaaataataatatggtaactttgttgtctttctcttaaataaagacttgtgctagaccctc

SEQ ID NO: 29452 - DNA, 1945 bp, Glycine max
  Clone ID: UC-GMFLMINSOY045C05_FLI
ggaaaaacacgagcttcctcaaccaattgatgcagagcgcgtgaatttttcacttgttgctgatgttaaggatcctttgataactaaggctgcagagaggctcatttcaagtgaaggggaactcaaaacacagcttgagaattttcgtcgtgaccctgacatatcaagctggcttgaagatgcagcctattttgctgctattgacgacagtttaaacacaatcagctggtacaattggcctgaacctttaagaaatcgccatcttgtagctctagaagatatttaccaacaaaagcgagattttataaatgtatttattgcccaacagttcttgtttcaaaggcagtggcagaaagttcatagctatgcacagagtaagggaatcagcataatgggagacatgccaatatatgttggttatcatagcgcagatgtttgggcaaataagaaacagtttttactgaacaggaagggctttcctcttttagttagtggtgttcctcctgacgcattcagtgaaaccggccagctctggggcaggttggaagttaatcctatgataaatcttaatttttcatgctctttattcaattcttgtcctgattccaacatataatgttctttcttttttcttaaagatatttgcttattctgtgattatggtcagcaagacatctcccttgacttgtattagtttagttcttttcatctttccatgctttaaccatctgtgcctgtatacaacaatatactgaacctgattagaaagggataggacctaactcaaacccaaagccagctcaagagaagatgattgcctaggtcttacatcgagtattttgaccatatctcttgttgatgctggacattttaacaatttctagacccttattcagcatttttttccttgtcatggtaattgctagcatattttaccacaatacattgtagtaggcttcctgtcctatttagattactgatttctcttatttaatattttcaaattttaatgaaaaagccccctgtatgattggaaagccatggagaaagatggatactcgtggtgggtacgtcgcatacgacgtgcacaaaatttatttgatgaatttaggattgaccactttagaggatttgcaggatattgggctgttccctctgaagcaaaagtagctatgcttggaaagtggaaggacctggaatatccttatttgataccattttcagagctgttggaaggattaatattatagcagaagacttgggagttatcactgaggatgtagtccaactaagaagatccattggagcacctggaatggctgttctccaatttgggtttggaggtgatgctaataaccctcatttgcctcataatcatgagtgcaatcaagttgtctatacagggactcatgacaatgacacaattggaggttggtgggaagttttgaaccaagaagagaaatccaatgtactaagttatctttcattaaatgagggagatgacattccatgggcgctaatccagagagtattggcttctgttgctcaaacagcaataatacctatgcaagatgttcttggattgggtaattctgccaggatgaatattcccgcaactcagtttggaaactggggttggagaattgcaagttcggtgagctttgatggcttggagagagaggcagacagactcagagaaatgctttcaatgtatggccgactttgaatatggaattcctttttgagtgtaaagtagaagagtttgctttgcaacgacagcttaagtggaaaatgctatagtatgcatgatattgataaatcaaagctgggtgcttgtgttggtcaagtaatttgagaatgttagatgcttcaatggaaatttgtaaaaatgataatgcctagctcttacatcttgtgatgctatataacatatgatcgtttaaat

SEQ ID NO: 29453 - DNA, 787 bp, Glycine max
  Clone ID: UC-GMFLMINSOY045C07_FLI
ctcaagtttcatcttgggctgtagactgtagcaaacaccatgaccaccaaggttccaaaatccgtatacgactttgttgtcaaggatgctaagggagatgttgtagatctctccttttacaagggaaaagtccttctgattgtcaatgttgcttctcaatgatatccttaatcttaactactctcaccgctaatgttataaatgttgagaaaatttacaatatgtttgggattgagacagcggcttgaccaactccaattatacggagctgaatcaattgtatgacaagtataattgttggcctggagattctggcatttccatgtaaccaatttggtaagcaagaaccagaaagcaatgataaaattgtggattttgtctgctctggcttcaaatctgaattccccatctttcataagtgaatggggacaactctgctcctttgtacaaattcttgaagtcgggggaaatggggaatttttggtgatgatattcagtggaacttttccaagttcgtggttgataagaatggacaagtagtgggtcgctattatcccaccacttctcctctcagccttgagcgagacatccatagcttctgggaatttcctgaaggcaaaaagataatttcttcctgagctcattatgctgctcccttatgtggtggcaatgtaatgcaatatgcacaaactaatgcttaatcttacggacatcatatataccatgtcccatgacttcgtccatatatcttcgtttcctttaatttcatttctatcactctcccggc

SEQ ID NO: 29454 - DNA, 1865 bp, Glycine max
  Clone ID: UC-GMFLMINSOY045D06_FLI
agaaacagtaagagccaaggagaaaagaaaaaaaaaaagaactggactccttcaattagtgcattgtttcttttcttcaaatggtagcaagaagacattgttaatttgagagatggcgagttacgaggctattaagaactttgatgatgatgatgatgatgatgatgatgtggagatggcactcccccatagccagatctctgaatcaagatctgccactgtttcttcccccattggccaaactaccccgcttcacattcacaacattattgaggaacaacgcattatctccaggcaccaacctcaacccaaatctccgcgtctggtttctcttgatgtttttcgtggtctcaccgtcgcgctgatgatacttgttgatgatgctggcggactcattcctgcgctcaaccattccccatggaatggtttaacactagctgattatgtcatgccatttttcctatttattgttggtgtttcgcttgcactctcatacaagaaactgtcttgtggagttgatgcatctagaaaagcaagtttacgggctctaaaacttcttgcgttaggccttttccttcaaggaggttatttccatcgcgtgaatgatctgacatttggagtggatataaaacagataagatggatgggaatactacagagaattgcagtagcatatttggttgtcgcactgtgtgaaatttggctcaagagtgatgatactgttaattcaggaccatccctattaaggaagtatcgataccagtgggctgtggctttgattctttctttcctttatctttgcttgctatatggattgtacgttccagattgggtgtatcaaattcaaacagaaccttctgcagagccaaagacattttcagttaaatgtggagtaaggggtaacactggtccagcctgcaatgtggttggaatgattgatcgaatgatattgggtatacaacacctgtacaagagaccaatatatgcgcggatgcctgaatgcagtattaattctcccaactatggaccattacctcctgatgctcctgcttggtgtcaggccccttttgatcctgaaggactcctaagttcagtgatggctattgtcacctgcttgattgggttgcactatggacatattattgtccattttaaggaccacagagtgagaatcatatactggatgatcccaacctcttgtcttttagtttttggccttgcgttggacttatttggaatgcatataaataaggttctctactcgctcagttacacatgtgtcactgctggtgctgcaggcgtcctctttgtcggaatatacttgatggttgatgtctgtggatgtcgtcgcatgactttggttatggaatggatgggcatgcatgcattaatgatttatatccttgctgcttgcaatgttttcccaattttccttcaaggattttattggggaagtcctcacaataacattctcaagttaattggagttggcacttgaagaaaggcacataaacatgctattggataaaagattatatgcagtaagactgtgaacatgttttactgtaaaagaaatggctacccgagtttttggagctaatcttttgatcaagaacaagaacgggtgtagcatattcttctaatctcttgatgacgtcacctgcatggatgatggatatagtttagagttcactacatctcttgatggcattaccttttctatatatggagcagcgtttgtttataatagcaccactgcgatataatttgtacttttactttatatccttgaaatgatagatttcaagagagtaagcatcattggacacgatacgatattaatgtaaaatttagttttatatttt

SEQ ID NO: 29455 - DNA, 795 bp, Glycine max
  Clone ID: UC-GMFLMINSOY045G07_FLI
tagttctcactggttttctctataggtggatttgaggacttcttctatattaaactgtgttttcttgtttctgagtgctgattttggaggagaaatgagtagctatttgggtgtaggtgttagtcctgggaatgtcccagtttaccacagcacaaatgtgaacgtgttagataggaggatcaagataacagagttggtgttgaggtgtgtgatccttggtttaggggttcttgcagctgttcttgtggggactgattcccaagtcaaggagtttttctcatttcagaaggaagctaaatttacagacatgaagtctttggtgttcctggtggttgcaaatgggttagcttctggctactccttaatccaagggttgcgctgtatcattagtatgatcagaggaagagtactcttcagcaagcccctagcttgggccattttttctggtgatcaggtaatggcctatgtaacagtggcggcagtggtggcggcaggacaatcgggtgtgattgcaagggttggtcagccagaactgcaatggatgaagatatgcaacatgtatgggaaattctgcaaccaagtgggagaagggatagctagtgcttttgtggctagccttagcatggtggtcctgtcttgtatttctgctttcagtctcttccgtttatatggtggtaacaaaaccaaaaatgtgttggtaggttagaaactagcactgattcaaggctcttcgtgtatatgtagtagtgaatgattatggtaatatgagaatggcaactattgcaattatcactt

SEQ ID NO: 29456 - DNA, 1229 bp, Glycine max
  Clone ID: UC-GMFLMINSOY045H05_FLI
cttctttctttttctgtgagcctttctttcaggttcttaacttgatcagtgtgcagtgtccaaatcataagggtagttgcaaattgcaatggctaagcatgatgttgagggtggttccttctctgcaaaggactaccatgatcctcctccagcaccgttgattgatgctgaggaactcacacagtggtccttctacagggctttgattgctgagttcattgccacaatgctcttcctttacatcacagtgctcactgtgattggttacaagagccagagtgatgtaaaggctgggggtgatgtgtgtggtggagttggcattcttggcattgcttgggcctttggtggcatgatcttcattctggtgtactgcactgctggaatctcagggggtcacataaacccagcagtgacatttgggctcttcttggctcgcaaggtgtctttgattagagcaataatgtacatggtggctcagtgcttgggagccatatgtggagttgggttggttaaggccttccaaaaggcttactacaacaggtatggtggtggggccaatgagctcagtgaagggtacagcacgggtgttggattgggtgctgagatcattggaacctttgttttggtttacactgtgttctctgcaactgatcccaagaggaatgctagagattctcatgtgccggttttggctccacttccaattggctttgctgtgttcatggttcacttggcaaccatcccagtaacaggcactggcattaaccctgctaggagtctaggagctgctgtcatgtacaaccaacagaaggcctgggatgaccattggatcttttgggttggaccatttattggagcagccattgcagccttctaccaccaattcatcttgagagcaggtgctgctaaggctcttggatcattcaggagcaaccccgctatttgagtcaatttaatttcttcttcatgatgagttcaaaatgaagaggaaattataagaataataaaaatattgtcaataatggcaattgcttgtgcttttattgcaaccttttctttgatcctattatgtagattaaaggttcttttcaagacaagagccattggtaaataccctttagtattttcaagcactttcctttctttcagtgtgtgatattttcttttaggtaatttaatctcttgtactcaacgtggaaaaaaatatatataaatccatgcttttactt

SEQ ID NO: 29457 - DNA, 419 bp, Glycine max
  Clone ID: UC-GMFLMINSOY046A02_FLI
ggaccaatggatttactgggttggaccgtttgttggagctgcggtggctgcaatctaccatcaatacattcttagaggttctgcaatcaaagctcttggatccttcaggagcaacgcttaattaaaaaaaaaaaaaaatcaagtttctccactacctaaattatgatgatttggtcctgtgtcacccaaaacaagaacagtgtttcagttcaagtctgtctacaggtccctctcttttggcttttctgcttacccgtgggtttgggggaaaagccaaataccgtgggctcttgaatttgtagataagaatgcttttatgtcaagggtgtatttgtatcccttttgtttttaatttcttttttcttccaagtatttatcatcatgtgttcacttttatataatgtggaggatcattagcc

SEQ ID NO: 29458 - DNA, 1370 bp, Glycine max
  Clone ID: UC-GMFLMINSOY046A09_FLI
ctcagaattctctaaaagagatctttttctgctctttgaagaaagaagggtctttgcttgattttggagatgtctctgctctcagatctcatcaaccttaacctctccgataccaccgagaaggtgatcgcagagtacatatggatcggtggatcaggaatggacctgaggagcaaagcaaggactctcccaggaccagttagcgacccttcagagcttcccaagtggaactatgatggttccagcacaggtcaagctcctggtgaagacagtgaagtgattttatacccacaagccattttcagggatccattcagaaggggtaacaatatcttggttatctgtgatgcctacactcctgctggagaacctattcccactaacaagaggcacgctgctgccaaggttttcagccatcctgatgttgttgctgaagtgccatggtacggtattgaacaagaatacaccttgttgcagaaagatatccaatggcctcttgggtggcctgttggtggtttccctggacctcagggtccatactactgtggtgttggcgctgacaaggcttttggccgtgacattgttgacgcacactacaaagcctgtatttatgctggcatcaacatcagtggaattaatggagaagtgatgcccggtcagtgggaattccaagttggaccttcagttggaatctcagctggtgatgagatttgggcagctcgttacatcttggagaggatcactgagattgctggtgtggtggtttcctttgaccccaagccaattaagggtgattggaatggtgctggtgctcacacaaactacagcaccaagtccatgagagaagatggtggctatgaagtgatcaaagcagcaattgacaagttggggaagaagcacaaggagcacattgctgcttatggagaaggcaacgaacgtcgtttgacaggacgccacgaaaccgctgacatcaacaccttcttatggggagttgcaaaccgtggagcttctgttagggttgggagagacacagagaaagcagggaagggatattttgaggacagaaggccagcttccaacatggacccatacgtggttacttccatgattgcagacacaaccattctgtggaagccatgagcaaaacctgcatgttttctccctttggatggaaaggaacagttatgcttttcttagtaggatttggtctctctctctttttaccttttgattggtactatggttggtgccttgttggttggtgcaactaactggcaagggttgttcattgttttcttctattcctttccctcgttttccgattgttacaatgacaataatttaatggttattatcagtcttgaacaaag

SEQ ID NO: 29459 - DNA, 1856 bp, Glycine max
  Clone ID: UC-GMFLMINSOY046C08_FLI
ctaatttgatcattcggtaggtcttgtcttgtttcttcaccctctttctctttccaaccttaactttctctttcacacctgggatcagcattttcatttttctgtggcatgttggagcctagattcagtggtggggtccttctcctgtggcttctgtgtgggactttggttccaacaatggtggaatcagccataggggtcaactggggcaccatatcctcccacaggctgaagccaaccacagtggttgatctgctgagacaaaacaagatctctaaagtgaagctctttgaggcagactctgatgtgctcagggctctcatggggagtggcattcaggttatggttgggatccccaatgagatgcttcccttcttgagttcttcacctgctgcttctgatttgtgggttagacagaatgtttctgcttatgtggggagagggggtgctgatatcaggtatgttgcagttggaaatgagccattcctttcaagttataatggtcaatatcagaacttgatcatgcctgcaatactcaatatgcaacagtctttagtcaaagcaaatcttgctggttatataaaactggttgtcccctgcaatgcagatgcctatcagtcctcggcacttccttcccaaggggcattccggcctgaacttacccaaattatgaaccaactggttcagtttctcaactcaaatggttccccatttgttgttaatatctacccctttcttagcctttataacaatggagatttcccccaagagtatgcgttctttgagggaactacccatgccgtccaagatggttccaatgtttacactaatgcatttgatggaaactatgacactttagttgcagccctcactaaacttggatatggtcagatgcctatagttattggagaaatcggttggccctcagatggagccattgatgcaaatatcactgctgcaaaggttttcaatcaaggccttatcaatcacattgcaagtaacaaagggacccctttgagaccaaatgctccacctatggatgtttatcttttcagtttgcttgatgaaggagctaagagcacacttccagggaactttgaaagacactgggggatattctcttttgatgggcaggctaagtatccgttaaaccttttacttggaaacaaggagttaaaaaatgcaagaaatgttgagtatcttccatctagatggtgtgtggcaaacccctctggtgatttgaacaatgtagtaaaccatatgagactagcatgtagtgttgcagactgcactacccttaactatgggggctcatgtaatgaaattggtgagaagggtaatatatcatatgcttttaatagttactatcagctacaaatgcaagattcacggagctgcaattttgatgggcttggtatggttactttcctagacccttcagttggcgattgtcgttttcttgtaggcgttacagataaaggctcagattcatctacgtctcaaacaacatatcagtggtggactctagtgttacttctgattttacatggggcttttttgctttcaatgtgacgtaagtttcataagtgggtttttcatggtcccctcttcttagactgttagaactagattagctgatatacctatttaacgtaagaaatattccaaagattcatggcttgtagcactgcatatgattaagtcattgtatcatatcagagacggtataaacactatcactgtgcattgaatattacacatttattttatattttttctggtgatgcctatttaattattgaatgaatcagaatatagttttttagcttgcctccccaggaaggagagcagaatgc

SEQ ID NO: 29460 - DNA, 1390 bp, Glycine max
  Clone ID: uC-gmflminsoy046e06_FLI
cagtatataaaggattttttattttatataacctatggttttgcaataatcgaaagcaattcaaattgtcctaaggtaaggtgtttgaatgcttacatacatagattaaggattttaggaccaaagagggagtcatgaatgtgacaaacaaaccaaacccatatggttccaccaatgggtttcagtctctgcttcaacaaaatgggtgggaacagggatcatctagactcagacccactaagctttaccctgcaccaacggctcgctaccaggacattgttcgtgatgcaaacctcttctggggaacgcttcaagcttttcacaaaacacttggcaccaaatataagatttctactgtgggaggaacgccacttgatctacatcgtctttttgtcgaagttacatctcgcggtgggattgaaaaggtgattgttgatcgtaagtggaaggaagtgattctgaccttcaatttcaaagataccataaccaatgcatcatttatggtgcgcaaatcctacctctcgatgctttatcactttgagcaagtgtattattttgggaggcaaggcattcctcccacaacacctgatcttatgattagaggccaatcatgccaaccctatagctccacaaccattccagaagttgctgctgtgaatgattcacctgttcagagtactccagtacaggcacatgatgatatggtttctggaacaattgatgcgaaatttgatgttggatatgtagttacagtgactctaggttctgagcagctgcaaggtgtcctgtttcatgttcctgataacgtgtcccagagttctcatgccgaaggcacatctagttcacagaatcttggtgatgacacgtctaatttacagagtcgaaagagagcaaaatatgcaccacgtgatccatttcggccaaagtcaaacaggagcggttacaactttttctttgctgaaaattatgccaggctgaagccctcgtatcatgggcaagagagagcaattagtaagaggattgggtttctgtggaacaatctgtcagaagcagaaagacaggtttatcaagagaaagggataagagataaggaaagatacaggactgaactgatggagtacaaatccaataattcaactccaaatgctcaataggctgttttatgtaatccttagactgtcatttcatatgcttcatctgttgttcttttcatgcctttgctatagttaattttcttatccattctacagagaaacttagaagagtagctttgtgacaattctggtgtaaattatgctgaatggttttaataaacatcttgtagcggttaattcattgtagttactcttgaaattaagggtccttcattcaatttaaacatcttatttgt

SEQ ID NO: 29461 - DNA, 2136 bp, Glycine max
  Clone ID: UC-GMFLMINSOY046F06_FLI
tgaagtttttgggtcatgtgtaccaaatatctcatggacactaacatcaggggaagaaatatctgcccatgctgtgttttcaaatgcatttattcttcttttaaagctatggagatttaaccgacctcctcttgaatatggaattggagatgtacccactgttggttctcaattaactcccgaatacttactattagtacgtaattcccacttaatgtcagctggtaacatccacaaagatcgcaacaggaggagactctcagaaatagcaagtttatcatcgccaaattctgtatttgttgactcctttccaaaattaaaagtgtggtatcggcagcatcaagcatgtatagcttcaacactctccggtcttgtccatggaaccccatttcatcagattgttgaggggcttcttaacatgatgttcacaaagattaatagaggaagccagacaactattacatctggaagcagtagctcttctggacctgcaaatgaagatacctctatagggccaaagttgcctgcttgggatattcttgaagctattccctttgtagttgatgctgctcttacagcctgtgctcatggaagactgtctccacgtgagttggcaacagggcttaaagatttagctgattttcttcctgcatctctggcaaccataataagttacttctctgctgaagtaactaggggagtttggaaacctgtatttatgaatggaacagattggcctagccccggtgcaaatctactgaacgttgagggacagatcaggaaaattttggctgcaactggtgtagatgtgccaagccttgcttcaggagacagctgtcccgcgatacttccattacccttggctgccttcacaagccttaccataacctacaaagttgataagacatcagagcgttttcttaatttggctggccaaacattggagagccttgctgcaggttgtccatggccttgcatgccaattgtagcttccttgtggaccctaaaggcaaaacgttggagtgacttccttatcttctcagcatctagaactgtcttcctccacaacagtgatgcagtagttcaacttataaaaagctgcttcacggctacccttggcatgaatagctctcctatctcaagcagtggtggtgttggagcccttcttggacaaggatttaagtatcatttatgtggagggctttgccctgttgctccaggaattctctatttacgtgcgtatcggtcaatcagagatattgttttcttgacagaagaaattgtttccatcttgatgcactctgtgagggaaatagtatgcagtggcctgccaagggagcgattggaaaagttgaaagcaaccaaagacggcataaaatatggacaggcttcacttgctgcatcaatgactcgggtgaagcttgccgctgccctcggggcctctttagtatggatatcaggaggcttgatgttggttcaattattaataaaagaaactttgccatcctggtttatatctgttcacagattagaccaggaagaaaagtctggtggaatggttgcaatgcttggtggatatgcacttgcttactttgcggttctttgtggtgcttttgcttggggagttgattcatcatcagcagcttcaaagcgacgtccaaaggttttaggtacccacatggagtttctggcaagtgcacttgatggtaagatatcactaggctgtgattcagctacttggcgtgcctatgtgtcaggttttgtgagcttgatggtaggttgcacacctaactgggtgctggaagtagatgtgcacgtgttgaagagactgagcaatgggttgagacagttgaacgaggaggagcttgctcttgctttgttgggtgttggtggggtaggtacaatgggtgctgcagctgagctcattattgacactgaaatataaacattttcgctattctgagggcaccttttccttttaggatgacttgtacattagttaactttcatgtttataaagttgtgcagcatgttgaattaacagtttagtttggaaagtaccaagcattagaatgggaaattttgtatgtataacgttcatctaatgttagtatatccagcagccctaatcgatgc

SEQ ID NO: 29462 - DNA, 1841 bp, Glycine max
  Clone ID: UC-GMFLMINSOY047B06_FLI
cggaaggactcgaaaaagcgtgatcacatgagaatcacttaacctctgaccttaaaataagcttcaccttcgagcgagatggcggcagagataccgtgctgtggaacaaagttttcactgtacgtgttggtgatcataggattggtctgcttcgctggcctaatggctggtctcactctcggactcatgtctttgggaatcgtcgacctcgaagttctcatcaaatctggtcgtcctcaggatcgcatccacgctgcgaaaatttatccggtggttaagaaccagcatcttctgctttgcacgcttttaattggaaactccttagccatggaggctcttcccatttttcttgattcactggtccatcccgccgcggcaatcttgatttcagtcacactcatcctcatgtttggagagatattgccgcaagcaatttgcacaagatatggattgacggttggagcaacgctggctccacttgttcgtgttcttcttatagttttcttccctttttcttatccaatcagcaaggttcttgattggacgttgggcaaaggacatgctgcccttttgaagagggcagagctcaagacttttgtgaattttcatggaaatgaggctggtaaaggaggagatttaacccacgacgagacaaccattataaccggtgcacttgaattgacagaaaagactgcaaaagatgccatgactcccatatcaaaggcattttcccttgatctggatgcaactctaaatttggagacactgaattcaataatgacaattggtcatagtagagttccggtttatgcaggagaaaaaaccaatattattggacttgttctggttaaaaatctatttatggttgattcaaaggctgcagttcctctaagaaaaatgctcatcagaaaaattcctcgtgtttcagagaacatgcctctctatgatatactgaacgaatttcagaagggtcacagtcatattgcagttgtgtatagggatctaaatgataaaaacgaagccccaaaaaaggttaacgatggggaacaacttgatcttaaggacaagcataagaataacggagagaatgcatccttggctaaaggtgtgaaattggagtcacatgattctttgattactgatggcgctcagcaagcaaagaaaagtccaccagcaactcctgcttttaaaaagcgacatagaggttgttcatattgcatcctggaccttgataatgctcccctgccagtgtttccacccaatgaagtggttgttggtgttattacaatggaggatgtcattgaagagcttcttcaggaggagatactagatgaaactgatgaatatgtcaatatccacaacaagataaaagttaacatgaatgcttctaaggagaaggctcctgatacaaatctgttgcagccttctcaagcagttcaaggacacacgccaactaattcaatttctacagctacttctgcaacgggctcacctaccacaattgatctaatctccgaaagtgagtcactaaggaatcaatagttcataaagaataagagaatgacataggtttgtgtttgtgttgaaaaggtagagcagtatatagtttcttgtaaaaatttccctgtatgatattatgttaataaattaatgtagagaaaggaacactacggtagcgtgtggctcgccagacaaaacagaatggagttcattttggtttcacttttaatgaaagtggaatcaaaagctatcactttttaatatcacatccagttctgttcattttttaatgtacgaaacataaaacagaatttttatgttatattctatctcattttagc

SEQ ID NO: 29463 - DNA, 3055 bp, Glycine max
  Clone ID: UC-GMFLMINSOY047B09_FLI
gcccgatcagcgaacggcgaggagaatgcggcgggaatcccggacgatttgcggtgcaagaggtccgacgggaagcagtggcggtgcacggcgatgtcgatgccggacaagaccgtctgcgagaagcactacatccaggcaaagaagcgcgccgcgaattccgctatgagagcgaatctcaagaaagcgaagaggaagtcgcagtcgctgtcgctgaacgagtccgataatgtttatatggagagcaagagcgacgatttcgatgttcctctctcctccattggcctctctcagaagaagctctccaagaaccagttccgctacgagccggagcgcgacgcgccgcgaagaggctcgtccgcgagacgctcttcgaacctcaacgacgatgatgatgatgacgatgacgacgacgtggatggggatgcggatgctgatgtggcgctctatgaggaagagaattgggtctcctgtgactcgccgccggattcttcgcgcaagaggtcgcggaggagcttggaagctaatgctaccactgaatattcggacggaacctccgccggttcttccgacgaggacaccggcgggcagacttgtcaccagtgccggaggaatgaccgcgaccgagttacttggtgtcaacggtgtgataggaggggatattgtgatagctgtttatcaacatggtactcggacatttcattggatgaaattcagaggatatgtcctgcttgccggggtatatgtaattgcaagacttgtttgcgaagtgataattcaattaaggttcggatacgcgagatacctgttctagataagttacagtatctccatgtgctgctgtcgtctgtgctacctgtggtaaagcagatccactgtgaacagagttttgaagttgaacttgaaaagaagttgcgtggtgctgaaatagatcttccaaggataaaattgaactcagatgagcagatgtgctgcaatttctgtaggatacctattactgattatcatcgacgctgtccaagttgttcatatgatttgtgccttagttgctgtcgagatcttcgagaagcaactgcagatcacaataaagaaccccaaacagagcaagcaaaaacttctgatcgaaatatattaagtaaatttcctcattggagatccaatgacaatggaagtattccatgtccccctaaggagtgtggtggctgtggttattcttcactaaatttaagccggattttcaagatgaactgggttgcaaagttggtgaaaatgtagaggaaatggttagtggctgcagaattagtaatgccgatggtccaccggaaaccgggctgaatgatctgaaactttgccaatattctcacagagaagccagtgatgataattatctttattgcccagcatccgacgatatcaaaactgatgggattgacaattttagaaagcattggaaaactggtgagcccattattgttaagcaagtatttgatgggtcatccatttcaagctgggatccaatggtcatatggagagggattctagagacaatagatgagaaagcgaaagatgaaaaccggatggttaaggccatagattgcttagatgggtctgagattgatattgagcttgctcagttcatgaaaggatactttgaagggcttattcttgaaaatggttggccacagttattgaaattgaaagattggccttcacctagtgcttctgaagaatttctgttgtaccaaagacctgagtttatcagcaaactacctttacttcagtatattcactccaagtggggccttctcaatgttgcagctaaattgcctcattactccttgcagaatgatgtaggacccaagatatatatatcttatgggattagtgatgaacttggtagaggtgattcagtgacaaatctccacttcaatatgcgtgacatggtgtaccttttggttcatacaaatgaagtaaagctgaaggactggcagagaactaaaattgaaatgatgcaaaaagctaaagctaataaggaatttgaggcaaaagaatcacatggggatcctcaaatatcttcaagggggagttcacctgattcctcacttggtacaaaaagtagtggactggaaatagactcaaaccagaataagtcaattatggatcaagggtttgaaatttattctagtgctgaaggtaatacggccaattgtaaacttccattcaatcaaaatggagacgtctctgagaaaacacatcctggagttctttgggatgtttttcgtcggcaggatgttccaatattgactaaatatttgaaaatacattggaaggaatttgggaagtcagatgatcttggaaatgaatttgttgaatggcctctttatgatggagctatttttcttgacaaacaccataaaagaaagttgaaggaagaatttggagtggagccttggtcatttgaacagaatttgggggaagctatttttgttcctgctggttgccctttccaagcaaggaatgttcagtccaatgttcagttaggccttgatttcttatctccggaaagcgtgggtgatgctgtaagattggcagaggaaattcgctgtgtacctaatgaacatgaagcaaagcttcaagttttggaggttgggaagatctccctttatgcagcaagttcagccatcaaagaagttcaaaaacttgtacttgacccaaaacttggcgcccagatcggttatggagatcctaatttgactgcaatggtttccgagaattatgagaagatggttaagcggaggcagattacttgtgcttgaacttccacactcggtcattgaatccggaaagaggggggattgtgtacattagttgtatttgagcaatattttatgggttggtattttcagtgtagttttgatcaaatacctaggtaatcatttaaatgtgtataatagttacgttagagaatcatgtaatgaccaacttcaaatctgattttatttcaaaatgtggaaaagaaacaatgtaatatatacaaagctaaaaatttgtgtct

SEQ ID NO: 29464 - DNA, 1433 bp, Glycine max
  Clone ID: UC-GMFLMINSOY047C02_FLI
ggaaaacttgctaagtaatgttttgagtgcaatacctcaagatattagcagggatgcttggcttcaggctcttcctcgtgctctggttgttggttttgtgaagactgacatagagtttcagcaaaagggggaaacttctggaacaacagctacatttgttttggttgatggatggactatcactgttgcatctgtgggagattcccgctgcatattagatactcagggaggtgttgtttctctcttgacagttgatcacaggctggaagagaatgcagaagagagggagcgcgttactgccagcggtggtgaagtaggaagactcaatgtatttggaggcaatgaggttgggcctcttcgctgctggccaggtggattgtgcctatctagatctataggtgacacagacgtgggagaatttattgtgccaataccacatgttaagcaagtgaagctttcaaatgctggtggaaggcttattatagcttctgatggtatttgggatgctttatcatctgatatggctgctaagtcttgtcggggtctacctgcagagcttgctgcaaaactagtggttaaggaagctctaaggtcaagaggcctcaaggatgatacaacttgccttgttgtagatattattccttcggacctccctgtattaccaccaattccaagaaagaaacataatatgctaacttcgcttctattttttggaaagaaatctgagaactctatgaacaaagctaccaataagctttctgcagttggtgttgtggaggagttatttgaagagggttctgcaatgcttacagaaaggctaggtaaggatttcccgcttaacaagaattctggtattttccgttgtgcggtttgccaaatggaccaaccccctggtgatggtttatcaatgaactctgggccttttttctctcctgcatctaatccatgggaaggcccattcctctgcacaaactgttggaagaagaaggatgccatggaaggaaaaaagcctagcagacccaccgttacagcataatgattatctagtattacagtagtagcatagtaaatattagtataatttttccctggcagtgtgagcatgcttgactttacattttcggtggttattgccatagatgtgtaagaaatgaggttgagaattgagatagggctagtaggtgttttggaggttgctgcaagtttgattctggcttgtgctcagctgttggaagttggactgactgacagaacaaacaagaaagttgtgtctggtagaaaaaaattctagtgaaatctgctaacggcttgtatttgtaagtaaactgaagcttttgtggctgcctctgttttgagagtgcttcaatgctacacagcccaaatgcatctgtatcttttaaacttatgttatacaaatacaactacatgtctcg

SEQ ID NO: 29465 - DNA, 2750 bp, Glycine max
  Clone ID: UC-GMFLMINSOY047C11_FLI
gttcgactatgttaaaagtctaagttgataggtgggaggcttgtaattttatatctctaaaaataacagagatgtacagtcctaaacattgacatatgtttctatgcaattggtctagtctgaaaatgttacagaactgacaaggttattcatgaaatttttaagcaagtactcactttggcctttttcttctctttcctttcactcttctttagatgccaattaaagaagcctgtcatgttgctttacaaagaaaccatccaagtaaacataggctgtggaaacatgctgaggctcgacagaatgacaaagggggaaatccaactgctgtcctgcaaatcgtatgttggagaacacgtgaatttctatattctatcagttaacattgacaagtatggcttggagtttgtgtaacaatgaagcatgagaagtgaataatgttgatgataaaaatttaacattatttggatatctctgtatccttcagttttagcgataataagactttcttactgtgtattttcaatgaatctggatcatttcaggtatcatatggctcagaattgagcaatcgtggcccaacatttgacatggatttatctgattttatggatgaagaagacaaaccaatctcatatgaaaaagcaaagaaatactttgctcaagatccttcccaaaagtgggcagcatatgttgcaggggcagttttggtcttaatgactgaaatgggtgttcaatttgaagacagtatcagcatgctggtttcatctgcagtcccagaaggaaaaggcgtatcatcttctgcatctgtggaggttgctagtatgtatgctattgcagctgctcatggattaaatatcagcccaagggatctggccatactctgccagaaggtggaaaaccacattgtaggcgctccatgcggtgtcatggaccagatggcttcttcatgtggtgaagccaacaaacttcttgctatgatttgccagcctgcagagattgttggccttgttgacattcccagccatatccgtttctggggaattgattctggaataagacacagtgttggaggtgcagactatggttctgttagaattggcgcctttatgggtatgaagatgataaaggccaaggcatctgaggaattgtctgagagttgggctgctaatgggttgaactatgatgaagtggaacaagatgacatagaactacttaaacaagaaacctccttagattacttatgtaatttgccacctcatagatttgtgactctttacgctaagacaattcctgagtccattgtcggtgagacatttttggagcaatatcaaaatcataatgatcctgtcactactattgatccgaagcgtacttacggagttagagctcccacaatgcatcccatatttgaaaatttccgagtcgtgaccttgaaagcacttttaacatctgcagcttcaacctatcagcttacagccttaggagaattgctatatcagtgccaccacagctacggtacttgtggacttggctctgatggaacagataggcttgtaaacttagtgcaagagttgcagcacagtgcagcatctaaagctgaaggtgggacattatatggagccaagataactggtggtggttctggtggaacagtttgtgtagttggcagaaactgtctcaagagcagtgaacacatttttgaggttttttttattattataaatttaacacattgattattataactaagaatacttcatacccttttggatggcaggtaaggaaattttttttagggttaaatatatttgtaacccttgcaaatagggaaatgttcatttagtccacgtaaaaaatcgtttccttttggttcttcatttttggaaatgtgtcatgcatgctccccagttgcaaaaatgggagacaaaaacaagtcaagtttttgttaaggcaaggactacacctaacatttcaaaaaatgagggattaaaaggagacaattttgtagggattaaaagtgaacatttccctatttataagaactaaaaacatatgtaactcaactttttatcaaaatgagaggggatgttatttctatggcaaaagtttatttttatataaatttttaccattttaattgaattaatgtagaaaagtttgttgcatgcaaaaatatcatggggaaagaaacatttttttccactatgtttttttccttcccttccttctcattcgtataaaacttattcaaaacaaagccttattaagtgagacttcatgaaatactaatagtctaaatcttacatcaaattttgatgcaggttcaacataggtacaagaaagctactggttatttgcccttcatttttgaaggttcatcacccggtgctggaaaatttgggtacctaaaaatacgtcgtcgagctaccccaaaaaaggctaacgccatcaaggatgatggtgcactcacctcagaaaaggctaacgctagcaaggatgatggtgcagtcacgatgaagaataatagttaatcatggcttatatttaaccactttaagagttctacctttgttgtctttccccagaacatgtatagtatggttaaattttgaaccatttcaacaattattaacatttttaaagcactttattttattactttttattacaatttatgttggatggaactttattatgtgagtgagttgagaataaatgaaaaatgaaggtagaacctaattatttac

SEQ ID NO: 29466 - DNA, 1023 bp, Glycine max
  Clone ID: UC-GMFLMINSOY047E10_FLI
tcgatcaactcaacacaaaccaaaactcaagctaaaattctcactctctctctcatctcgagatcatagtatcatattcaatatcatttcataccaaacacatggctttggaagctctcaactcaccaacaacaaccgctccatcttttccctttgacgacccaactattccatgggcgaaacgaaaacgttcaaagcgttctcgcgaccatccttctgaagaagagtacctcgccctctgcctcatcatgctcgctcgcggcggcaccaccaccgtcaacaaccgccacgtcagccctccaccgccacagccacagccacagccacagccgacaccagatccttccaccaagctcagttacaaatgctccgtttgcgacaagagcttcccctcttaccaagcgctcggtggacacaaggccagtcaccggaaactcgccgccgccgccgaagaccaaccccccaccaccaccacttcctccgccaccgccaccagctccgcctccggaggtaaggcccatgagtgctccatttgccacaaatccttccccaccggacaggcccttggcggacacaaacgttgtcactacgaaggtaacggtaacggaaataacaacaacagtaacagcgttgtcaccgtcgcctcggaaggcgtgggctccacccacactgtcagtcacggccaccaccgcgacttcgatctcaacatcccggcctttccggatttttcgaccaaggtcggagaagacgaggttgagagccctcaccctgtcatgaagaagcctcgcctcttcgtcattcccaagatcgaaatcccccaatttcaatgaactcgttgaatttttagtttatttttcgactatatattttggagaattttgagagttactataatttgattttgtacatagtacttggaagtttgttggaccgtaccggacccagttctctggttgaggttgtactttcacaacagtggcagatttgcaattcaattcaatttatttgtttattttaattagt

SEQ ID NO: 29467 - DNA, 1510 bp, Glycine max
  Clone ID: UC-GMFLMINSOY048C11_FLI
cggaaccaaaactcggcgctacgcccgtgtttattttcgcaactgctgggatgcgtctgttgccatttgaaaaacaacagattttaatggaacatctccgcaatgaacttcctcagatgacaaaattgcaaattttggaccaacacattcgggtgataagcggccgatgggaaggaatttacagttggatagccataaattatatgctgggacgcttcaatctttcgaaatcggtgaacaaatccaaatcggagtcactcgaagagcgatcacaaccagcactttctgttgagaaaaaggagcgaccgaaaacagcaggaatgattgacatgggtggcgcttctgctcaaattgcctatgaacttccattgggccattccgatgctgcaacgggtgggcaagagaatgttcagctgctaaacctcggctgtcgtgacgacgaatcgcgtttccgtttccgattgttcgtcaccacttttcttggcttcggagtcaatgaaggagcaaaagcatacgaaaagtttttgtggaagcggttgaacaacaaaagacaagcggcaaattcgaccgaaacggacaatggaaaagacggcgcgaaagtgccgactgtcgttgacggatgtttgcctgtgaatatgctgaaattgagccatgccgaggagaattacgaccaattcgtacgaaagggaaatggcgactgggattcatgtgtcagcgacatcgtttcgctgctgttcgagtccaactccaaatgttctcccgccaaagaatgctttttcaacggagttcacgcccctccccaattgtccctttccgacgtcgaattgtacgggttcagcgagtattggttcagcgtcgacgacgttctttcactgggcggcaaatacgaacacgacaaattcgaacaaaaggctaaggaattttgcgggcagccgtgggcagtgataaaaaggaaagtcaaagcgcacttctaccaaaaggcggactcggagagattggagacgcaatgctttaagtcggcgtggatccacgccgtgttgcacaacggtttccacgtcgacgaaatccaacatcactttcaaagtgcatttcgaataaatggccaagaagtccaatgggcgcttggtgcgattatttaccagatgcgatatttcccattgtttgctgaaagcaaagggattattcagccaaagcaaaaaagccgaattcgcccgcttttctccgcgggtccctccgttttctattttctttgtgttttgtctttggccgcgctactcattcgtattttatggaaatcaaagcagaggcaaatttcggtagcaaaaagaagagacaacggcaaaattgttaaatattggcgactcgacgaggaactatcaaacagcccttgagaatttatattaagaaatgaattattgtcacacctcacttatttattaatacattgtatgtcatttaagttttgtcttatgtttgctttaatttttatattgtaaaatattgggactct

SEQ ID NO: 29468 - DNA, 2732 bp, Glycine max
  Clone ID: UC-GMFLMINSOY048F06_FLI
gcgctcgcgcaaggcacggtcacgaaatcacactttggccaattcgatgccggccgttcacattcgaacccacgacatgctgaacccgttggagcgtcaattcctcgatgcagccgaaaaaggcaatcggccggtgctggaagcgtgtttggccaagcaattgagaaaagcgccgctgaatatcaatgcggtggacacaatgggacggacggcgatcgaaatagcggtggacaacgaaaatttggaaattgtgcaacttttgctgcgacagcccgacgttcgcatcggaaacgcccttttgtgtgccattcgcgagggtgtctatgaattggtcgaagtactcgtcaaccacccgtccatcacaagggatatgctcggcgaagggtgggccaaatatttggatccgacggagacggccacttcggagtactcgagtgacatttcgcccgttattatggctgcccatttgaaccaattcgaaattctgcaaatgcttctccgaaaggatgccaacattgagaagccgcacaagcattactgcgcttgtgaaatgtgcgactctgaacggatcaacgacggactgcaccggtcgttgaagcgaatcaacaagtacagggctttggcgagtccggcatggatttcgctgacgagttcggacccaattctgtccgcatttaagctgagcagagagctgcaaaagcgagcgaaagtggaggacgagttcaaggaccaatacttgcagttggccgagcaatgcaagcagtacgcgtgcgatttgctcagtcagtgccgaagcaccgaagaagtgatggcggtgctgaacaaagaggacaacttctgcaacgaggaggtcgacctgaacgcggcaaagtgttcattggcacgactgaaattggccatcaaatacgaacagaaaacgttcgttgctcacccccattgccaacaactgctcacttccatttggtacgaaggctttcccctgaagcgtcaccgttcctcctcccttcgcactttgctcatcgctcttttgctggtgctcgggtggcctttgatggccatttgttacattgcctttcccaaaagtcgcgtgggcgaaatcgtccggtcgcccttcatgaaattcctttactacagcacttcctttggctgttttcttgctcttcttacgatggtcacttttgaggtgcaccgtgaacaaaccggcgaagtgaaaggcggcacggcgacgcgtgccgctgaccgtggcccaacgcccacactgatcgaatggttggtgttcatttgggtaattgggatgttgtggtccgaaatcaaacaaatgtggttggagggcttcaccaaatacatccaccagtggtggaattggctcgacttcgtcatggtctgtctgtacttgtgcaccatttccattcgattttctgcctattcgatttacgtgatgcacaacgttggcgagcagttcacaccccgccacgtcatccgcacgcattggaatgcgtttgagcccgtgttggtcagtgaggcgctgttcgctgtcggcaacgtgttcagaccaatccctacttgggacccttgcagatctccttgggctgcatgctggtcgatgtggccaagttctgcttcattttcgtgctgatcatctccagcttctcgatcggattggctcagctttattggtattacgactcgcagacgccggtctgtttgagttccgatcggtgtaaaatcgtgccgaatgccttttcgtccattgcctcctcctacatgacccttctgtggtctttgttttccatcacaaaagtggaggacaccgaggtggtcgaagcgcatcacttcaccgtttgggtgggcagaggtctgttcatcctttatcacatgacgtcaatcattgttctgctcaacatgttaatcgcaatgatgtcgcactccttcgaaaggatcaatgaccatgccgacttggaatggaagttccaccggtccaaactgtggatggcacattttgacgagggctccactctgccgcctccgttcaacatcttcccaactccgaaggcatttatccacacgtgccgtgccatcattaacgttgtcaattggtgtttcggacggtataattatatggcggcaaaggaaggcacgcgggcgaccattcggaggcccggctacagcaaaagatggcacgacatggagggcggcttaagcggtgccccaaacggcgccggagggacagagccacggaagccaatcacttacacggagatcatccaacgccttgtgtcccgcttcatccacgaacagaaaaagtcgatgaaaatggacggcgtcaacgaggacgacctgctggagatcaagcaggacatcagcagtcttcgctatgagttgcgggacgaccgccgcaaggaaattgtgcgttcgttgtctcatattgacgcggtcaaacgggagattatgcgaagtatgagcacaacgacacgaatcttcgggaacacaccgcgacggcaactgtccgtaaaagagcgaagcgtcgcggaagaggccgactcggagttgggcgactcgtccgcaacggaggaaggcggcaccgagtcgatcaggagttcgttgccgttcttcgattcgcttcgctccgccactctctcgccccatccgtttataacaatcgcagcgagcggagacaaacagttccaatacgcggaacgagacgcagtcgcggaacccttgcgctaccgcac

SEQ ID NO: 29469 - DNA, 1735 bp, Glycine max
  Clone ID: UC-GMFLMINSOY049A01_FLI
tcgctagtcggaaaaccgcaaggtcgctccgctcgcgtcgttgctcaacatgaagctgctcattgctctgcttctggtgttgtgcgcgccgttttcatcttcttccaaacccaaagacccgttcctcggaatctcccccgaagatgacaagtattacaaggcttccgatgtaataaggtgtaaagatggatccggaaaattcaccaaggcgcagctcaacgacgatttctgtgattgcgctgatggcaccgatgaacctggcacatcggcatgtccgggtggaaaattttattgtcggaatgcaggacattctcctgtttacttgttttcatctagagtgaacgatggaatttgtgattgctgtgatggaactgatgaatatgatggtcaagtaaagtgtccaaatacctgctgggaggctggtaaagttgctcgagatagactggaaaaaaagattgccacttatcaagagggcgtcaaattgcgaaagctagaaatggaacaagctaaagtagctatggagaaggatgaggcagaactttcaaaactgaaaaaggaagaaagtatacttaaagggattgtgaaacagctaaaggatcataaggaacaaatagagaaggcagaggagaaggagcgtttacagaaagaaaaagaagagaagcagaaaaaggagtctgaggagaaagctaatgaagcaaaagataaagctgatgaagatacagggcatagaaatgaagctgaaaagcattcagatgttgaagacaattctgtagaaaataaccatgataaaatagaaaatctagagggttctcctgccgatcaggatgaagcaggggacaaattagaagatgtacttgataacgatgatgaagccagtgatagtcctgggagtgaaggatctttgcataataaagtggaagagaatgcaaaagaagctgaggaagaacctattgtgaaatctgaaactgatataaaggtcggaaacaaagagtcttctgctgaaatcatcaataaggtccagcaaaggagttttattcattctatgatcattgctttgagggcaaggagaacaagtacacttacaaagtctgcccctataaacaggcttctcaggaggagggctattccaacacccgtttggggagctgggacaaatttgaggattcatacagagtaatggtgttttctaatggtgataaatgctggaatggtcctgataggagtttgaaggtcaagctaagatgtgggttgaaaaacgagattactgatgtagatgaaccaagccgttgcgaatatgtagcagtattatctaccccagccctttgtcaagaggaaaggctgaaggagttacaacacaagctagacttgttgaattcggaaataccatcaaaccatgatgagttgtgaacaaccgggatggagtttaacaggtagtatgatggttataaagcaactgaggaagtggtgccctaagttttgtatgctagagcttacacaaatataatattgggggaggttagggagaggctagaaactgattcgacttgggattgataatccttatggttgtccgagtttgcaacattctaatatgcttatcccattgcacatttttcctttattgaactcaattacgaaatggtctgtgtgcctctcctagaaattgtccattccattaccaaaaggcggatatttatactatgcaagatactggacagtcagaatttcttgagcc

SEQ ID NO: 29470 - DNA, 2422 bp, Glycine max
  Clone ID: UC-GMFLMINSOY049B08_FLI
gaatgaactccaccttatgtactactagcatttatccctttttttttttttttatacattctttctcttccaccctctttcaaggctccacttttataattccttgtaatttcttcatcaaagtatcaaacttgtcttctctctctctccttttacttcctctgcatatatgatatattcttccaaaatcctcatctaagggttaattttgttccggacaagtttttattattattattattattttttaaatttcagaatgatttacttataggtttctgatccaaggtttaagatgttatagtttccttgaattctcatctgggttcaacctgtttgatgttttgactgaatcagtttgaaatagtggtgattatctgataccaaacataaaagattcagctctttttcttgtttctttgtcacaagacttggattttgagaatctggagacatgggttgttgtgcaagtaaagagtcagagccgcaacacaatggttacagacatgctgggactggtggtgtgcacaaccagaagactcatgaacctttggtcaaccaatcaagagcacctgcaaatcaaccttatcatttacatgaaaagcatgctgcatccactgctcagacagtgcctcaaaatatgccatggaagcctcctggtccagcccttagtcctaaacctgttgttggtgttaggcaagacacaattcttgggaagcagtttgaggatgtgaagcagttctacacacttgggaaggagttgggtagagggcaatttggtgtgacatatctttgcactgagaattcgaccggattgcagtatgcctgcaagtccatttccaagaggaaacttgcgagcaaatctgataaggaggacataaagagggagattcagattatgcagcatttgagtggtcaacccaacattgttgagttcaaaggggcttatgaggataggagctcagttcatgttgtgatggagctgtgtgcaggtggggaactttttgataggattattgccaaggggcattacagtgagaaggctgctgcttcaatttgcagacaaattgtaaatgttgttcatatctgtcatttcatgggtgtgatgcatagggatctgaaaccagagaattttttgctatctagtagggacgaaaatgcacttctcaaggcaaccgattttggcttgtcagttttcattgaagaaggaaaggtatatcgggatatagttggtagtgcttactatgttgctcctgaagttctgcggcgcagatgtgggaaggaaatagatatatggagtgcaggagtcatattgtatatcttacttagtggagtccctccattttgggctgagactgagaagggaatatttgatgccatattggaaggtcacattgattttgaaagtcaaccatggcctaacatctcagacagtgccaaggatcttgttcgtaagatgcttatacaggatccaaagaaacgcattacctctgctcaagttcttgagcacccatggattaaagatggaaatgcttcagacaagccgatagacagtgcagtcctttccagaatgaagcaatttagagcaatgaataagctaaagaaacttgccttgaaggtcattgctgagaatatgtctgcagaagagatccaaggtttgaaggcaatgtttacaaatatggacactgacaagagtggtacaatcacctatgaagaacttaagtcaggattgcatagacttggctcaaagcttacagaggctgaagtgaagcaacttatggaagctgctgatgtagatggaaatggctcaattgactacatagaattcatcactgctacaatgcatagacacaaattagaaagagatgaccaacttttcaaggccttccaatattttgataaagacaacagtgggtttattacaagagatgaattggaatcagccatgaaagaatatggtatgggtgatgatgcaacaatcaaggaaatcatatctgaagttgatacaattatatctgaagtggatacagatcatgatggtagaatcaactatgaagaattctctgcgatgatgaagagtgggaaccaacaacaaggcaagctattctaaatcacaccatctaaccagtctgagggcctggtatccaaaacccctctagagaaaaggtttatacctctgagaagtacttccaaacagtttgtatcactcataggcatgtaaagcttctatttagaatgtttttgagttactatgctcctcatgactgttagtcaactccctttttttcatttctgggacctttttttgcttttcactgagattccatttccgagtcctctttgaatttgttttggacacaaagtataaactcacatagaaaaaggtgatatctcaataagattatacaagtttttgcgcttg

SEQ ID NO: 29471 - DNA, 2264 bp, Glycine max
  Clone ID: uC-gmflminsoy049c02_FLI
aaaaccctagaaaccacactgatactctcacacacattgtggctttggcagcgcaactcgtcttcgttccttagactcggctcgatctgcgagaggggcttcctagccctccctctctctctctgctgcaattcaggtgatttgtcttcacatggaaacattgcttgcttgagggactcctttgtctcaaaggagttggagttttctgggtttttgtgggattggagatttagagagtgcccctgcactccctgttttatttcatcaccatgattgccactgaaactatagtgccgagtacaaaattgaagatcaagttttcaaccaaaagaatggaggttgagtctgggccaaaatatgaatttggacagaaagtgtctcacactgacgaaaacaggagctttaatttgaatggaaaatcctctgcactgaattccaacaagaggggaccacccacaagtattgagggccaaaaggagaaaaggcagaggattgatcggaaagggtcgatgcagtgtgctacaatacttaagagtctaatgtctcacacatatagttgggtgtttagtaagccagtggaccctatagcgttgagtattccagattattttacaatcatatctcatccaatggatttgggcacaattaaatctaagctggagaaaaatatttattctggcactgaggagtttgcagctgatgtcagactgaccttctcaaatgctatgaaatataatcctcccagtaatgatgttcatttgatggcaaaggaactcagcaaaatatttgacagaaaatggaaagacttaggtcggaaatggaagtgtgaagatgagcatgataaaagcgaatctgaaacaattaaggaaactgggagaaaaagtcttgacatgctgtcccggcatagagattccttgcccaaaaagacacaagtatctgaacacaaaggaatgcccaagattagatcattggcaacaaaagatgctagagtggagccatctaaattatcacagattccttgcaagttgattgagaaagacatgcacaaaggcaacaaaggtaatcatgatgtggaacagcctgctggctctctaaaggcatgttcttcagtatgctttgtcacatccaagtgtagaatttgtggggataccacatgccattgtgtaattcctagcaattcaatacaggtgtcatcagatatatcatctgaaggatctgaaggaggggatgtaattacacgtggtgctgattctttgagacagaattgcccgactaaatgtacttcacctattgagaagaaatctgatcctgattctgatggggctgtaagttctttggacagtgaacatgtttgtcctagttctcagcatgtaactcctactactgatgcctcttctggggaagtatggagcacacctgttttgcctgtccagctttctcctaaaaaggctcttcgtgctgctatgcttaaaagccgctttgcagataccattttgaaagcacagcaaaagacccttcttgatcatggtgataaaggtaatcctcaaaaaatgcagcaggaaaaggagaggttggaaaggattcagcgtgaagaaagagctaggatcgaagcccaaattaaaattgctgaagctgctgctagaatgagggccgaggaagagtcaaggcagcggagagaaaaggaaagagaagctgctcgagcagctatagaaaagatgaaaagaaccgttgatatagaacataatgtggagattattaaagaacttgaaagtttgagtggatgcacgctatcttataaagccgtgggctgtagaaatggctacaaagttgcattggagacattggataaacctcagtttgagaacccattggagcggcttggtttatttatcaaggaagactttaccgcagatgaagatgaggaggttttgaacggaggctttgaagaaggggaaatttttaactgaatacaccttcatgcagttctgccagcgctaactgtttatatccttttagacagggaaacagacaattattgtaaatgcacatattgtttggaatctagtcttttgactatatctgccttaattacctcttgtctgggaattaggtaactacacgcttgcaattttgttttacaatattatagcattccttcgagcaaacgtagaaaactctttaatagacgtgatgtgtctttgtctcgatgtaaataggttaatataaatgtctcaaaaaacaggaattttttttatttagttacc

SEQ ID NO: 29472 - DNA, 1412 bp, Glycine max
  Clone ID: UC-GMFLMINSOY049C10_FLI
gtgctaatcaagttgttaaagcagcctcaagggtgtctttgacaaatggtgttgtctctagttcccagacatttggaaatgtagctgtatcgttcctgttgtaccaagagcagaacaagggatgtggtttctttatccatgtcagatgtgatttagtgtccttctcatttcaaatatatttatttttaaccccttatggtgatctatcttagattgggaaaagaattaatttctccatttttatccttggttaaacctatatgtcttctcatgctcatcaagtaagaaggattttaatcagtagtgtccccattattgctctctaattgattattgagttgtgggaaccaaatgtgtaaatcagttgctcaagattaacacttagtgttgtgacttcaggaggcggtcacattacaccagaggtgcagagattagttgtccatttgtgttcttcaaattttcaactgacaccaacagcagtcaattgtcgttgaattctatggccagggagtttgacatgcacttttggaaaccctactggcagtgtaaatcgaccgggtaagaatttttgatgagtactttgtagtatgacctttgtacttgtgtcgctgtctattataaggggatgaaaatagaagaaaaaatattaaacatactgtataatgaggtcgatagtgtaaagatgcttcatacacaaacacaatattatcctaagcactagttttgtttgtgtcgatgtggatggtagtaaatagtaattatctgtgcctaactattgtgtaactacccagtttgtaattgttaaaataataacaagaaatgggtaaggatcatcaattccacaaaagaagtaggtcatggatggaagttgcatcatattcatatttgttctgtatgatgcttacatttaatttcatgtttatgaaatgacaggaacatttctttcaagttgtctttgttgaagtcattcttcattctgtctgtgaaactaaatgtaacagaaacttgtacctctgtcattgacattttttatgaatttaatttaaatgcactaacactaattaaaaaaaaattatattatcatccaatcatatttcattatggcaatgaaaatctttacatcgatagtgtatgaaaattaaactgttttatttgtttactcaccctgctggctttctttgtttcacattagattttagagctgttgatgcgtgggttggttgggtttaattgttttaggaagctttcggtcatattctctgcctctgcaatcattcgatgatggttttttgccagaaaatcaacgattggttttgtggattgtcttattgagtattctattatagacttctattaatgagttagactacgtgtacttaactacttataataatgaagcattacgtttcttt

SEQ ID NO: 29473 - DNA, 743 bp, Glycine max
  Clone ID: UC-GMFLMINSOY049D04_FLI
aacagaagtacctgagagtggtctactatgtgatctcttgtggtctgatcctagtaaagacattgaaggttggggagagaacgaccgtggagtttcatatacttttggtgctagcagggtcacagaatttcttggaaagcatgatctagacttgatttgtagagcacaccaggttgttgaagatggatatgagttttttgccaatagacaacttgtgactatcttttctgcacctaactactgtggagaatttgacaatgctggagcaatgatgagtgttgatgagacactcatgtgctcttttcagatactaaggcctgcggaacacagaaagcctaagtttgcttttgggagcaaaactacattcaaggcaattcttgatgctgctagagtatgaccccattgagctgacttagatcaataaagtttgtaacatagcaaaaaattgacatggacaaattgatatccgtgttcactccaatgtgaaggaagggtattacaactaccaatataatgaagaacgtaggaatattatctctgctttttcttttcaagtatagctgaaagtgtttttctgtgctggcgcattctcaatatgtaccatgttgtcaacacagatttagggggtcaggttccatttttcttttctttcagctttttgatgtgagagacagttatgcaattctccttttcatatctcctgttgtattataaatggcagcatacttttcgacttgctttct

SEQ ID NO: 29474 - DNA, 2114 bp, Glycine max
  Clone ID: UC-GMFLMINSOY049E06_FLI
aatctcttccctcccctcacctctggttgcagtggcagcgagaagagaacagggaaaacaaagaagcagtgttgtcttcagcgtcgactacaaccgcttcattggcgtcctcctccgccactcccgcctccacctcgcccaccacttctaccgccgccacgtcatcccccgcggcttctccctcctccccttcacctactcccgcttcatctccgccctctgctccgcccccaacaacattaacctccccctcatccacaggctcctgctcgacatggacgccctcggcttcgtccccgacatttgggccttcaacacttacctcaacctcttatgccgccaaaatcgcttagaaaccgccctcgaactcttccactccatgccctccaagggaagagaccccgacgtcgtttcctacacaattattatcgacgcgctgtgcagagctaaacgctttgacgaggctgctagggtttggcgtcgtttgattgacagagggttgaaccctgattataaagcctgtgttgctcttgttgtcgggttgtgcggtggggggcgcgttgatttggcttatgagcttgttgttggtgtgatcaagggtggggtgaaggttaatagcttagtttacaatgctttgattgatgggttttgtaggatggggagggttgataaggccatgaagatcaaggcgtttatgagccggaacgggtgtgtgctggatttggttacttataacacactgttgaattactgttgtgatgaggggatggtggatgaggccgtgaggttggtggagaccatggagaggagtggggtggagccggatttgtatagctataatgagctgttgaagggtttttgcaaggcaaatatggtggatagggcttatttgatgatggtggagaggatgcagaccaaagggatgtgtgatgttgtttcgtataatactgtgatcacggcgttctgtaaggcacgccagactaggaggggctatgagttgtttgaggaaatgtgcgggaaggggattaggccggacatggtgacatttaatgtacttatagatgcatttctgagggaaggaagtacccatgtggttaagaagctgcttgatgaaatgacaaggatgtgtgttcttcccgattgtatattctatacggcagtagttgatcatctgtgcaagaatgggaaggttgatgtggctcatagtgttttttgtgacatggttgagaatggggtaaatccagatgtcatctcttacaatgcacttgtaaatgggttttgtaaggcttctagagttatggatgccatgtgcctatttgatgaactgcagagcaaaggtttgtaccctgatggggtaacttacaagttgatagttggagggcttataaggggaaaaaagatttcactggcctgtagggtctgggatcagatgatggagagaggttttacacttgacagacatctctctgagactctagtcattgccattcaatcaagtgatggcacaacatgacactagtttgtgttttgatcctctcaaattcatcacacctttctttcaaatgggaaacctgacttaaaaagttttctctggatacaatacaccaaggcttagcaaacctgacctgacctgacctgaaatgttatctgcagcatggaacttcaagcttttccaaagaaatgtcaccatgatcattacatttatccgaagactagctgaaggacaactacaaccagcacaactagcaatttgcagattggtttgatggaaaattggagaagaaataaaaagaacaaaggagggcaaagagaatgtacagatgaaggatatacgcctggattcttgatgatttccaaatagaaatgaatcatctagggtccaccatccaagcaacttctggagtatgacagaaaaaatggaaatagttaagaaaatgccatgttggtggctaaatgtcagcaaatgtggcgtgtattaggaaactagtttcaaactgctacattttagaattagtttggaaactgggttgacaaatcttttcttcattcattcactcactctcttccattgtgtatttctcaaagattttcatttcaataacaaatctttctct

SEQ ID NO: 29475 - DNA, 630 bp, Glycine max
  Clone ID: UC-GMFLMINSOY049F02_FLI
gggagatggttgtaaaggaaggcttgaggctccatccagtggcaccgttactattaccacaccactcgagggaagattgcatggttggagaatatttcatacctaaaaattcaagggtgatagtaaatgcatggacaattatgagagacccaagtgcttgggatgaggcagagaagttctggccagagagatttgagggaagcaacatagatgtgagagggaaagacttccggttcttaccttttgggtctggcagaagggtctgtccaggattgcaattgggcctaaacacagttctcctaacagtggcccaactggtgcattgctttgattggaagctaccaaataacatgttgccatgtgaattagacatgacagaggagtttggcctctcaatgcctagagcaaatcatctacttgtcattccaacatattatcgccttcatgatcaaagttgttagaagtccacgtggggttcatatgaataagatgcactggataataaactaccctttctctttcctttcttatcatcatcaatgtctctatcattgaaaaaattggtttttgttgtttatgcgaaactgttacgccattcgtgacgatttgaaaatagaggaatattatttt

SEQ ID NO: 29476 - DNA, 1497 bp, Glycine max
  Clone ID: UC-GMFLMINSOY049F06_FLI
ctcttctcttctcttcactttgatttcattgcaattacctctttttgttgtgatcttcttcccttctctgttctaaaaaagaacacggctgatctgggctcgactaaaacaaatcactaagtaaaaatgacgcagaatgcgatagtgtccaagacaaaatcggggatcaaccgggacataaccgtgccacaaaagccactggcggcggcggcggcggcgggggggtacattcccattccgaggaggagggttttgaagaacctggaaatcaatgcatgggttgattccatgagatcctcttctccaaccaattccaaatccacctcttctctcgcagaagaacacagcacttggattcttcgccacccctcagcattagacatgttcgagcaaattatggatgcgtcccggggaaagcaaattgtcatgtttctcgactatgatggtactttgtcgcctattgttgatgacccagaccgtgctttcatgtcggattcgatgaggagaacggtgaggaaacttgcaaggtgttttcctactgctatagttaccggcagatgcaaagacaaggtttacaattttgttcgcttggctgagctatattatgctggaagccatggcatggatattcaagggccaacaagaacctccaaatacagcaacaaagataaaggagagcctgttctttttcaacctgctagtgaatttcttcccatgattgatgaggtgtaccatcaattagttgagaaaatgaaatcaattcctggagccatggtggagaacaacaagttctgctgttctgttcattttcgctgcgttgatgaaaagaaatggagtgaactggcacaggaagtgagatcagtattaaaagagtacccgaagcttcgtcttaaccaaggaaggaaggtattagagattcgtccatctattaaatgggacaaagggaaggcgctggaatttttgttagagtcacttggatttgccaactgtaacgatgtctttcctgtttacattggagatgataaaaccgatgaagatgcattcaagaaattaagagacagaggacaaggttttgggattcttgtctcgaaatttccaaaggacactactgcatcatactctttacaagaaccaaacgaggtgatggatttccttcaacgtttggtggagtggaaacaagtatccctccgactcagaacacgttctcgggtgtaaatggatagaatgataatgtacatccctaccctgccataaaaaatggagttcagctagggtagcatataggacccttttttctatgttttgttcagattagaacagagaacaaaaatgtatggaaaaaggaaagacaaaagtgtctttctgagtttgaagcacgtctacatggatgtaattagccacgtagtttttgtagtacaggggaaacgtctctgttgcatcaaatgtaattctgaatggaaaataacatgttacgtatcgaaaaatatatattattgt

SEQ ID NO: 29477 - DNA, 952 bp, Glycine max
  Clone ID: UC-GMFLMINSOY049G11_FLI
cgaatgcattctctgcgaaggcaaattcaacgccacgaagcctcttaacatcacgcgctcccaccgcgatacactctccatgtctcagctttttcttaagaacttcaccttcggctgcgcccacactgcgctcgccgaacccaccggcgtcgcaggtttcggtcggggattactgtccctccctgcgcaacttgcgaccttatctccgaacctcggtaaccgtttctcttattgcttggtctctcactctttcgacaaagaacgagttcgcaaaccgagtccactcattctcggccactacgatgattattccagcgagcgtgttgagtttgtttacacctccatgcttcggaatccgaagcattcttatttctactgcgtcggactcaccggaatctctgtagggaagaggactattctggccccggaaatgctacggagggtggaccgcagaggggacggtgcagcttccgccgcaagggatactctacgtggccagtgccaagcaagtttgcttggcttttgctgcaaatggtgacgatagtgatgttactatatatgggaacgtgcagcagaaaacaatagaggttgtgtatgatgttggtggtggaagaattgggtttggtgctggtggctgcaagtgattaagattaaacatatgctttgggctagttagagaaaaatcaatcttaattggctctaggctttcataattattgttgttccttttattgcaaagtgtacgtaacagtggcaatagaaaaaaaaggaaaacaaaaatgtgggaattaaatataatatagtttgtagcatgaagaagaatggaggggtgaatatatgactctcaagccgtgcgattgcttgcaattgtacatatgtaaggtggaaaaaaaacttaaacttgtccttgttattaattaaatgtttgttgaataaagcgaaattaaaggtc

SEQ ID NO: 29478 - DNA, 1955 bp, Glycine max
  Clone ID: UC-GMFLMINSOY049H04_FLI
caatttcgctctctattgtcatcaattcacacatccaccgttcagttaaaaaccacccaaatccgatggcggcgtcgcggcgtctccgggacctccaatcccaaccggcgaacaagatctgcgtggactgttcccagaagaacccgcaatgggcctccgtatcgtacggcgtcttcatgtgcctagagtgctcaggcaagcaccgcggcctgggcgtgcacatctccttcgtgcgatccgtgacgatggattcgtggtccgaaatccagatcaagaaaatggaagccggaggcaacgacaaactcaacgccttcctcacgcaatacggcatccccaaggaaaccgacatcgtcgccaagtacaactccaatgccgcagccgtctaccgcgaccgcatccaggccctcgccgacggccgtccctggcgggatcccccagtcgtcaaggaagccgtccgctcctccgcatcaaagggcaagccgccgctctcggctggcaacaacaacaacggcggatgggataattgggacccggacgacggattcggatcggccaggggcggggcggatctcaggaggaaccagtccaccggcgatgtgaggggattcggaggcggcgggaacgtgtcgaggtcgaaatcgactcaggatatgtacacgcgggctgaattggaagcctctgctgccaacaaagaagacttcttcgcgcggaagagggcggagaatgagtcaaggccggaggggcttccgccgtcgcagggtggcaagtatgttggattcggatctggccccgccccgaaccagacgggggttaatcagcaaaacgattatctttctgtcgtttctcagggatttggtaaattatcattggctgctgctaatgttgttcaggccgggacaaaagaattctctgctaaggtaaaagagggtggttatgattacaaggtcaatgaaactgtcaatgttgtctctcagaagacatcagagattggacaaaggacttggggtataatgaaaggggtcatggcattggcttcacagaaggttgaggaattcgctagagataacccgaattggatgtctgataactggcaacgaaatgaaagtgatagaaatggtttctaccaggagttcaatcgagagaataatggccgaaattcttctaccagagaaggacaacattcttcaggtgggcaaactaatacttttcactcaagctcttgggatgattggggccacaatgattctaggaaggaagaaacagctaaaggatcagctcctcagtcatcaggtgggaagtttgataataattataactcaagctcttgggatgattgggaccaggaagatacaaggaagaaagaaccagctaaagggtcagctgcccatagcagtgatggttgggctggatgggataatgccaaagatgatggatttgatgatatctatgggagtgcatctaataataaaggtggcgctcataatgacaagtcaggtgctgcctggacaggaggaggctttctctaaggttttgacctgatctctatcagcatgatcaaagttttgttggaagtgacgcaatacagtacctcttggactggtggcatgcaaaccgagtaggggtgttgtttaatatgatggatgtgacctgattgtcaactataagtttgttggtcactattaaattcatgccccgtatgtgctggatgaatgatatattttgaggttagagtaatgtctgcaagtctttatttttcaacattcccccatcctcccttgtgtaatcttttcatgtgattttttggggacttctgtatggttggaaacttattttaaatgtacgtacaagtgtctaaagaaagggcaaattgcccaaatttatgattatttttactggaagtgtgatgaaacatttattgtgacacgaaaatttcataatggttttgaatttatagc

SEQ ID NO: 29479 - DNA, 1854 bp, Glycine max
  Clone ID: UC-GMFLMINSOY050C02_FLI
ttccaaccttaaaagactctcttttctctctctgaactctgaagcaaaacaacattaccagagtggttctagtaattcagtgctgctagaagatggaaactagtgaatggcatatcgagcgaagatctagcttcggctctgaatcccccttagcaagagaggcaggaaatgtgcctgaaactgggtcactctctattgtggtgcttggtgcttctggtgatcttgctaagaagaagacatttcctgcacttttccacctatacctgcagggattcttaccaccagatgaagttcatatttttggctatgcaaggacaaaaatctctgatgatgaattgagaaaccggttgcgcggctatcttgttccaaagaaaggtgcttccccccaacagttggaggatgtagagaagtttttacagctgatcaaatatgtaagcggctcttatgattctgaggatggcttccgcctgttggataaagagatttcagagcatgaatatttgaaaaacagtgttgagggtttatctcggaggcttttctatcttgctcttccaccttcagtatatccatcagtttgcaagatgatcaagacttgttgcatgaataaatctgatcttggtggatggacacgtgttgttgttgagaaaccttttggtaaggatctagaatctgcagaggaactcagtactgagattggaaagttgtttgaggaaccacagatttatcgtattgatcactacttgggaaaggaactagtgcagaacttgttggtacttcgctttgcaaatcggtttttcttgccactttggaaccgcgacaacattgacaacgtacagatagttttcagagaggattttggaactgatggccgtggtggatattttgaccagtatggaattattcgagatattattcaaaaccatctgctgcaggttctttgcttggttgctatggaaaaaccagtttctctcaggcctgagcacattcgggatgagaaagtgaaggttcttgaatcagtgctccctattaatgatgatgaggttgttcttggacaatatgaaggctataaagatgacccaaccgtacctgatgagtctaacaccccaacatttgcaactgttgttctgcgaatacacaatgaaagatgggaaggtgttcctttcatactaaaagcagggaaggcactaaattctagaaaggcagagataagggttcaattcaaggatgtccctggtgatattttcaagtgtaaaaagcaggggagaaatgagtgtgttatccgcctacagccttcagaagctatttacatgaagcttacggtcaagcaacctggactggagatgtctacggttcaaagtgagcttgacttgtcatatggacaacggtatcaaggagtaaccattcctgaggcttatgaacgcctaattcttgacacaattagaggtgatcagcaacattttgttcgcagagatgagttgaaggcatcctggcagatcttcaccccacttctgcacagaattgatgaaggggaattcaagccactcccctacaaaccaggaagcagaggtcctgcagaagcagatcagttacttgaaaaagctggctatgttcaaacacacggctacatatggatccctcctaccttgtagagtgatctaatgtaataagatgaggaatttttagctgctaatgaatacacaataagcttgtgaggcttcttccctttgaagcactcccacggatgtgtatcaagcatttggaacaatataagagactaagagtgtttggcacggtttgtgtaactgatttgcctttaaatgcaaaataaatggaaaatgaagtccatttactagt

SEQ ID NO: 29480 - DNA, 449 bp, Glycine max
  Clone ID: UC-GMFLMINSOY059F11_FLI
ctggtggggtggtgttggcttctcgtgatggaaagattgtgtgtgaaaatactcttgatgcacgacttgatgtagtgttccgtaaaaagcttccagagatccgaaatcagctctttggacaagttgttgcttgaagattttgattgtattgtttggttacccctgtaatatttatattccgaagcataagcttgtctttggacctaaatagctatcttgccattgattctgtcaacttataatggtcttttagataacaccatatttcggtagttcagttgttcccatattgggtacgatgggggcatgcgttattcaacattttctttagcgatggttgttatttgcagctttgagcttcttggcaataaagtaccagatgtaatatattgaacattactctcaacattatgacggaaatataacgttctatattgtcgtaagttcgt

SEQ ID NO: 29481 - DNA, 1670 bp, Glycine max
  Clone ID: UC-GMFLMINSOY059G08_FLI
ccacccagaattgttgggttccattctcaaaacagagaacaagaagaagaagaaagagagagagtgaaaacgggaaaagcaaaaagttgtttctgtgattgattctctgcaaccgaatcatcatcagccacttcttcccgtttcatctctcccatttcttcttttcttccgctctggttcagtaaggcgaagagggttaacgttattcataatggttgcaacagccgctacggcgtcgtttcttcccgtgcctttgccagacgctggaaaagggaaacccaagaaactgggtggtggtggcggtggcggtggcggttctgtgaacctcggaggactcaaacagaaacaaggtttgtgcggtggcttgcaggtcaaggcaaacgcacaagcccctccgaagaccgtggagaaggttgagaatgatttgtcgtcgtcgtcctcgtcgatttcgcacgccccgaggactttcatcaaccagttacctgactggagcatgcttctggccgccatcaccaccgtgttcctggcggcggagaagcagtggatgatgctggattggaagccgcggcgccccgacatgctcattgacccctttgggattgggaagatcgtgcaggatgggcttgtgttcaggcagaacttccccattaggtcctatgagattggcgccgataaaaccgcgtctatcgagactttaatgaatcatttgcaggagactgcacttaatcatgttaagactgctgggcttcttggtgatggatttggttccacgcctgaaatgtgcaaaaagaacctgatatgggtggtgactaagatgcaggttgtggttgataaatatcccacatggggtgatgttgttcaagtagacacttgggtatctgcatcagggaagaatggtatgtgtcgtgattggcttgtgcgtgacgcgaaatctggtgaaatcttgacaagagcctccagtgtttgggtcatgatgaataaagtgacaagaagactgtctaaaattcccgaagaagtcagggcagagataagctcttattttgtggactctgctccagttgtgccagaggataacagaaaactaaccaaacttgatgaatccgctaatttcattcgcactggtttaagtcccagatggaatgatctagatgtgaatcagcatgttaacaatgtgaagtatgttgggtggattctggagagtgctccacagccacttttggagagccatgagctgtgtgccatgacattggagtacaggagggagtgtggcaggaacagtgtgctggattccctctctgatctctctggtgctgatgtaggaaacttggcagatggtggattttttgagtgcaagcacttgcttcgacttgatgatggtgctgagattgtgaggggtaggactcaatggaggcccaaacctttaagcagcaactttggtcatgttttgagtcaggttccagttccagcagaaagcacctgaatcttatcttattgattggcatcactggaggaggagtggcataaattcatagagagctttgcttgtttttatcaaatctacgtatcttaaaatatatataaaagaaagtgtgttactttggctaaaaaaggggaggggaagtagaaagtaaaaaaaaaaaaaaaaatctcgctctcatgattttgtaatt

SEQ ID NO: 29482 - DNA, 830 bp, Glycine max
  Clone ID: UC-GMFLMINSOY060B09_FLI
gaaagtgctcttcggaactgtccgttgagcttcgcgaactttgccgttcgatgtgttgttgttgttttgggttgttattccaaagtttgtttgcttttctgtgtctttgcaccatttcctaattacattgaacacttttaagggttcttgcaaaacctttctcacccttttccaattcagtcaatgccgcaaaatgttgtagcatctgttcacaatcagtctctcactcacatagtgttagcgtgaatgagacaaaaatgcttttgaagctttgcgattttggctctgcttgtcacgtgggcgacgcggagccggccccctatttggtgtcccgtttctaccgcgcccctgaaataatgctcgggttgccctacgattttggaatcgacctttggtctgtggctgtgactttgtatgaagtttatacgggaaaaataatgttcccgggcaagtcaaataaccaaatgctcaagttcatgatggatttgcgcgggaagttcccgaacaaggtgattcgaaaggcggtcttcaaggaccaacacttcgactacaactgcaattttttgtaccatgagacggacaaagtcaccggcaaagacaaagttacagtgctcaccaacatcaaattgttgcgcaatcttccggctgaactctccggtgatcaggaacttgacagagatgggtttgccaaggttgaccatttccggtctttgctcgaacagatgacagctttggacccctccaaacgaatttcgtgttcggatgctttgaaacaccctttcattgtagaaaagtgatgtgaactttaagcgcagaacatatttgaactt

SEQ ID NO: 29483 - DNA, 1965 bp, Glycine max
  Clone ID: UC-GMFLMINSOY078A09_FLI
gcaggactgggaatggctgttgggagggatctgaagggagacaagaataatgtagttgctgttatcggtgatggtgctatgacggctggtcaagcttatgaagccatgaacaacgctggatatcttgattccgacatgattgttattctaaatgacaacaagcaggtctccctaccaactgctaatctcgatggtcccataccacctgtaggtgctttgagtagtgctctcagtaagttacaatcaaacagacctcttagagaactcagagaggttgctaagggagtcactaaacaaattggtggcccaatgcatgagttagctgcaaaagttgatgaatatgcgcgtggcatgatcagcggttctggatcaacactatttgaagagcttggactttactacataggtcctgttgatggtcataatatagatgatcttgtgtccattctaaatgaagttaaaagtactaaaacaactggtcctgtgctgctccatgttgtcactgaaaaaggccatggatatccatatgcagaaagagcagcagacaagtaccatggagttactaagtttgatccagcaactggaaaacaattcaaatccaatgctgccacccagtcatacacaacatactttgcagaggctttaattgctgaagcggaagctgacaaagacattgtcggaatccatgctgcaatgggaggtggaactggcatgaatctcttccttcgccgtttcccaacaagatgctttgatgtggggatagcagaacagcatgctgttacatttgcggctggtctggcttgtgaaggccttaagcctttttgtgcaatttactcatcatttatgcagagagcttatgaccaggtggtgcatgatgtcgatttgcagaagctgcctgtaagattcgcaatggaccgagccggattagttggagcagatggtcccacacactgcggtgcatttgatgtcacttttatggcatgcctccctaacatggtggtgatggctccttctgatgaagcagagctttttcacatggttgcaactgcagctgccattgatgatcgacccagttgtttccgatacccgaggggaaatggtattggtgttgagctaccactagggaataaaggcattcctcttgagattgggaagggtaggatactaattgaaggagaaagagtggccttgttgggctatggatcagctgttcagagctgtctggctgctgcttccttgttggaacatcatggcttgcgcgcaacagtggcggatgcacgtttctgcaagccattggaccgttcccttattcgcagccttgcccaatcgcacgaggttttgatcactgtggaagaagggtcaataggaggattcggatctcatgttgttcagttcatggcccttgatggccttcttgatgggaaattaaagtggaggccaattgttcttcctgattgttacattgaccatggatcaccggttgaccaattgagtgcagctggtcttacaccatctcacatagcagcaacagttttcaatctacttggacaaacaagagaggcactagaggtcatgacataaaacaaatgcaaaggggttcaatttttgttccctgcaatgtacaaagtagcgtgattcacccagtgtaatacaaatgtgtttgttaaaaaataatagaaatggaaaatgcagattgacaaataatagtgccaacaaatggttaaacgaataaacaaacacaattggtagtgtatcttcatattttgatatgacggggaaaagatttagctgaaggcatgacagaaacgaatttttagctatgagaggactcttgaatgtgaatgtcgaagatgacgttggtatgccattacatcttagtcattgaaaatgtccctaagaggtccacctaaacatttgcattacgttctagtggaaaaagtaaagtccaaaaaaattattatcctc

SEQ ID NO: 29484 - DNA, 2440 bp, Glycine max
  Clone ID: UC-GMFLMINSOY078C06_FLI
gttctttctaagctatccaggggtgctcgagtaccattggaatatataagctacatggatcgtcatcgaaggaagtctgtgttagtgacggttgatcggcatgaatggtatgcaccacctcagatatacactcgtgatgacagtactggtctttggaatgctaagcctgcttttaagcttgattcccccttcctatcattgggtgctaaagatgttgaaaatctatctagacagtcagtttcactaactggtgagcatgcttgtgggggacatgtgtgtggagataacagtcaggagttggttgatggtgtcactagcatggaaaccaattgtgaagatccctcagagtgtgtatctcaccacaatgcatctgatggtgtggtgaaaaaacgaaaagtggatgaagatttatcagctgatggaaatgttgttgctgatttttccttaaatgactcaagggaaactaagctagaaaaatcaagtattatacaggatgacatgttaatggactatcagggtgcaactgcagctacagcaaatgcatcagttgctgaacgtgtgatcgagcctacacttgtgatgtttgaggttcatgttcccccatcttgtatgcttgatggtgttcattcacagcacttttttggaactggtgtcataatttatcattcccaagatatgggattagttgcagttgacaagaatacagttgcaatatctgcttctgatgtaatgctatctttcgccgccttcccagttgaaattccaggagaggtggtatttctccatcctgttcacaattatgcccttatatcatatgatccctctgcattgggacctgttgggggttcagttgttcgtgctgcagagttacttccagagccagcattacgccggggggattctgtttatcttgtggggttgagtagaagtctgcaagcaacttctaggaaatcagttgttaccaatccttgtgctgcattaaatataggatctgctgattcccctcgctatagagcaaccaatatggaagtaattgagcttgatacagattttggcagtacattttcgggtgtgctaacagacgaacaaggaagggtccaagctatatggggaagcttctcaactcagctgaaatttggttgcagcacctcagaagatcatcaatttgtgaggggtattccaatttatgcaataagtcaggttcttgacaagattatatcaggtgcaaatgggtcacctcttcttataaatggtgtcgaaaggcctatgccacttgtgagaattctagaggttgaactttatccaacattgctttcaaaggctcggagttttggattaagtgatgattggattcaagcacttgttaagaaagatccagtaagacgtcaggttttacgtgttaaaggttgtttggctggatcaaaggctgagaatcttttagaacaaggggatatggttttagcaatcaacaaagaaccagtcacatgcttccgtgacattgaaaatgcttgccaagctttagacaaatccgacgccaatgatgggaagcttcacttgactattttccggcagggacaagaggttgaactttttgtgggaacagatgttagggatggaaatggcactgctcgtgcaattaattggtgtggttgtattgtccaagatccacatccagcagtgcgtgctcttggatttcttcccgaagaaggtcatggtgtatatgtggcaaggtggtgccatgggagtcctgtacataggtatggtctatatgctcttcagtggatagtcgaaattaatggaaaaccaactccaaatatagattctttcgttaaagtgacaaaggaactagaacatggcgagtttgttcgtgtaaggacaattcacctcaatgggaagccacgagtcctaacattgaagcaagatttgcattactggccaacgtgggaattgagatttaatcctaatagtgcgatgtggcatcgcaatataatcaagggattgaactgcagttctgtatgaaatatgaatgatcagaccatgtaattctttctaattcctatgtacgcagctacacgggagtatagaaaaatctcgtggaaggcatcttccaggttcagaattatggtttaccagtgccctcgttgcaaatttgaggcaaatttgatgctttgccgttaaggggtctacttcaattggttgaacagatggagagagatactataaaacattttgtccaaacatattgtattgcattgccatgattgataagttatgaggcgttcgattcaggctggcaattatttattcggatctgtaccgcaacatataacagtaggctaattatattggatcctggaaaggttggataataaaagaaaaatgaaaaatatttatagtttatgtattgaaggaaaaaaaaaaacacaccttttctttggtt

SEQ ID NO: 29485 - DNA, 1417 bp, Glycine max
  Clone ID: UC-GMFLMINSOY079D01_FLI
gcgattcaaaagaaggcaaaatttgacataacggacctcaatacaattaaggtggcaaaatcttgttttgttccagctctactaggccatgccattgatgatgattttatacagccccatcactctgatcgaatatttgaggcttacatgggagacaaaaacataattaaatttgacggagatcacaattctcctcgtcctcagttttactttgattccataaacatcttttttcacaatgttttgcaacctccggaagatgaggttggggaatcattttttgaccccatgaatgattactttggtaaggatgtttggagatctgtgcacgaattaggctacagcaatgaatcatcatctaaaaacaaagatgcagaaccatcaacaagcagcacgataaatgccattgagcaggtccgttcaagacgaccaatgagtaggatggaggttccatctgatatttcttcgaaagatgaacatcgtgaacatgaggagaagtgcggcaatatttccccatcatcatcgtcaatgataagctttgaattgtcaaatggtgatccctttgggtcccatgttccagccacattggaagatgatcagtatgtagaatatcaactagatgaccttgcaggttttccatctactgcagaggaggaagaaagaatgttcatggaagcagtgatggagtcactgaaggacctggaagtacgaaatccaaatgcagaacaaccaacaactagtgttagttctgtgtatgtagatgctgtagagccgtctgataaagatgcttcttcaggagagatttcgagactggtggagacagaatcttcctcactcaaacacaccacagagtcaaaattcaaaaccacttcctcgacatcagaagaatttgagccattgaacggtgagtcaaattccatttcagtgaaacattcccaaaatgtggtgtctgagccaagtccagtaccaagtgtttcattagaaggaccagcacatctgcagctgcagccaccaccatcggcccctactgacacatcatcagtaactgagtccagcaatacaagtggttctgctagtagcgatagttctgctagtttacaaagttcatcagagactgatgtatcacataacacgaaagccacagtaactgttgttaggaatcccgcaggccatgtcatggatggcttaatgcgtcgatgggatttcaattttttcaagaacaaatagtcacaaccgatgatcagatgagagattctcatgtatacattgtttttgtaactacaagaaaacaaaaatcatagtttgtaccaaagaaaataggttgctcgtgtgtaaattttgtatgtttagattctcaactaacaaatcatccaatattctttgactgtaagtgagaattgtcatattttgttgtttt

SEQ ID NO: 29486 - DNA, 1755 bp, Glycine max
  Clone ID: UC-GMFLMINSOY079F11_FLI
gctctgtttctgtctctgtgtttgcggctgaggattccgaacgagcgaccttcttcgtttctcgcaaagtttaagtcatcatgggtaaggaaaagactcacatcaacattgtcgtcattggacatgtcgactctgggaagtcaactaccactggtcatttgatctacaagcttggaggtattgacaagcgtgtgattgagaggttcgagaaggaggctgctgagatgaacaagaggtcattcaagtatgcctgggtgcttgacaagctcaaggctgagcgcgaaagaggaattaccattgatattgctttgtggaagtttgaaaccaccaagtactactgcacagtcatcgatgcccccggacatcgtgactttatcaagaacatgattactggtacctcccaggctgattgtgctgtccttatcattgactccaccactggtggttttgaagctggtatttctaaggatggacagactcgtgagcatgctcttcttgctttcacccttggtgtgaagcagatgatctgctgctgtaacaagatggatgccactaccccgaagtactctaaggctaggtatgatgaaattgtgaaggaagtctcttcctacttgaagaaggttggttacaacccagacaagattccatttgtgcccatctctggtttcgagggtgacaacatgattgagaggtccaccaaccttgactggtacaagggaccaactctccttgaggctcttgaccaaatcaatgagcccaagaggccctcagacaagccactcaggcttccattgcaggatgtctacaaaattggtggtattggtaccgtgccagtgggacgtgttgagactggtgtcgtgaagcccggtatggtggtgacttttggtcccactgggctgacaactgaggttaagtctgttgagatgcaccatgaggctctcacagaggctcttccaggtgacaatgttggctttaatgtgaagaatgttgcagtcaaggatctcaagcgtggttttgttgcatccaactccaaggatgaccctgccaaggaagctgccaacttcacatctcaagtcattatcatgaaccaccctggccagattggaaatggatacgcaccggtgcttgattgccacacttctcacattgctgtcaagttttctgaaatcttgaccaagattgacaggcgatctggtaaggagcttgagaaggagcccaaatttttgaagaatggtgatgcaggtatggttaagatgattccaaccaagcccatggtggttgaaactttctctgagtatcctccccttggtcgttttgctgtgagggacatgcgtcaaactgtggctgtcggagtcatcaagagtgttgagaagaaagaccccaccggagccaaggtcaccaaggccgctgccaagaagaagtgattgcatttgggcaattttgctagcacatgtgatcatcatcgtggttactcctttatagtagttttatccttgcagagtcttaggtgttttgtttaagttatatttttaagtttctgccgatttcatgtagccgtaactttcaaaactaggttcttgatcggcggtggtcaattttcattgctgtttgtttttgatgagtactgttttttgttttgatggtaagaagagtctgagatatttcgaatttcacaagcagctatagggttttagtccatttcctttgctgctgagggatgttttaagttgcatttaatttataacgaagttttat

SEQ ID NO: 29487 - DNA, 2407 bp, Glycine max
  Clone ID: UC-GMFLMINSOY093D12_FLI
gctggtcagcactgacctccgatgtttctcggcaggagccaatacaaaaattacaataccatcatcaatccaatcatcctaaaattaaccagaaataaaaaatagaaatatttttcgaaactaattttgtggagatctgtcggagaagaaagaagcgaaaattatcctctttccattcgtcgttcaccttcacttctgagagagagagagagagagagcagagcagaggggaagaagctgatgagaggagatcgttggatgaatatataatataaattggtttgtttgatgggcaacacatgccgcggatctttgaaagggaaatatattcagggcttcagccagcccgaagaccattccaagcgctccaccacccattctgatccctcctcaaccaagcagcaagacgacaacgacaacaacaacaacaacaacaacaacaacaacaacaacaacaacaacaataacaatcttcccttcaacgccaagagagaagccatcatgcgccgaggcctcgacaaccaagcctattatgtcctaggccataagactcccaacattcgtgatctatacactcttggtcgtaaattgggacagggccaatttggcaccacttatttatgcaccgagaattctacctccattgaatatgcctgcaaatccatctccaaaaggaagttgatttccaaggaggacgtcgaggacgttaggagggaaattcagataatgcatcatttagctggtcacaagaacattgtcaccatcaagggtgcttatgaggatcctctctatgttcatattgtcatggagctttgttccgggggtgagttgtttgatcgcatcatccagaggggccactataccgagaggaaggccgcggagttgaccaaaattattgttggggttgttgaggcttgccattcccttggggtcatgcatagagatctcaagcctgaaaactttctcttggtcaacaaagatgatgatttctctcttaaagcaattgactttggcctctctgtattcttcaaacccggtcaagttttcactgatgtagtcggcagcccatactatgttgctcctgaggttctcctcaagcattatgggcctgaagcagatgtgtggacagctggtgtcatactgtacatattgcttagtggcgtgccgccattttgggcagagacccagcagggtatatttgatgcagtattgaagggacatatagattttgactcagatccttggcctctaatatctgacagtggaaaagatctgattagaaagatgctgtgttctcagccttcagaacggttgactgctcatcaagtgttatgtcatccttggatatgtgagaatggagttgcccctgacagatcactggaccctgctgttctttctcgtctcaaacagttttctgcaatgaataagctaaagaagatggctctgcgagtgattgctgaaagtctatctgaagaggagattgctggtttgagagaaatgtttcaggctatggatactgataacagtggtgcaatcactttcgatgaactcaaagctggtctaagaagatatgggtctacccttaaggatatagaaatacgtgatcttatggaagcggctgatgtggacaaaagtggaaccatagattatggggagtttattgctgctacatttcatctcaacaaactagagcgtgaagaacatcttattgcagcattccaatattttgacaaggatggtagtggctacattacagttgatgaacttcaacaagcttgtgcagaacataacatgactgatgcttttcttgaagatattattagagaagttgatcaagataatgatggaaggattgattatggtgaatttgctgccatgatgcaaaaaggcaacgctggaattggtaggaggactatgcgcaacagtctgaatttaagcatgagagatgcaccaagtgctcaatagcttacgattgtgctcattatgtacaggtttgtatgcagcaaagccagaaagagaaaaataaagtataaatctttccaaaaaattgttcatatcttgctgaccggtcctatccctgaagaacaatcaggattgtgggtgctctcgcatgaggattcatctagtgttacatttatgtgctgtatgagtggaaaaattgtttctcgctttgtaaaccttagtgttgggtgttacagctacttcaagttggtcttctatttttctgtgctttcatgtaggggcattctgtctatagtttaagtagaaggattttgatctttcaagttcttgatttcacggatgtaaagtttcacacgcatgacatgatgtattgggcgtactaagaagcctttgtggagtatgatgctttgtgttaaagcgacagtgctgaagcatattatttccc

SEQ ID NO: 29488 - DNA, 710 bp, Glycine max
  Clone ID: UC-GMFLMINSOY104F05_FLI
ggggtaatattgcttggagatttaaattacagaatttctctaccggaagaaacaacacgcttacttgttgaaaatgaagactgggattacctactagaatatgatcagctaacaatggagctaatgaggggaaacatgttaaaagaatggcatgaaggagcaatcacatttgctccaacctacaagtattgtccaaattcagacatgtactatggatgttgttatcaaggcaaaaaggcagggaagaagcgagcaccagcatggtgtgacagaattatatggtttggcgatggtctaaagcaaatgcagtatgctagatgtgaatcaagactatcggatcacaggcccgtcaatgcattgtttatagcacaagtcagggtttcagcaacactgaaaagctttcaaagtctgtttttgtcggagagatttgaacaaattaaaactcactttggatttccccacaatgacgagtttgtatgtaaaaagcaactaagtttccggttgtgaatcattaattaattagtactgttcttatatatctgcatactagtttgagtcaaagaagaaattaaggaaattaagaggtgatcaaagattattaattagctcttttgctgatgagagacacagtgaagttagttgtttattatctagctaactagtttttaaataattgtccaatagaaggtgcaaatatgtcattgaacatt

SEQ ID NO: 29489 - DNA, 893 bp, Glycine max
  Clone ID: UC-GMFLMINSOY105A03_FLI
ctttgactcctgtataatggggcgggttcgttacattgttccaaggctcattattggggtatttattcagttactatgtagctatagtaccctgccactttatgcaatcgttacacagatgggaactcactttaagaaggccatatttgatgaacaagtgcaagcacgccttgtaggttgggcacaaaaggcaaagaaaaaaggacaaagaggtgataatagcctctctggccaagaaagttctcgtgcaggtgctggaattcaactaggatcagtgttcaggagggaatctgcctcagaagacaatgttattgtcccaagaaatgatggatccgaatgagtgtggaatgtggatataccgtagccaagatgtacacacgtacaaaaaaatgttttggcaccatattatatatttttaattgtaattttgcttagtatcaaatcagcaatgaaccaccccaatgttgccttttatttttatgtttttacataatgtggtggataacttaggatgccatcataacattatcaaggatagatagatcttcaacaaaagcttattatacaaaagaaatgcactaagggagtaaatgtttcaaatgaatagtaagaactttggaaataattttgtaaacgacattataaagggagaaagagcgaaaatcactcgacttagggttgttatttttgggaataaggacaatggtgatgttgttgacatgagggggaaagttaccagttttgagccatgtaatgcctttgtggaaaatttcaagaccacaaaagtgcccaaatctcttaaagaaagcagggtttaagtcatcaaggtctgggatttgtcagatttcatttcaaagagagttgattaaaataccttaatagaaaaagtggtc

SEQ ID NO: 29490 - DNA, 1990 bp, Glycine max
  Clone ID: UC-GMFLMINSOY105H11_FLI
gtgaattcagggccaaatacagactcattagctgatgctttagcaattgcgcaacaccatgatgcagtcactggcacagaaaagcagcatgtggccaatgattattctaagcgattgtcaataggcttcaaggaggcagaggaattggtttcatcatcgctggcttgcttggttgagtcaccgttgcttactagatgtcaaaatccagttacaaagtttcaacaatgtccacttttgaacataagttactgtcctgcatcagaagttgatctggttcaaggaaagaatttggttattgtagtttacaactctctaggttggaggaggaatgaagtgattcggattccggttattgaggccaatgttagagttcatgactctaatggtatagaaatagaatctcaacttcttcctcaggctgagaaatatgtagacttaagaaattactacgtgaaggcatatctaggacaaactccacccaaggcacctaagtactggcttgcatttacagtttctgtaccgccacttggttttagcacatacactgtctcaactgccaaaaggacagggtccacaagatcatcagtagatatatataagagtagtgaaaagtctaaatttgatgttggtcaaggaaatttgaagcttacattttctatggatcaagagaagtgtaccaattatgttaatataagaaacctggtcgaggaacaggttgaactaagttacctatactattctggatacaatggaactaatcaaaaagatccacagaattctggggcctatatcttccgtccaaatggcacacatcccataaaccatgaaaaaaaggttccattgactgttttgcatggacctgtgctagatgaagtgcaccaacaaatcaatccatggatatatcagattaccagactatacaaaggaaaggagcatgttgaagtggagtttattgttggccctataccaattgaagatggaattggcaaagaagttgccactcggatttcaactactatggaaaccaacaacatgttttacacggattctaatggacgtgattttatcaaaaggatacgagactacagaacagactgggacctagaagtgaaccaacctgctgctggaaattattaccctattaatcttgggatatacacagaggataataaaacagaattctcagttttggtggatagagctattggaggatccagcttacaagatggacaaatagagctgatggttcacaggagattactacttgatgattcaagaggtgttgatgaggctctaaatgaaacagattgtgtcggtgatgattgcaggggtctaactgtccaaggtaaattttactacagaatagaccccttgggtgagggcgctaagtggcgtcgtacttttggccaggaaatatattctccacttctgttagcctttgctgaaaaggatgataaagatgactggatgaattcccgtgtattaacattttcaggaattgattcttcttatgcattacctgataatattgctattataacattacaggaacttgatgatgggacagttctgcttcggttagcacatctatatgagattgaagaagacaaagatctctctgtaattgcaactgtggagctgaaaaagctcttgcctgggaggaagatcaaggaggtgaaggagatgagtttatctgccaatcaagaaaggacagagatggagaagaaaagacttgcttggaaagtagaaggctcttctggaagtaagcaagtttcaaggggagggccagttgatccaaaagagctaaacgtggagcttgctcctatggaaattcgcacttttatccttgactttgatgatgtgtctaaccaactttttgatgcattgtagaacaaaatcatttcttctagtccttgcttctgaacaagcatattggtatatgacaagttcagctatatgataacctctcataaattacgtttcaaatagt

SEQ ID NO: 29491 - DNA, 1833 bp, Glycine max
  Clone ID: UC-GMROMINSOY200G09_FLI
cttatatgtactgtacctctttattaatttgcgtttgcatgttctaaacaaatttgaactcgcgcggtggctgctcaaattcaacagacacatccatctcatcctcacctcagtatcataagaataataagctcttgtcactgttacaaaaggaacttcatttaccagcttcgctttcgaatttcaatttccaggaagaagaaaaagatggtgattgaggagggcgagatgaagtcccaaggtgaggtggaatcatggctccagcaagaagcgaagaagaaccaccattctccattattctcatcttcttcatatctgggaagacaaacatcatcgatatactctctcacactggacgagttccagcacagtctatgcgagagcggcaagaacttcggctccatgaacatggacgagttcctcagcagcatctggaacgctgaagagaacagccaagccatcaccaacaacaacgtccctctgtcgtcgaccctaacaatattaaggaaacagccaagcctccctcgccaaccctcactgtccctccctgctcctctttgtaggaaaaccgttgacgaggtttggtcccagattcaaaaagaacaaaacaagaacaacaacattagcaatgttcttaatgataataccgagtctgcccctcgccaacccacttttggtgagatgactttggaggattttttggttaaggccggtgtagttcgggaaacaacgtgtgcaccgccactaccggtgtctcactctcatcagccgcattacgcgaataataacaacaacgttgcaatggctccttcttttgttggtaggcatgttggtgcagtgagtaacgtggttgcaccgggttatcaacaagttgttggggaggcttctggtgggtatggtaagagggatcataatggtggtgggtatcattgttttggaggtggtggtggtgggtatggggtggggcccacaatgggaatgggtgggcctgtgagtccggctaattcgtctgatgggatagggaatgatggagggcagtttgggcttgacatggggggtttgagagggagaaagagggtggtggatggtcctgtggaaaaggtggtggagagaaggcagaggaggatgatcaagaatagagagtcagctgccagatctagagccagaaaacaggcatacacagtggaattagaagcagaactaaaccagttaagagaagagaactcccaactgaaacaggcgctggccgagctcgagaggggaagaaaacaacagtgttttgaggaagtgaacgttagtgttaaaaccaaagctcagaaagcaaaagagaaactgagagctttgagaaggaacatgagttgtcctttgtgaagaaactgcacggtaatggtagcagtgaaatacttggattttagtacgcacaacaagagtttgttgtgatgcatctactacttgtgtggctaaacgaagaaatagtcatgacacaaatcaagaggggagaagaaaactaaagaactactcaagtcaaagccggttgaagaaacagagaaacaaaaggtcggagttatgaaatttaattataaagccaagctgcaagagtcctcaagttcaagatcaacgaaggattagatcatccaatttggaaacttctttatcatatgataactagttactcaaatgtacaacatagttattgtattgttgatgacatttcatcttgtttacgcttaccagttaccacacccttgtttagttactgatttgatcgttggtcggcactattgccagatataagtaattaattaccagaatcaatctaattatttatgaaac

SEQ ID NO: 29492 - DNA, 1772 bp, Glycine max
  Clone ID: uC-gmrominsoy210c03_FLI
gtttctactctcacagctgtttattttcttcctcttctcaactgtgttcgtgtgtatgcatttgagttgaaagccagactcaaggagctgaaagacaaaagaagaaacttggatttgaatcagccaaaatttgagttacacgtaattgcaaagataagatgagtgttatgtatagtcctgttctcaattactcagatgtggagcatcagctaaggaaaaaccaagacatggattcaagtattggacatccacaacaacactgtcaccaacccaattctggactattgaggtattgttctgctccaagctcattgctggcaagcctcattgacaacaccattcatggctgtgtcaacgaggaatcgttcacaagtgagaatcatcatcatcagcagcagcagcagcagcagcattatcttccatctacaagttcagaaatggagaccatgttatccaaattgctaccatccaacaatggatggagcaattcagaagctttgcaagaatttggaggcaagcctgtgaagcaggaaataggggaatctattccacaagagccaccacaacagaatggttattcttatggtggctctcagttgatttaccaatctcagcaaattcaaggcttgccaaatggtggatcttccagtgcttctggcagtgcttttgatggctcttttggtgtggtgcactccatggcttcagaggactccattcaatctaaaatgggtatcaggaattgctccaatctctttaggcaaaagagttcccctgctgcatttttctccattgaaaatgatcttgcagcattgagagaagtaggaagctttaaagccgatgatgtttcaaatggactagttactgcatcaactggtgggttgcatagttctcatactttctcatctaggccatcttcatgcttgaaacggttgccacaaatagccgaaaatggaaatgaaagcctagaagaaaattgtgaccaaagtagaaacctagtaaatgacaatggtagctcaaaatgttacatacctagcttcaccaatgaattatgggaaagttctgcattcaatgccccaaaaacagagaatgaagatgaaatcatgttttccacttcaaatattttggaatctcaggaagcagatttcagctttcaaaatctgggtttgactcaccatttgagtctacctagctcttctactaagatgtcatccatagaaaagtttcttcagattcaaggttctgttcctttgtaaaattcgagccaaaagaggctttgccactcacccaagaagtattgcagagagggtaagaagaacaagaattagtgaaagaatcaagaaactgcaagacctttttccaaaatcagaaaagcaaacaagcacagcagatatgttagatttggcagttgagtatattaaggacctgcagcaaaaagttaagatactctcagattgtaaggcaaagtgcaaatgtacaagtaatgagaagcattacactagaacttgtgcttgatttatttgcatgtagatagcaaaaggatggaagattttttagtgtgccaaagttagcaattgtaattagataaaataatgctgacatttgcctggagtgagtttaggaccaggtgaatttttttttttacttttttttttcattttttcccttaatttctttttcttcatagtttgatttaaggatcataaagacctagcatgtttagcatgagttttgtagctcttcattattacatataagaatttatgttgaaattt

SEQ ID NO: 29493 - DNA, 1279 bp, Glycine max
  Clone ID: UC-GMRONOIR023F07_FLI
gcggtgacacaacatcactctgaagaacgtcgcacgcaccacccttctctctcttcaacaactcagctctcagaacagatacagtttccactgagtaaatcgcaatgcaggtaactgagacgaggactgttcaagttaagcagctttcagatctagctggtgtgagagagattcacgagttcttctccttttctggagaaatcgagcatgttgagatcctgagtgaagatgggaaatcaaagactgcatatgtgacatttaaagatcccaaagcccttgaaattgcattattgttgtcgggagcaactatagtagaccaggttgtgaagataactccagctgagaactatgtaccaaatcgtgaaatggaggaagtaagggtggtggaaaatgctataaatgttgctccttctgagaattctgagaatgtctccttgagtattgaggaggggaaagccagccccaccaatagaagaatctaccttagtaaagcacaagatgcagttacaagtatgctggcaaaaggttcagcaataagacaagatgcagtgaacaaagctaaagcatttgatgaaaagcatcagttgactgccaatgcatctgcaaaggtcatttctttggacaagagagttggactcacagagaaattgacagtaggcattgctgcagtgaaccagaaagtcaagtctgtggatcagaggcttcaggtttcggataagacaatggcagcaataattgcagctgagaggaagataaataacactggatcagctgtcaaaacaagcagatatgtgactgctggaacagcatggtttaacggtgcttttagcaaggtggcaaaggctggacatgttgcaagtactaaaactagagaaaaatttcatttggctgtttcaaacttgacagcaaaggaaccgtcagtggctgctgcataggccacaatttttggtaatcaagtcatttcatcaggtctttcagaacatgtgtttgaaactatttggtctttcagagcatgcgctgctttctttctgcccttcaacagttagatgcatgtggcaagtgcggtgattcaatttaatcctattttttgtattcttttgtcactctgttgttttagttgttgcttctatatcatttagcacgagtgattttggcttttttcccttttgtgaaaaggaaattataggtgtgatgctactgcatttcttctgtcaaagttcaaaaaaattgtgcgtgtataacttgacatatggttcaaagatttccgtgggaaattatc

SEQ ID NO: 29494 - DNA, 1780 bp, Glycine max
  Clone ID: UC-GMRONOIR024D07_FLI
cacactcattggaccttatgcaaatgctaaagattcggagaggaggagttccacaagtgcagtcacattagctgctgctttaatagcagctgctgctcttttggcattatctgctataatcattagcttgatttctacaagaaatggaaaatttcagcacttgatttccaggaaatcccctaatgtatctattaagatagacagtgtgaaagaatttactttcagagaattggcccttgctactaacaattttagcagctcaactaaagttggtcaaggaggttatgggaatgtctacaaaggcattttatctggtgaaacacttgtggccattaaacgagcagcagaaggttctttacaaggcaaaaaagagtttttgactgagattgaacttttatcaaggttacaccatcgaaatcttgtctcgctgattgggtactgcaatgaagaacaggagcagatgctggtctatgaattcatgcccaatggcaccctaagggactggatttctggtaaaagtgaaaaggccaaggaaagacaaaattttggtatggggttgaaaattgcaatgggtgcagccaaagggatactatatcttcatacagatgctgaccctcctatattccaccgagatattaaagccggcaacatacttctggattccaaatttacagctaaagtggctgattttggactgtcacggcttgcatcattcgaagaaggaagtaacaatactaaatacatgtcaacagttgtgaggggaacaccagtacgtttgtcagaaaattttggaataatgatttcaatttcaatatttaagaccggagttatattgagaaatttatgatcaaataaatatttcaactgatacattttatgcaattttgacaatttaattatgagatttttcgggcttgtcatattgtcatatcctacccttctactgttgtttgcaaagtttcttcacacctcatcatagtctcaagtgtgggacttccataatagtcaaatcccacttaccatttaatttttagatgtagtagagtttaaatttgttcttatcattagatcagatacattggggtgcggcaatttttgtgtccattctttcctaacactgaaaatcaatactatctgaatatgatgactactttgtaatttttctgcagggttaccttgacccagaatatgtgttgactcaaaagtttactgacaaaagtgatgtctatagcttaggaattgtgtttctggagcttttgacgggcatgcaaccaatatcacgtgggaaacacattatttacgaggttaatcaggcttgtcgatctggcaagatatattccattatagggagcagaatgggtttatgtccatctgattgcttggacaagtttttatctctggccctcagttgttgccaagaaaatccagaggagaggccatcaatgctagatgttgtgagggaactagaaaatattgttgcaatgttatcagaaagtgaagctagtttaccagatgttaccttagataattcaggtgaaatggcaccctcatcatctttaggatctaactcagcaagggaggaccaacacacgtacgcgtatgtgtcaggaagtaatcttgtcagtggtgtcattcccaccattgttcctcgctgatatgctatactagtttccttggcgttggaaataattatatctaagattcaatatatattatctaattaattctaattccaataataaagtattgttattttattattatttttatattgttttat

SEQ ID NO: 29495 - DNA, 774 bp, Glycine max
  Clone ID: UC-GMRONOIR024E02_FLI
ggccgattcatatgtttgagttgatcatttaatttgcagacaaaattgaagctattgatgtaggagtcgacgagtccgggttgtgtgattctccaacatcagacgcaaccgttgatagcagcagcagcagcagcaacagcaagggtttgctttgtggacacggattctctgagataacatacattcacattcatgaatgtgactatttctctatgggtgtattctgtcttccagcaggaaaagtgtttccacttcatgatcacccgggaatgacagtgttgagtaagctcttgtatggctctacctgtgtcaaagcttatgactggatcgcattggattgtgctggaagccaaacaataggattggctgggagggtagtggatgaagtaatcaaagcaccacaggaaccatccatattatttccaagaagtggtggcaatattcattctttcacagcgttgacgccatgtgcaatactagacgtgctatctccaccatactctgaagagtttggaaggccttccacttacttctcagatatccctatcccttctcttaatggttatgccatacttgaagagaaaccaatgcctagtaacctagttgttcaaggagcaccataccttggaccttcaattgtaaccgttgaccattacaacttcggtcaaatcgattttgataatcacgtgtaaattgagtgtcttttttgaacagtacaaattaaatagaataatacaaaatactattcatatatcatatttaactaattcaact

SEQ ID NO: 29496 - DNA, 1385 bp, Glycine max
  Clone ID: UC-GMRONOIR024E05_FLI
aaataccagattcgttgccacacccctaggttttctccctcttcatctctcccaatttctctcatcaaagtttcaacctttgataagattgaatcatggggaacgccctgagattcctctacagccattgctgcaagcccacagcagctggtgattctgaatcacttggaccacacggtgtttcctctgccaccgttggtgtttcaacacttgcccatgatctctttcactttgacatcacctcccaggtcccggaaggactcagcaagcatgttgtgtcttctaagaaggctcaggctaattggtatagaaagttagtagatgcttggaaagaggcaaaacctcctcctaagacacctgaagaagcagctagacttgtcattcagaccttgagaagacatcaaaaagcagatgttgagggattgttggctttctatggtcttcctctaccacacacactggttcaaggaactacccaacccctttcatccttgcctgatggagttcaatttgaaatgcacaccttgccggttgatgcaaaggcagtagcagatggagacactataactgtgtatgttagcacaacagaccccagggaatcagcatttgtccctggaaatgtgcatgcagcagccgtgcgaagatcagaagcgcgtgcacgaaggaactttacagaagcggatgcattgcacaaacagatcattgattcaggatatcgggtgattccggttcaaaacgaggaaattctagccaagaagtataggattcggttaaggggaattgatgcaccagaaagtgcaatgccatatggaaaggaagctaaaactgaactgaccaagattgttcaaggcaagcctttgaggatccttgtttatgaggaagatcgttatggtcgttctgtaggtgatatctattgtaatggcatttttgtacaggaaatgatgttaaagaaaggtttagcatggcactacgtagcatatgacaaacgaccggaactggaaacatgggaaaaacaagccagagcaaagcgtgttggattatgggcttcaaaaaatcctgagaagccatgggaatggagaaaggacagacgagaggctgcatgacaacacctaaaatcagactagcagcattattgccaaaagaaattgagtctagggcaaaacaaaagcccttcattcaatattagtgtatcattgttgtaacaaattgcatgtatataaaacaactgtcaaccaactagatctatttgtcaatggaatgcttggattattaaaaagtctgatattagacctcccaaacaagtttttatcaataggcttgaatacctgagataaggagagaatgaaaattaaggacattacatatattcaatatatgttcaattc

SEQ ID NO: 29497 - DNA, 1029 bp, Glycine max
  Clone ID: UC-GMRONOIR024E09_FLI
ctcagtttgtacaacagcaaaatgacagcaataggcgcataactgaagtcaacaaaaagcgtcggcttaaacaggaaggtatggctgaaacagagcatgctgctactccagatggacaaattattaaatatcaacctatggtgaatgaagcagcaaaagcaatgcttaggcagatcatgaaatgggatacttcttgtgtagaatctttgaataaaaattctgataactacgtgattggtgatgcttcatcatcttccagtggaatggacagtagcagctcttcaggctggacttctggagtaactcttaaagaggtctctccagcttcggtgcagtcttcacatgttccagctgcaactgggactcaagggcatgtcccctcaaccgttaaacctgaaattttatctgtaccacaagcagtagcttctgaaaaagttatgaaagatggagcacatgatccaccttctatccctgtgtctcaagcagatgtaatgatccctgatcttcctccaataacagagatggtgacaggaaatattcttgatattcctgaagaaaattatatggcaactgagacagatgagggatacatggattcttcattgggggctggtgggtcatttcccattgatttcgaaggtatttcacctgatgcagacattgatgatttgttagccaatcctatttgggatgaaattttgcaaacttcagttccagaggatatcgataccaatgtggctgaagcatccaaagggaatgaggtccaaccaatggaaaatggatggggcaaaactcaacatatggatcaccttacagagcagatgggtcttctttcttccgatgcaaaaagagtttgatatctatgatatatgattaatcttcatattgtctgaggtagtccctgacccaaacaatacatgactgaagtgatgtctataatatataattagtaattacactcccacttggtcactgaaaaagacaatgtttttcatttggtcttcaatggctttttttagtttgttgtgc

SEQ ID NO: 29498 - DNA, 2211 bp, Glycine max
  Clone ID: UC-GMRONOIR024H05_FLI
gtccatcgagaaaggaaagaaaaggtgacatgataatggctcgctcgttttcacgcgggtctctgcttcctctcgccatcgtttccttagtatgtctatttgtgatttccattgcaaaggaggaagccaccaagttggggacggtcattgggattgatcttggaacaacctattcatgtgttggtgtttacaagaacggccatgttgaaatcatagccaatgatcaaggtaaccgtatcaccccatcgtgggttgctttcaccgacagtgagagactaattggagaggctgccaagaatctggcagctgtcaatccagaaaggaccatctttgatgtcaagagacttattggaagaaagtttgaagataaggaagttcaaagagatatgaagcttgttccttataagattgttaacaaggatggaaaaccttacatacaggtgaaaattaaggatggtgagaccaaggtgttcagccctgaggaaatcagtgccatgattctgactaagatgaaggaaactgcggaagcattccttgggaagaaaattaatgatgctgtggtcactgtcccagcttacttcaatgatgctcagaggcaggccaccaaggatgctggtgtcattgctggtctcaatgttgctagaattattaatgaacctactgctgctgccattgcgtatggattggacaagaaaggtggcgagaagaacattcttgtttttgaccttgggggtggaacttttgatgttagtatcttgacaattgataatggtgtttttgaggttcttgctacaaatggagatactcatcttggaggtgaggactttgatcagagaataatggagtacttcattaaattgatcaagaaaaagcatggaaaggatattagcaaggacagtagagcacttggcaagctgaggagagaggctgagcgtgcaaagagagctctcagcagccagcaccaggtccgtgtggaaattgaatcactttttgatggtgttgatttttctgagccactcacccgagctcggtttgaggagttgaacaatgacttgttccggaagaccatgggtccagtgaagaaggctatggaagatgctggattacagaagagtcagattgatgagattgttcttgttggtggaagcacaaggattccaaaggtacaacaacttttgaaggactactttgatggaaaggagccaaacaagggtgtcaaccctgatgaagcagttgcctatggtgctgcagtgcaaggaagcattttgagtggagagggtggtgaagaaaccaaagatatccttctcttggatgtggctcccctcacccttggaattgaaactgttggtggggtgatgacgaagttgattcccagaaacactgttatccctaccaagaaatctcaggtgttcaccacctaccaggatcagcagactaccgtctccattcaggtttttgaaggtgagaggagtctcacaaaggattgccgtctgcttgggaaatttgaactgtctggaattcctccagctccaaggggtacccctcaaattgaagtgaccttcgaagttgatgccaacggcattctaaatgtgaaggcagaagacaagggcactggtaaatcagaaaagatcaccattacaaacgaaaagggacgtcttagccaggaagaaattgagagaatggttcgtgaagcagaggagtttgccgaggaagacaagaaggtgaaggagaggattgatgctcgcaacagtcttgaaacctatgtctacaacatgaaaaaccagatcggtgacaaggacaagctcgctgacaagttggagtctgatgaaaaggagaaaattgagactgcagtaaaagaagcattggaatggctggatgacaaccagagtgtggagaaagaagaatatgaggagaagctcaaagaggtggaagctgtttgcaacccaatcatcagtgctgtatatcagagatcaggtggagccccaggtggtggtgcatcaggcgaggaggatggtgattctcatgacgagctctagagatgttcttgcgtagcaatgaatgatgagcagtagtgtagtttaagcggagtcttaaagtttttataacaggtggaagttgagaaaagcttccccagctcttgtatttttggtgccgaaaatactttaaaagataaatgcttgaatttgtttttggttggctagttttaccact

SEQ ID NO: 29499 - DNA, 3344 bp, Glycine max
  Clone ID: UC-GMRONOIR058A01_FLI
cacaacacatggaagtgactctgatgagcttgcaggatcaccactgtgcatgatcaccaagtggaagttgttcgttcttccgtttttggcagacaaattgagaaaaagaatacaatttcagctcttcttttggtctctgaaacgtttttttccccttcatgggtgaacacgcaattcctcaatgttttcagcatctaatggcgaaaaaattgctctttttgttgacccttttggaaattctcctttgtgggcaatccaagtttatggtgtacaacacttcccaaggcatagtccctgggaagctcaatgttcatctggtagctcacacccacgatgatgttggttggttgaagaccgttgatcagtactatgttggttccaacaattcaattcagggggcttgtgtgcaaaatgtcttggactccatggtgcatgctcttctggctgacaagaacagaaaatttatctatgttgagatggcctttttcaagcgatggtggagagatcaaagtgaagctgttcaggatgtagttaagaaactcgttagttcgggtcaactagagttcataaatggtgccatggctatgcatgatgaggcagtaacacattacatagacatgattgatcagactgcacttggacatcaatttctaaaagaggaatttggtgtgactcccagaattggttggcaaattgatcctttcggacattctgctgtgcaggcttacctgttgggagctgaagttggctttgactcatttttctttggtcggatagattaccaagatagggctaagcgcaaaaaggagaagagtcttgaggttatctggcagggtagcaagagccttggcccctctgcccagatctttgctggagcattcccagaaaattatgagccaccttcaggattttactttgaagttaatgatgcctcaccaatagttcaagataacatgcaattgtttgattacaatgtccaagatcgagtgaatgactttgttgctgctgcattattacaggcaaacataactcgaacaaatcacataatgtggacaatgggaactgattttaagtatcaatatgcacatacatggttccgacagctggacaagcttattcattatgtaaacatggatggacgtgtcaatgctctgtactctacaccatccatatatactgatgcaaaatatgctacaaatgagtcctggccaatcaagactgatgatttttttccttatgcagatcgagcaaatggttactggacaggatactttaccagtaggccagctatcaaacgctatgtcagattaatgagtggctattatttggctgcaagacaactagaattttttagggggagagtgaattcagggccaaatacagactcattagctgatgctttagcaattgcgcaacaccatgatgcagtcactggcacagaaaagcagcatgtggccaatgattattctaagcgattgtcaataggctacaaggaggcagaggaattggtttcatcatcgctggcttgcttggttgagtcaccgttgcttactagatgtcaaaatccagttacaaagtttcaacaatgtccacttttgaacataagttactgtcctgcatcagaagttgatctggttcaaggaaagaatttggttattgtagtttacaactctctaggttggaggaggaatgaagtgattcggattccggttattgaggccaatgttagagttcatgactctaatggtatagaaatagaatctcaacttcttcctcaggctgagaaatatgtagacttaagaaattactacgtgaaggcatatctaggacaaactccacccaaggcacctaagtactggcttgcatttacagtttctgtaccgccacttggttttagcacatacactgtctcaactgccaaaaggacagggtccacaagatcatcagtagatatatataagagtagtgaaaagtctaaatttgatgttggtcaaggaaatttgaagcttacattttctatggatcaagagaagtgtaccaattatgttaatataagaaacctggtcgaggaacaggttgaactaagttacctatactattctggatacaatggaactaatcaaaaagatccacagaattctggggcctatatcttccgtccaaatggcacacatcccataaaccatgaaaaaaaggttccattgactgttttgcatggacctgtgctagatgaagtgcaccaacaaatcaatccatggatatatcagattaccagactatacaaaggaaaggagcatgttgaagtggagtttattgttggccctataccaattgaagatggaattggcaaagaagttgccactcggatttcaactactatggaaaccaacaacatgttttacacggattctaatggacgtgattttatcaaaaggatacgagactacagaacagactgggacctagaagtgaaccaacctgctgctggaaattattaccctattaatcttgggatatacacagaggataataaaacagaattctcagttttggtggatagagctattggaggatccagcttacaagatggacaaatagagctgatggttcacaggagattactacttgatgattcaagaggtgttgatgaggctctaaatgaaacagattgtgtcggtgatgattgcaggggtctaactgtccaaggtaaattttactacagaatagaccccttgggtgagggcgctaagtggcgtcgtacttttggccaggaaatatattctccacttctgttagcctttgctgaaaaggatgataaagatgactggatgaattcccgtgtattaacattttcaggaattgattcttcttatgcattacctgataatattgctattataacattacaggaacttgatgatgggacagttctgcttcggttagcacatctatatgagattgaagaagacaaagatctctctgtaattgcaactgtggagctgaaaaagctcttgcctgggaggaagatcaaggaggtgaaggagatgagtttatctgccaatcaagaaaggacagagatggagaagaaaagacttgcttggaaagtagaaggctcttctggaagtaagcaagtttcaaggggagggccagttgatccaaaagagctaaacgtggagcttgctcctatggaaattcgcacttttatccttgactttgatgatgtgtctaaccaactttttgatgcattgtagaacaaaatcatttcttctagtccttgcttctgaacaagcatattggtatatgacaagttcagctatatgataacctctcataaattacgtttc

SEQ ID NO: 29500 - DNA, 1159 bp, Glycine max
  Clone ID: UC-GMRONOIR058A10_FLI
ccctcctctgttttgaaacagagaacaaagaaccatcgccatgcttgatccgagaacacaccaccccaccaattctttcgaattgtacgacgcaacacgacacaaaccccacacatgggatgttacgaactccggtttgtggccttcgaaaccggctttggaggaggcagaggtagatgattccgggatttgttcacctcccatgaggaccacgagccccccacgccgaaaaaacaaccaccgaagcctctcgccaacgtcgaggacgcaagccatagtgagagggcagagggagctcatggaaatggtgaagaacatgcccgagtccaactacgagctctccttgaaggacctcgttgagcaccacatggttgttgatgctactagacatgaaaaaaacgcggtggaagagagaaacttgagcatcgtgtacaacaagagagaaaaaaatggtggtagtagaaaggttgataataataataataacaaaaatatggcacaggtgaagaggaacgggaacattgatcgtggagggttctacctcaaaatggggcttccttttccttttggatctaaggacaagaagaagaagataaaagaaaaatgagcccttggggaatagttgtagttcgagagttacccctaaaccttctgatggatcagcaaagggtggtgttgttgataaggagtggtggaagaagagtcctttagcgtgtaaagagagtgatagtggtgaatcgagtatcaatagtgacagtgggaagagttctggtagcagtagtagcaatagcagcagtagcaggagtaacagcaggcgtgagaacagtggtaggcgttgctggcctttcattcgcagacccaaaaatcgaacacaaaaaagtaagatatccttctgatgaaacaacacagtgctctgagaactacacatgttcatgatccttagaagctttatcttcataaactcctcacaagttttaccgcgagtcatttgattacaacccagtagtaccatgtaactttttatgaatgatgaaggcacattcaactaggaatctcgaagaaatgtattgtgaggatgaaatctgtataaatgtcactgtgcttcatgtaattaagtttttctaattttcatacatgataaggcatatacaagcatgcc

SEQ ID NO: 29501 - DNA, 1465 bp, Glycine max
  Clone ID: UC-GMRONOIR060A10_FLI
ggatttgacatagcgcgttacctttggggttataatatttcaacgagggatgcagcttcacttgctctggttgactggctcatgaagaggccggagtggagcacaatgaatggaagagaccattttcttgttgcaggaaggataacctgggatttcaggagactgtctgaggaagaatcagattggggcaataagcttttgtttttaccagcggcgaagaatatgtccatgcttgtggttgaatccagcccttggaatgcaaatgattttggaattccatatcctacatacttccaccctgcaaaggatgctgatgtgttcatgtggcaagatcgaatgaggcaactagagaggaagtggcttttctcctttgccggtgctccccgtcctggcaaccccaaatcaatcaggggtcagttaattgatcaatgcagacggtcaaatgtttgtaaactgttgaatgtgactttggcgaaagcaaatgtcattctcccagcagcataatgcagatgtttcaaagctcgcttttctgcttgcaaccccagggtgattcatacacgcgaagatctgcttttgattcaatgctggctggttgtatacctgtcttcttccatccaggctcagcatatacacagtatacttggcatcttcccaagaatttcacaaagtattctgtcttcattcccgaggatgatattcgtaagaggaatatcagtatagaggaaaggcttagtcagataccccctgagcaagtgaagatcatgagagaagaggtcattagtctcattccaagactagtgtatgctgatcctcgctccaaattagaaactcttaaagatgcatttgatgttgcggtgcaagcagtaattgacaaggttacaaatttgaggaaggatattattgaaggccgtacagatgacaacttcattgaggagaacagttggaaatatgctttgctgcctgagggagagcacgaggtaggacctcatgaatgggatcctttcttctccaaaccaaaggatggtaatggagattccaatgattcatctgctgaagttgcaaaaaactcttggaagaatgagcgaagaaatcaatcatgaaaggaagggggggaaaatctacagggcgcttaaggcttaatcctgacttaacaatgctttgcttgaattggagaagaattacaaattattgttgggtcttgcagtgcactaacatgtcttgcttatattgagcgagcttccctcatggaaaccctcgacatggagacatattgtttgctatacacatttttgtgttataggtttttctgatttctgcttcatgtatttctcctcactacttagtggttccaagaatgatttgggaggtttaataattcctttcatgtaatagttttattcatttgattcatataggaaatataaacaaaattattacagttaatggcaccagaacaagtttaacc

SEQ ID NO: 29502 - DNA, 1434 bp, Glycine max
  Clone ID: UC-GMRONOIR060E03_FLI
tgcaattcttccttcagctcttgtttagtccaaaaccgctcttcttcccttccttccacagaccacagtattagcctcaacacacgctctatctattataaaatccaccctcttcttcccttgtctgcaacaacaataacaatcttcatcatgcacaagagctcttcagattccacgttgggcccgggtggcctggacctctcccaggccttcttcaggcccataaacaacgccgcccctccctccccgaccaagcgccacaacaagatctccgtcatcggcgccggcaacgtgggaatggccatcgcgcagaccatcctcactcaggacctcaccgacgagctcgtcctcgtcgacaccaactccgacaagctccgcggcgagatgctcgacctccagcacgccgccgccttcctcccccgcaccaagatccacgcctccgccgactcctccgtcaccgccggctccgacctctgcatcgtcaccgccggcgcccgccagatctccggcgagtcacgcctcaacctcctccagaggaacctctccctcttccgcgccattattccccctctcgtccgttactcccccgacacaactctcctcatcgtttccaaccccgtcgacgtcctcacctacgtcgcgtggaagctctccggcttcccctccaaccgcgtcatcggctccggcaccaacttggactcttcccgcttccgtttcctcatcgccgatcaccttgacgtcaacgcccaggacgtacaggcatatatagtaggggagcatggggatagttcggtggcgttatggtctagcattagcattgggggtgttccggttctgagctttttggagaatcaacagattgtgtatgagaaagagacgttggagaacatacacaagtcagtgatagacagtgcgtatgaagtgatcaagctgaaagggtacacttcatgggccattgggtactctgtggctaacctggcccggtcctttatcaggaaccagaggaagattcaccctgtgtctgttctggctaaaggcttttatgggatcgatggagaagtgttcctgagtttgcctgcaatgattggtagaggagggatactgggtgtgaccaatgtgcacttgaatgaagaggagacacagaggcttagagattcggccaagaccattctcgaagtacagactcagttgggtatttgaattttctgtgatgggtactgcttttttttttcctttaattttcttttgttcttcccaccagcatgatgtggtttggcctaaattattagtagtacttgctactgttagtgttagttcctgccctcttcttgcagtgcaagtgtttttgttgcgtcaagtgctggctggatctcgtgagatgtgttttgtttcctgtatggttttaattagccaagtaaaatttcatatttctgt

SEQ ID NO: 29503 - DNA, 1394 bp, Glycine max
  Clone ID: UC-GMFLMINSOY052A04_FLI
cacccctttctttctttcttcacttcattccccttatcctctcttcagttacacacattctcagcaaaactttgtgagcattgtctattgctacatgcttatctaatcttgttacagggcttaaaagtgtgtgatgcaagcaatggagaacattcatcagagggaaatattggaagagcaaaggtttgaattgccaccaggattcaggtttcatccaacagatgaagaactcatcactcactacctctcacagaaggttcttgatagctgcttctgtgccagagccattggagaggctgatttgaacaagtgtgaaccatgggatttgccttggatggccaaaatgggtgaaaaggagtggtattttttctgtgtgagggacagaaaatacccaactggtcaaaggactaatagggccactggtgttggctactggaaggcaacaggcaaggacagagagatatataaggcaaaggcactgattggaatgaagaaaactcttgttttctacaaaggaagagctccaagtggtgaaaaaactagctgggtcatgcatgaatacagattagaagatgaacattctgtgcacaatccacccaaaaaggccatgaatgattgggccatctgcaggatttttcagaagagtaatggtgggaagaaaatgccaatttctgggttggtgagattcagcaattttgcaaaggacatgccttcattgatggattcttctccatacaacgacagtgaatcaaaacctgttttgggggagtcatcacagccaacatgcttctctgatccaaaccaaagtgaggaccaaaggacacaagatgaaaacatagcggatagctatgaaactctcatgttggcatcttcatattcttcaaacccctctgatatttcccctgcctcatggactttttctaaatctgcccctaccgtgtcccaccaatcactccaagttgggaattcacacagctcagattacttcatgcttcatcaggaacagtccatgttggggatgttgattgaaaaccatggagcaagtgctggccaaagaactcagaaagctcaggatagtaaaggctctgatgctgacatgtcctctgtgatgtacaacaactatgaaatgttccaaagatcatttgggaaccaggaatattcatcaccttccgtaggacatgtgtattctagtggcctatggggattttaaagaaggttgaaggatacactatatgcagattaaaattagagaaactttagggattaaatgctattatacatgtaaataaattgctcttaagctaatgttatcctacaaagtacaggaaatggatgttacggttttccaaagttgtatggcttgacagttttatattatattagtaaatttttat

SEQ ID NO: 29504 - DNA, 1143 bp, Glycine max
  Clone ID: UC-GMFLMINSOY053B12_FLI
gggaaggatgagaaagccaggcgcgagatgaaagggttagtgtcgaagatgctgcgtgagaatgcttcgcagaatgatcttcggaaggagtcgttgtacttggcgtgtgacgattgtctgcagttacttcgtcaccattttttgcaggctgcggctttggacatgcaggatgtgagtcaaattgcaagacaagcagataatttgcattggattttggatattttagttgacagacagattgccgaggatttcctcaagacatgggcatctcagtcagatttagctgaagttcattctaaagtgccggcagttcacaggtttgaggttagcagagttacggcaaggttgtttgttgggattgggaaaggacaattgttggcttctaaagatgtcaggtgtttgcttctaaaaacttggctggtgcccttttatgatgactttggttggatgaggagggcatccaaggggcttgataggcacctaattgaggatggtcttagtaacacgattctaactcttccactctcctggcaacaggatattttgcttgcttggtttaatcgtttcttgaattctggtgaagattgcccaaatattcaaagagggtttgaagtttggtggagaagggctttctggaagaggaatggagagcaagaacggacaagacagttacgaattacaactacatcagtcgagaacccttgaggatagattgttccactgtggaggaattggcagcaaattactggtttcattgacgaaatataaaagtttctgaccgttcaatgcaaactcctgggcaagactaaaaggtagtttgaatgctgtgaaagtatggttggccttcaattttccaagttcctaagatgagccaaaattttcaagttcagcaactcgtggtaggttaagttcttccattgagttcatggaaggttcaacataaggctaatttcttttatgtagagcatcgaatagctttggatgcaaggcagatgatgaagacgaggatgaatatacttaaatatctttcttgcaaattagtttatgttgattattgagtattgaatatattcaatcggttgtgttatatgggaataacttcgatggaggtttaactgtgggaatataatttgtttctttact

SEQ ID NO: 29505 - DNA, 2139 bp, Glycine max
  Clone ID: UC-GMFLMINSOY053C01_FLI
gaagttggacatttatggggacgcttcatatctctccagagcttcttcaggcgtgtcagatgatatggaaccctcatcaacatctcatatgccagaatctgatgagaatgcagcacttgaatccaaaaaaatgaaccataatatgcttatggctctcataaaatatttacagaagaagagatttagttttattgagaaggccactgcagaaggaactgaagaagtcgtttttgatgcagtcggggataactttgcatcttacaataggcttaagaaaacaaacaaggggcgtggtaatgtacctgttagttcaggagctcgggagatggcttcaatgttggatactgctctactcgaagctttgcttctaactggacagtcttcagtggctttagaattactgagaggagttaactactgtgatttgaaaatatgtgaggaaatacttcgaaaaggcaaccatcatgttgctttattagaactttacaagcacaactcattgcaccgggaggctcttgaacttcttcacaaattggtggatgagttgaaatctagccagtctgaaattacacaaagattcaaacctgaggatattgtggagtacctcaagccactatgtgggacagaccccatacttgttctagagttctcaatgcttgttcttgaaagctgtccatctcaaactatagacctctttctgtccggaaatattccagcagatatggtgagctcatatttgaagaagcattctccaaacatgcaagctaggtacttggagctcatgcttgcaatgaatgagaatgcagtatctggcaatttgcagaatgaaatggtgcacatctatctttctgaagtactcgattggcatgctgatttaagtgctcaacaaaaatgggatgagaaagatcattccccaacaaggaaaaaattattgactgccttagagagtatagcaggatacaatccagaggctttgctaaaacgtcttccaccagatgctttgtatgaagagcatgctatattgttggggaaaatgaaccgacatgaactggcattatctttgtatgttcttaagcttaatgctccagaattggcattgtcttattgtgatcgggtctatgagtctatgcatcagccatctgcaaaaaattccagcaacatataccttgtgcttttgcaaatttatttgaatcctcgaaggaccacagcaggtttcgaaaatagaattacaaatctattatccccacagaataagactattccaaaactcactcctacaccatccataaaaagcagaggccgagggtcaaagaaaattgctgcaatagagggtgcagaggacacaaaagttagtttaagcagcactgacagtggcaggagtgatggtgatgcagatgaatataatgatggtagtcctactatcatgcttgatgagatccttgatttgttgagccgcaggtgggatagaataaatggagctcaggcccttaaacttttaccaaaagagacaaaattacaggacctactttcatttcttggaccccttctgagaaaatctagtgaaatgtaccgaaattgttcggtgataaagagcttgagacaaagtgagaaccttcaggtgaaagatgaactctatagtcagaggaaagaagttgtgaagataaccggtgatagcatgtgttctctgtgccataagaaaatagggacaagtgtttttgctgtctacccaaatggtagcactctcgtgcactttgtctgtttcagagattctcaaaatatgaaagcagtgggcaaagggtctcaattgaggaagcgattatgaagctgaaatgccataccaattggtggtccagttgtcttgttttagcgtgcttttacccacggtacctgttggtaggtgtggattatgatgaaagtggcaccgtaatttatcttcagaggtctctctttttctttttttgcttttttgcccagtcaattcgtgtgaaaagtgagatttgatatgtgaagagcgtgatgtgtctatctttttcttttttgtgatgtaaatattggcaaaacttgccacaagtaaaataagactacacgaaatttacatttttttttttttatagaaaatggcaagctatagtcatggag

SEQ ID NO: 29506 - DNA, 1606 bp, Glycine max
  Clone ID: UC-GMFLMINSOY053C07_FLI
aaaaacatggatgatctcccaccaggttttcgattctacccaacagaagaagaattagttttcttctatctacacaaccagctagaaggccaaatacacgacacaagcagagtcattccagtcattgacatcaatggcgtagagccatggaaccttccatgtactactacatgcataccactttaattctttaattttgttagttgttaccactcattctttagtatgtttcaaacccaaatgagttttgctaaaatggtttggtttgttttgttgtaatcagcacttgcaggggagctttgtcgtggagacacggagcaatggtttttcttttcaccgagacaagagagagaggccagaggaggcagacccaacagaaccacagcaagtggttattggaaggccactggttcccctggccatgtttactcttctgacaacaaagtcattgggatgaagaaaaccatggtcttttacaaagggaaagctcccaccggaaggaaaaccaaatggaagatgcatgagtataaagccattgaacactctgatcaatccaacactgcccctccaaaggtatactcatcattattatagtaaaacttcattccattttttcttttcaatttcgcgaatttggtcctttcatgttatttttgtcaatttgaacttcactattttaattacgtaattttagcctacgtgttaagttaatatttgatattttgacaggaaatgctgacatgacgatctaacaatactgtcacgttagcaatacaatgtgacattatgctatattatcacgtcaacgtttttgttgtatattatatgttaagttagctgatagactaaaatggagagtagaggtttgcaaaattgagaattatgaaagtaataagattaaaaaaaaaatgcatatccaacgtgccaatctggtagtatagtggtagttgctgctgttggttgcatatttcacacaaattctggtgctaatatagtttgtgtttttgttatgtataacagttgaggcacgaattcagcttgtgtcgtgtttatgtgatatcgggaagctttcgatcgtttgatcgacgcccactggatatgccaagagttgagctacgagttgttgatggggacagaggtgctgcttcaacaagtgctcaagctcaacagagaagttcttctcatacttcccactctggtggtgatgctcatgtcacagatgctggagcagggtcaagtggaacaaattggaatgcaagtaatagggttgaggaaccactttgggaatgggaacaacttgattggccatgacccaaaagtcaagaacatgctcaaacctagcaagactttcttaattgaataacgtcgtttcaattaaattaatcatataagttgtaggcgtagtttggttcgatttccttcacctcgaagggccatgtaatgtaacataatcattagtatttgttgtttaacataggattggttttccccgggaaaataagttgggaataagatccaagcataaaaaggaaggtggtgtggatcttgtaattttgtttttgtgacttgttgtcttgtaacgataatcaatctccttttcaaccct

SEQ ID NO: 29507 - DNA, 611 bp, Glycine max
  Clone ID: UC-GMFLMINSOY053F02_FLI
gtttgagccttaaaatgcttcttctacgtcaactttgccttctgttgttcgctgtgttttatttgattgatgcgcgaactcaatccgtcgcgtgaaaggacgtctgctgtgtggtacggcaccggcacgaaatgttcgggttaaactgtacgatgaagacgctggtgtcgacccggatgaccaacttgatgccggatattctgacccaaatggcaactttcaactttctggccatacctcagagctgacgaacatcgacgttgtttttaaggtctaccacgactgtgacgatgggattaagcccggctcgcgcaagttgaagttcaaaattccgaattcatatgtcacggacagtgcgacgccaaagaaaacgtttgacatcggtgtgctcaacttggagactgtgttcaaggacgaggaacgcgagctgatcgtgaccatgaagaagaagcggagaagccaccgttaccaagactttttggacattttgccatgaaaaagtttcgagaaaatgacaaattgccaagaaaattattttcaattttaaaaatggaagcggtatttaaaatggaaatattgattattaaagttaaaataaattgtaaccattt

SEQ ID NO: 29508 - DNA, 1768 bp, Glycine max
  Clone ID: UC-GMFLMINSOY053F06_FLI
tgaactaaactattcatctttgtggaattgattaatcggcaacaaaacctagtgatggttttgattcgtttgtggtttgttttgttaggattctttggaggcttcggttcagctgcggagcaaagaaggtggacactaaatgatttcgatatcgaaaagcctcttggaaggggaaaatttggtcatgtctatttggccagagagaagactatgagtttgcgattattttcagattttctctctcaaataacaattacaatactaattcctgttgattgtggatagttcgtaattgcgctaatttctacggattatttcattcccttcttgatttattttccttgtgtttacatttgtttggggaaaagtttgtttgtgctattcttggttgctttggtaagctttgtatgtgatttttgcatatttttttatatttctcattgaggatttgaataagaaactgtttagaggtgtagcaactcaagtttttgaagaagttggtttttgatgaggtattacaatctttgtggtaaagtggtatagggtttttcatctttaccaccactgttctttcgtctaattgaaaattgcatttcaacacaaggaccataggggcgtgagttgctatgcattttccacagttaaaccccaaagagctactacatgagcatttagcgtgtcttcacctaacaggattttggaattgttggtttgatcataagagctattgcattatacatgagctttgttgatttctatatatctgaaatggttttcttcaccttattgttttcacatgttaatttaattgtgaaactgaattgttgtttgatacagagtaatcatattgttgctttgaaagtactctttaagtcaattgcaacaatcctaagttgtgcatcaacttcgacgtgaagttgaaatacagagtcatctccgacatccccacattttgcgcctcgatggatacttttatgatcagagtgggacccaaaggtgatctttacaaggaattgcaaaaatgcaaatatttcagtgaaagacgtgtaactacttatgttgcatcattggcccgagcctttatatattgccatggaaagcatgtaatacatagggatattaaaccagagaaccttcttattggttcacagatacaagagatttatagagcttatggttactttttgaagaaggattatgtgataaaggagaaacatttttgaaagtagcagatctcttatttagttttttagttgctagcatacccaaatgcttcaagtatattccaaggtacttctgatatcctggatatgttggcattctactcctacactatatttagtaaacatatactatgtcttctatacaatgtgatatgtattggccttacctttcaagaatccaagattgaaggtatgaattaaatgtctctttatacacacctcataaatttgaatcatgtggaatgagttgagtcttgactttattgtgcagtggcttttattggtattcactttgtattcctcttttgaaaacccaagccagtgttgagaatggatctatgtgatatttacaaatgttataagaattttgtcaaatccaacatatattggataacactctttaccttaaactgctccttcctaaatttgattttagggcacataaaaaggtagaatagcatactttgtgtcaatttgatgtttaaaaggaaaaatacaattattttgttctgaaaataatgaatcaaaattttgtcttatgctat

SEQ ID NO: 29509 - DNA, 2350 bp, Glycine max
  Clone ID: UC-GMFLMINSOY053G01_FLI
ggtcaatatgaggtgcaattgataagcaataagcaacaaccactctctcgtatctcaccttcttcttcttcttcaaaaccaagttacatattatagaatccttaattttcctaaagttagaattcaatcaatcaggtggagatggtttgggtgaatgagaaactgaaggggttcgtggggcacagatgggtggtgtttgtgtgcgcgatgtgggacatgtcgtttgcggggacatcttacatgttcgggagcatatcgccggtgataaagagcagcatgggtttcaaccagaagcaggtggcgttcttgagcgtggctaaggatctgggtgacaacgttggtcttcttgcaggcaaaatcagccagtcttcccctatttgggctcttatacttgtcggagttgtccagaatgttgtcggctatggccttgtttggctcatcgtcactcaccagttccccgctttgcctttgtggctgctatgcattctaatctttgtgggacaaaacggttcaacatattacaacacagcagcactagtttcttgcgtgcaaagtttccccgagagcagaggccccgtggtggggatattgaagggcttcgttggcctaagtggcgcaatttggacgcaactaatagccatggcccaactccctgaccaggcctctctcattttcatcatagcagttggacctgcaatggtttcattagccttcatgttcatcataagaccggtcgagagttatcgacaatctagagcctccgatgggactggcttcacatttatctacagcatttgccttctcttggctgcttacttgatgggagttttgttgctggaaaacatgtttgatttggaccaaagcaccatcacattgtttgcagttattttgatcattctcatattgcttcctatcatagttcccattctattggttttcttctctggaccccaaaaaagtgctgaccaagaatccctcttggagccaccaatgcttgaagcaactaagcctaataagcactttgttggggagagtagttctagcactaccaaagtaatcaaacacgtcgaaaacgagaagagtccttcgaagctagaggtgcttcctctgtcgtcagaagggccaagggatgtttttcagtgtcaagctagactgtggcaagctgttaccaaagctgtgaagaaaatcaagcgaagaaatgggccacatagaggagaggatttcaccttgtcacaagcaatggccaaggccgatttttgggtcatgttcttctctcttgtcatgggctgtggatcgggcttgacaatcataaataacatgggtcagatttgtcaatcattgggagacaacaatgtcaatgtttatgtgtcggttatcagcatatccaacttccttggtcgtgttggtggcggctacttctcagaggttatagtaaggagttttgggtacccaagacttgctgcattggcagtgattcaagcagggatgtctttgggactttgctactatgtatttggtttggctggtcaagtttatgcggtggccatatccaatggttttgggtatggtgcccactggtcaattgctttagcagcagcttcagagctatttggcctaaaaaactttggaactctctacaattttctcaccatggctagcccagcaggctctctctttctatctggatttgtagcaagcacaatatacgactattacgcggagcagcaagtgaaacaccgaatgctcactggaaataacaatgacttgcttctttgtgagggaaacatttgcttctccatcacatttggaattttagcagtagtttgcttatgtgcagcatctttgagcttgatcgttgctcacagaacaaggaaattctatgcacagctttatgaagagtctcaaacttaaaaagtgggagcaagcataggaaaacttgtatcagttacatcttccagttatcaagggaatcaatggagactggagagtatcactacggtttgaatattgtgttgaattgttgtgtgcatatactctgcctctcttatctctcttttgggctcttaagtttaatatttgttagagaaatgctagtagtacaattttttattactttttttgttaggtgaaattcatgtgtatcctattagatatatgagtttcatttttatttgataggtcctatttataaatgagtaagaatcacatgaattttaacggataaaagagggcatgagaaagacagtgctagaaaatttgttactagcacttctctgtttgtaatcttttttcatactccgctcccttgttggttttatacatgcttgggaaggaagacttgttacgaaat

SEQ ID NO: 29510 - DNA, 2314 bp, Glycine max
  Clone ID: UC-GMFLMINSOY054B03_FLI
gtttcgaacaatgggtttaccggtcaggtgccgagctctattggaaatcttcagttgctgaagatgttaaatttttctggaaatggtctcactggtagtctgccggagtctattgtgaattgcacaaaactttcggtgttggatgtcagccggaattcgatgtccgggtggcttccgttgtgggttttcaagtcagatttggacaagggtttgatgtcagaaaatgtacagagtgggagcaagaaaagccctttgtttgccttggctgaagtcgcgtttcaaagtcttcaggttttggatttgtctcacaatgcgttttctggcgaaatcacatctgcagttggaggtttaagcagcttgcaggttttgaatttagcaaacaactctctcggaggtcctattccagctgccattggtgaattgaaaacatgttcaagtcttgatttgagctataataagctgaatggaagcataccttgggaaataggaagagctgtgtccttgaaagaactggtattggaaaagaacttcctaaatgggaaaattccatcgtcaattgagaactgctctttgctaacaactttgattctgtcccagaacaagctgagtggtccaatacctgcagcagttgcaaaacttactaacctgcgaactgtggatgtatcgtttaacagtctcactggaaaccttcctaagcaattggccaaccttgccaatcttcttaccttcaatttatctcacaacaaccttcagggtgagctgccggctggtggttttttcaacaccatttcgccttcctctgtttctggcaatccatctctttgtggcgctgcagtaaacaaatcatgccctgctgtcctcccaaagcctattgttctaaatcccaacacctctactgacactggtccgggttcattgcctccaaatttgggtcataaaagaatcattctcagcatttctgcactcattgccattggtgcagctgctgtcattgtaattggtgttattagcatcactgttctcaatctccgtgttcgctcctctacacctcgtgatgcagctgccctcacattttctgcaggggacgaattcagccgttccccgactacagatgctaactctggcaagcttgtcatgttttcgggtgagcctgatttcagttctggtgcgcatgctttgcttaataaggattgtgagcttgggcgtggaggatttggagcagtgtaccaaactgttcttagagatggacattcagttgctataaagaagctcactgtgtcaagccttgtcaagtctcaagaagattttgaaagagaagtgaagaaattaggaaaaatcagacaccaaaacctcgtggaactcgagggttattattggactacatcgctgcagctgctcatatacgagtatgtctccggtggtagtctgtataagcatctccatgaaggatctggtgggaacttcctctcatggaatgagaggtttaatgtgattctcggaacagcgaaggccttggcacacttgcaccattccaacattattcactataacattaagtcaaccaatgtccttcttgatagttacggtgaaccaaaagtaggggactttggcctagcaagactgttgccaatgcttgatcgatacgttttgagcagcaaaattcagagcgcactcggctacatggcgccagagtttgcctgcaagacggtgaaaatcaccgagaaatgcgatgtatatgggtttggtgtcttggtcttggagatcgtcacagggaagaggccagtcgaatacatggaggatgatgtggtggtactatgcgacatggtgagaggggctttggaagaaggcagggtggaggagtgcattgatgagaggctccaagggaagttcccagcagaagaagctattcctgtcatgaaactaggcttaatatgtacttctcaagtgccatctaacaggcctgacatgggagaggtagttaacatattggagctgataagatgtccctcggaaggacaagaagaattggcatgaattaacttgcgattttcttaattaggaggatagacaatgggatgtccggggaagaagaatccggctttatttattagaaaagcgaggaattattttgttgcaaaatgtttactttttcattgtaattttcttccttgttagttagtctctagttgttgtttgtttttaagatttctcttatgttatgctactacacctaggatgccggattccttttcaccgggtttcgttttggaccccccttgaaaattgttgctcaaatactgatctttcatgttct

SEQ ID NO: 29511 - DNA, 1228 bp, Glycine max; identical to SEQ ID NO: 29389
  Clone ID: uC-gmflminsoy054b12_FLI

SEQ ID NO: 29512 - DNA, 1350 bp, Glycine max
  Clone ID: UC-GMFLMINSOY054D02_FLI
ctggacctggggtactcgactttttgacaaggcagtcttctatagctcatcatccttatcagaaccagttgtactagagtttccagaactgaaaggtcatgctcgtcgtgattattggctagctatcatccaagagattctatatgttcacaaattcataagcaagtataaacttaaaggggttgcacgggatgaagcgctttggaaggctgttttaggaattttgcgtttacaagccattcaagatattagttccacgattcctatacagaatgatgctcttctcatgtttaatttatgtgatcagcttccaggcggagacttgatattagaaacccttgcaaatatgcctaacttaagagagtcagatcatgagaatgatttcaagggtggaagtggaatgtattctatctcagctttggacatggtttctaacttgggatttgtatttggagcaagttcaaacaactcaaatgagagtaggattgctgtgggtgaaatatctgttggagaaatgactgaattggaaagagcagttaaagaatctaagaacaatcataaaaaggtcatatctgcacaagcgacagttgatggtgttaaagttgatggtatcgacaccaatctggctgtcatgaaggagttactttttcctctaaatgaacttgggaagtctcttcagtccttggcatattgggatgatccacggaagtctttagtgttttgtttgtttttcagttacatcatctacaggggttggcttggctatgcagtagcgctggtgctcttgttacttgcagtttttatgataattactcgatgttttagccaaggtaggtcagttcctgaagttaaagtaattgccccaccaccgttgaatacaatggaacagcttttggctgttcagaatgctgtctctcaagctgaacagctcatccaggatggtaacgtaattctgctcaagttccgtggcttgttgctgtccattttccctcaggccacggagaagttagcctttggtcttctatcaacagccttgattttggctttcttgcctactaaatacataattctgctactcttcttggagatatttacaagatattcacctccaagaaaagctagcactgagagattgacgaggagattaaaggaatggtggttcagcataccagcagctcctgttacacttgaaagagataaagaggaaaagaaaagaaaatagtattgatgcatggtgtaatctgttgtgcatatgtttttgtttaatgctgttttggtcttgtacatagagatgttaaaggtgtaaaactcatccggggaagcaaaataataaatatttattagaaaatg

SEQ ID NO: 29513 - DNA, 2107 bp, Glycine max
  Clone ID: UC-GMFLMINSOY055A09_FLI
ggctgtgcctactgtggtgacctacaatacgattatgtatggcctttgcaagtgggggagagtgagtgatgctaggaagttgcttgatgttatggtgaataagaatctgatgccggatttggtttcgtataacactctgatttatggttacaccagattgggaaacataggggaggcttttctcttgtttgccgagttaagatacagaagtcttgctcccagtgttgtgacctataatacacttatcgacggtctttgcagattgggggacttggatgttgccatgcggctaaaagatgaaatgatcaaacatgggcctgatcctgatgtatttacttttacgacttttgttagaggattttgcaagatggggaacttgccaatggctaaggaattatttgatgagatgcttaatagaggattgcagccagatcgttttgcgtacataacccgaatagtaggtgagctgaagcttggcgacccatctaaggcttttggtatgcaagaagaaatgctagccagaggctttcctcctgatttgatcacttataatgtcttcattgatggtctccacaagttgggcaatttgaaagaagcaagtgaacttgtgaagaaaatgctctacgatggacttgttccagatcatgtaacatatactagcatcatccatgctcacttgatggctgggcatcttaggaaggctagagcattgttccttgagatgttgagcaaagggatatttccttcagttgtcacttacactgttcttattcattcatatgcagttaggggaaggctgaaacttgctattttgcacttttttgagatgcatgagaagggtgtacatccaaatgtgatcacctacaatgctttaatcaatggactttgcaaggtgagaaagatggatcaggcatacaatttttttgcagaaatgcaagcaaagggcatttctccaaataagtatacttacactattttaataaatgagaactgcaacctgggccattggcaggaagctttgaggttgtataaggatatgctagatagagaaattcagcctgattcatgcacacatcgttctctattgaagcatctaaacaaagactataaattgcatgtagttcggcatcttgagaatgttattgcagctggtgaataaatttatgatgtaaggatgaagaatggttatttattattatcattttggctttctcacatggctgatgagtaaaagaaaaccctatatttgaatgggttttgccttttgaggtgtaaattcccccagacagaatcttgtatatttttctgactgtcacggttgaagatgcctgtggtgttcttgatgattaagatggacagacttcaactattaacaagttttcactcgttatatccctagactagtcaggggaaccaatttgctttgtggctatttaagcagtgtgtaactgctaatttttcttcagctgttatttgacttctgacatagatactggacctgcatagttggtggtcaattcaaatacagaagccaaacaatcagaaaagatttaatcataattgattcctgatgcattgaagtatatagattctgatgatatgaaaaagatcaaaaatcagttcccaccattcgttaaattcaaaatggtcctttaataatgttatggacaggtcaaagtaggcagatttgatgttccatgatcatgaggtcaattatgggaacctcatgtatggactgatgaaggagtatatccaacataactgaaaggtcctgtctgagtcctatgaatttttccatgagcatcatcttcatcaagagataaaaaataaataacagattgtccttcaggcatcaccaacagggtagatggcaagcaagaattggccaagttgcaggaaacaaggatctatactttgatatgcatcatttcaaccagtggtcttctaacttgaaggagcagctgtcttaggggggttatgtctctgttgtttttgcttttgtgtctatctttatgttgggttaggcaacttgccttgtatatttgtatcctatttccagtacacctagtactgagttatatataataatatctgatttttgctgtgc

SEQ ID NO: 29514 - DNA, 3212 bp, Glycine max
  Clone ID: UC-GMFLMINSOY055B02_FLI
tgaagactctggtgctgaaccattgcatgatactgatgaaaattttggcatgcaccctatctcatatgcttgtgaggataaaagttctttgaaaagtatgtatagtccagtgcttggttaccttgacaaagtgaaggagaaattaagaaatcctgaggattaccaggaatttttgaagtgcctaaatatctacagcaaggaaataattgcccgacatgagttgcaatcattggtgggcaatttactgggaaaacatgcagatcttatggagggatttgatgaatttttggttcaatgtgagaagaacgaaggattccttgctggtctcctgaaaaaaagacacggaccaaaaccagtgaaggtagaggacagggatcgagatcgtgatagggatgatgggatgaaagaaagggaccgcgaatgccgagaaagggacaaatccaatgcaattgctaacaaggatgttttggttcctaagacatctctgtacgccggcaaggataagtatgcagcgaaacctataagtgagcttgatctttcgaactgtgaacaatgcactcccagttactgtcttctaccgaaaaattacccaataccaccagctagccagagaacagaacttggtgcagaggtgttgaatgatcattgggtttctgttacttctggcagtgaggactattcctttaaacacatgcgcaaaaatcagtatgaggagagcttatttagatgtgaagatgacaggtttgaacttgatatgttgttagagtctgtaaatgtggcaactaagcgtgttgaagagctcttagaaaaggttaatgctaatataattaaaggagatagtccaattcgtattgaggagcacttaacagctctaaatcttaggtgcattgaacgattatatggtgatcatgggcttgatgtaatggatgtgctaaagaagaatgcatctttagctttgccagtcatattaacccgcttgaagcagaaacaggatgagtgggcaaggtgtcgttctgattttaataaagtttgggctgaaatatatgcaaagaactatcacaaatcacttgatcaccgtagtttctactttaagcagcaggatacaaaaagcttgagcactaaagtcttacttgcagaaataaaagaaattagtgagaagaaaagaaaagaagatgatgttcttcttgcaattgctgctggaaacagacagcctattattcctcacttggaatttgtgtatcctgattcggagattcatgaagatttgtatcaactcataaaatattcttgtggagaaatgtgtacaactgaacagttggataaagcaatgaagatttggacaacatttttagaacctatgcttggtgttccttctcgaccccaaggtccagtagatacagaagatgttgtcaaggctaataagaataattctgccaaaactggcactggaattgatgatggggatagtagtcctgcaacaaatcctaagaatttaaacactaatagaaatggggatgagaactttccatcagaacaatcaaattcctgcaaacaatggcaaacaagtggggataataaggttaaagaagataatcatcttgatttggaacgctcggcacataagaatgaaaccttgggaagtagtacacagcatggtaaagtgcatataaatgcatccacgactgatgaagtatcaagagccaataagcaagatcattccattgaacggttggtgaatgctaatgtctcattgaccttgggtatggagctaattagtagaagaacaaatgtggataatgcatcaggacttactgctactccatcaagacctggtaatatttctggtgagggaggacttggtttaccttcattagagggtgctgattctacaagaccagttacatccacaaatggggccatcaatgaggacactaaagttcacagatatcatgaagaagttggacacttcaaaagtgaaagagaagagggtgagttatcacctaatggtggagactttgaagaggataactgtgaagtttatggacatgctggtttggaggcagttcataaaggaaaagatggtaccatttgtcgacaataccaaaatagacatggggaagaagttcgtggtgaagctggaggagaaaatgatgctgatgacgaaggcgaagaaagtccccatagatcaatggaggacagtgaaaatgcttctgaaaatggtgatgtttctggtactgagtctgccgatggtgaggagtgttctcgagaacatgaggagaatggagatcatgaacatgataacaaggctgagagtgaaggtgaagcagaaggaatgactgatgccaatgatgttgaaggagatggtgcctcattgccatattcagagcgctttcttgtcactgtaaagcctctggcaaaacatgttcctccagtgttgcatgacaaacaaaggactgttcgagtcttttatggaaatgattccttttatgtgctgtttagacttcatcagacattgtatgagaggatccaatctgcaaaggttaactcatcatctgctgaaaagaagtggagggcttctaatgatacaggctctagtgatcaatatggcaggtttatggatgccctttacaatttactggatggttcttctgatagtacaaaatttgaggatgagtgtcgagctattattggaactcagtcatatgtcttattcacattagacaagctgatatataaacttgttaaacagcttcaggttgttgccaccgaagagatggataacaagctgcttcaactatatacatatgaaaattcaagaaaacctggaagattcgttgatttagtttatcacgaaaatgcccgtgttcttctccatgatgagaacatatatcgtattgaatgttctcctgcacctacccaattgtcgtctattcaactgatggactatggatatgataagcctgaaatgactgcagtgtcaatggaccctaatttttcagcctatctgcacaatgacttcctatctgttgtccctgacaaaaaggagaagtcgggaatttacctgaagaggaataagcgcaagtatgccattagtgatgaatattcaagccagaccttggatggactacaaattatcaatggtctagagtgtaagatagcttgcagttcatctaaggtttcatacgttttagatactgaagattttttacatc

SEQ ID NO: 29515 - DNA, 1734 bp, Glycine max
  Clone ID: UC-GMFLMINSOY055C06_FLI
gaagagggtctgaggtccctaaagggaggagaaaagaaaagattgggaagggagaagcatgaaaatcggagacaggaagaagaagaagagcatccccagcgacgaatgaatgggcaattgcggaagcagagaggaatctgccgtagtttccaaggctcaaggtctcagatctagggctctctgtttcataattaattactctcctcactcactcgcattctttcttctttacttgcttcagttgttcagcagcttcaccatgcgacgtcgttgggcgccagtgccaggaccgacaagaagcacgctcacaggcacaatctcagcgagtgcgcttcggatctcagcgagtcctgttccacaccgcgcggtaacaatagcagcaacacgctgctctacacgcacgtcatcgctttcacgctctacgagttggagaccataaccaagagcttccgcgccgactacatcctcggcgagggaggcttcggcaccgtttacaaaggctacattgatgagaacgtcagagtcggactcaaatcgctccctgtagctgtcaaagtcttaaacaaagagggtttacaaggacatcgagagtggcttacggaggtgaattttctcgggcagctgaggcatcctaatctggtgaagttgattgggtactgttgtgaagatgatcacaggctgcttgtgtatgagttcatgttccgagggagtttggaaaatcacttattccgaaaggcaactgtccctttatcatgggctacaagaatgatgattgctcttggagcagccaaaggacttgcctttctccacaatgctgaaaggcctgtaatctatcgcgacttcaaaacctctaatatattattggactccgactatacagccaaactttctgattttggactagctaaagcaggaccacaaggtgatgaaacccatgtatctacccgagtcatgggtacctatggttatgctgcccctgaatatgtaatgactggccacctgacggctaggagtgacgtctatagctttggcgttgttcttttggagcttttaacagggaggaaatctgttgacaagaccagacctggaaaggaacagagcttggtagattgggcacggccgaagctcaatgacaagagaaagctccttcaaataattgatcctagattggagaatcaatactcagtgagggcagcacaaaaagcatgtagcttggcttattactgtttgagtcaaaatcccaaagcaaggccactaatgagtgatgtagttgagacattggagcccttgcaaagttcaagtgttggtccaggtgaagtctcattatctggatcaaatagtgggagtgctgggccttttgccatgaacaaaatctctgactgccggatgcgccacaagttttcaaacaatgttggtcccggtgctacttgtcggtctccaaacccgaattgctcaccaggtggcccagctacattacgggtcagatgataatctcatgccatgagtccctgtctggtgtgcttaatctccagaaaatagtgtttgttgttaaaatgtgggtgcatccttgtatttgttgctttgtacatgatatgataatatggtgacaagaagccccggtggataatttttgttaatgtttggtcttctgttcatctgggtgggaattagtgtgtgaaaatctgtgtacttgtaatcatcgtggcatcagaactaatataactggctcctcac

SEQ ID NO: 29516 - DNA, 1206 bp, Glycine max
  Clone ID: UC-GMFLMINSOY055C12_FLI
atttgctccaagacctgttttagcaaggacaccagaagaggtgttggctgctaaaggtgtcaagccaacattgtcacctaacctcaatactctcgcacttgttgaggctgcaggtgtcaagcgccttcttttctgtggtgtaggttgccaggtgcaagcattaagatctgtggagcaccacttgaatttggataagctctatgttttaggcacaaattgtgtggacaatggtactaggcaagggctggataagtttctgaaagctgcgagccaatcaccagaaacagttctacattatgagtttatgcaagattacaaggttcacttgaagcatttggatggtcatatagaagaggttccttatttctgtctgccagcaaacgatttggttgatgttattgccccatcttgttacagctgttttgactatacaaatgctttagctgacttagtggttggatatatgggagtgccaaaatattctggaatcggcatgacacaacatccacaatatgtaacagtaaggaatgaacgtggaagagagatgttgagtcttatagagaacttactggagattactccaacaattagtactggggataggcgaccatttgtcatggagactgttaaggctgatgatgaagctaagttaggaagaggtccttctcagcctgccccaaagtttattggaaatttgctggcttttatactaaacttgattggtccaaagggtcttgaatttgcacgctattcacttgattatcataccattcgcaactatcttcatgtgaatcgtatgtggggaaaggaaagggctgataggcacatgcctacatatgctaagaaaattgtggatttgtacaaccaaaatggtcaaattgagaagatgctttctaacaagtgattctaacatattaaaagctcccaatcagtggcataggtgacttcaaagtatgcattgagtctatttttcattttacactgaagtcattggaaattatcatgaggtcataacttagtctatatttggataactcttgattcatataaatgtatttaggatagagcactcagcaaatatgaagatttaaattcgaacttgctgattacaagtctactcaatttttgagctttgcaaaactgcctattgagttgtaacaagaaaaaattggaaataatgttatatttttgttacttttgtggcat

SEQ ID NO: 29517 - DNA, 1177 bp, Glycine max
  Clone ID: UC-GMFLMINSOY055F01_FLI
ctccggcaacctctcttccggcgccgccgctatctcggccgcgcaccagatcttcaatttgattacttgggtcaacgatttctgtcattctcaatcatggcaactagacttcagtttgaaaataattgtgaagttggagtcttctctaaacttaccaatgcctactgtttggttgccattggtggttctgaaagcttctacagtgtatttgaagccgagttagcaggtgttatccctgtggtcaagacatccattggcggtactcgtattattggtcgtctttgtgctggtaacaagaatgggcttctcttgccccataccaccacagaccaagaacttcaacatttgagaaacagtctacctgatcaagttgttgttcagcgaatagacgaaaggttatctgctctgggaaattgtatagcatgtaatgaccatgtggccctcacacacactgatcttgacagggagactgaagagatgattgcagatgttcttggagtagaagttttcaggcagaccattgctggcaatattcttgttggtagttactgtgccttctccaatagaggtggcttggttcaccctcatacttccatagaagacttggatgaactttctacacttcttcaggttcctttggtggctgggaccgtgaaccggggtagtgaagtaatagcagctggaatgacagttaatgattggactgcattttgtggttccgacaccacagcaacagagctatctgtaatcgagagtgttttcaagctgagagaagcgcagcctagcgcaattgtggatgagatgaggaaatctctcattgatacctatgtctgaactgtggtagtaatagtgttttgttttatgcaagatattgcactgctcattgttgagatcttctaagttaagttttggtgatagtttctgttgttgtgtgggcatatatgttcccatcatgttgtgttcttttccttagttgtgatatcgtataatatcaggtgctgatttttgttaccaacaaatcaaatgcatgtaagggtgctcttgcgttccactcatggtgacggcctaaataatagccttaggttgattcgaagcaatcaaattttgtcacgttaagaaaaatttcttacatttcttgatgtataaattctgcattttttaactctttgaaagaaag

SEQ ID NO: 29518 - DNA, 613 bp, Glycine max
  Clone ID: UC-GMFLMINSOY055G07_FLI
ccaagtgaaagagagaagaaaagtcaaagacaatgtcagggatcattcacaagattgaggagacccttcatgtgggaggccacaagaaggaggaggagcacaagggtgagcagcaccatggtggagaatacaaaggggagcatcatggtgaacacagtactgaatacaaaggagagcatcatgttggtgagcacaagccggagcaccatggaggagaagagcacaaagaggggttcctagacaagatcaaggacaagatccacggcgaggagggtggcgccaccgccgagggcgagaagaagaagaagaagaaggagaagaagaagcatgaacatggccatgacagcagcagcagcagtgacagtgattagattatctcccactgctgcatcacctatatatcttataaggtgtatgggaccatagtagtgagggctgtgtctttctctttttttcctacttgtcatttatatttatgagcgagagaaatagtgcgtgtatctggttgctaattcgagtgctattagtctgtggtttcgttggtttgtaacccctctgctttggttatgctggattgtatattatccttaaagaaataaaagattaaattatc

SEQ ID NO: 29519 - DNA, 1482 bp, Glycine max
  Clone ID: UC-GMFLMINSOY055H07_FLI
cgctgaactcatcacttactggaagccttgttgtgagtaagagaaaaggcttcctgcaccgagcacaccaacttgatacctctgattctttctttgcttagaattccacagaatatggagactgttcttttcaatcactccccacctttggaattcaagggtttgagcaaggaggaggaagactcattgctagggcaagtggaaatatggaggtacatgacatgcttcacggactccgtggccttgaaagctgtcatagagcttcgtatagcggacatactagaccgttatggtaaaccactatccttgtcgcaaattgtggagaacatagaagacgcaccctccccagatgcctctcttctccagagagtcctgagagtgatggtgcgcagaaagatcttcagtgcacaagaatcagagacaggagaaaccctcttcggcttgacacgagcctcgaagtggatccttcgcgacacgaaaatgaccctagcacccatgttgctgctggagaaccacccaattcacctgaaccctgctcactacatcagtgagattattagagaaggcacaaaaaatggcactgctttctttaagtgccatggacatgagcaatttgagatgacgggtttggatcctgagtataataggttgttcaatgagggcatggtgtgcactgctagggttgtgtccaaggctgtgatcactggctacaaagatgggttcaaccagattaagtccttggttgatgttggaggtggcattggagggtctctttcggagattgttagggcttatcctcatatcaatgccatcaactttgacttgcctcatgtggttgccactgctcctaagttcgatgggatcacccatgttggaggtgacatgttcgtgtccattcctagtgctgatgctatttacatgaagtggattctgcatgactggagcgacgagcactgcatcaagatcttgaagaactgcaggaaggcaataccagagaagacaggaaaagtcataatcgtggatcacgttcttcgacccgaaggcaacgaactcttcacagacgttggcatcgcattcgacatgatgcttctcgctcacaacgccggtggcaaagagaggaccgaagagaactggaagtggctgttcaaggaaaccggtttcgcgcgttacaacatcatcaagatcaacgctctcccttccatcattgaggcgtttccaatctgaagaagatgccactaccacaactgcatgtggtttttatgttgcatgtgttgttgttattattaacagctatatgatcttcgttttaattttgtggttttccttcctgcccttgttatgtttgtgcattaaataaaagtaagaaatgccccaccactaagtaatgctatatggattatgtatgtgttccatatatgtcaagtgagtggtgtgtggttgtgaagaatctattgcttttaatgaatcagatcctttggtgtg

SEQ ID NO: 29520 - DNA, 1885 bp, Glycine max
  Clone ID: uC-gmflminsoy056e11_FLI
tgcttttttcaggaatggcatcaaaatagcgattcaatcctttgtttttgttatgggcaagggagagaaccattatattgcttatgtagaggatatgtatgaagacaggaggggacagaaaaagatcaaagtgaggtggtttcaccataatcaggaagtcaagggtgtagttcctgtacgaaatcctcaccctcgggaagtttttatcacaccttattcccaagtcattagttcagagtgcgtagatggttctgccacagtcttaactcgtgaagactttgaaaaatgcatgccttttttttcccccacttcaagggacagaatacatttgtgctttaggcagtttagaagcaacaaaatcaagccctttgacttgagtaaattgcgtggttactacgctcaaccaattctttcttgcttacaccttgattcaatccagcaccctgagttcctagcaagagaagatgaagagttgagtgcaggtgatgatgtgaaagtaggagtcaagaggaggaggggtgataaggggtctcctcagtcttggataagtcgccagggggttaggaagttaagtagaaataagcaaatgatggtatacaaaaccttccaggttgcaaattatgcaagatcagaaaggatattgctttctcggaagcaggttgggagtcaaccttggtctaaccacaaatacaaggttgatgacaagatagagttgctttgtcaagatagtggcatcagaggctgctggttcaggtgtacagttgttcaggtagcccggaagcagttgaaagtccaatatgatgatgtccaggatgaagatggaagtggaaatcttgaggaatggatcccttctttcaagttagccaggcctgataaacttgggatgaggcattctggccgccccaccatcaggccagctccaacttatgaggaacaagaactagctgttgaggttggaagtgcagttgatgcatggtggagtgatggctggtgggagggggttgtaactagaattgacaactgtggggatgatagtgttgaagtccactttcctggtgaatgcttgctgatgaatgtgtgcaagaaggatttaagaatatctagagattggttaggggacagttggattaacattaaggcaaaacctgaaataactaaatctatattcacagctaataatagctttaacacaaagctttctgtgtccccatctattgctaaagatgtggactctgttggttttgctaattcatgtcatggtgatcctgttagtaagaagtcaaatgaaccagttgttatcaaagaagagaattttgtgtcttgtgatggctctgataaagaagagaattttgtgtcatgtgatggctctgctgaagatggggactgtgtccaggataataaaccctcttcagaaaaaagtactcaagctgataatattgatacacatatcaattgtgataatgaagagaattgtggtgataatgataatgataacaatagcaatgatggtggtggtaacaagaatgatgatgataatggcaataaagatatgggggtatttggaacttctggaccggaccaagaaactgtagagctcatggaagtggctgtataaataattttttagaactcatgcataaagttatggtagttctgattgtagagctttgccatcatctcttattgtgttgtaatctttgtcctatgttagtctgagaatgtaaatagtagttgcacggttatgtgagaatctaattgattgttaacttagttgtctttatagatgtacagtgttgagtgtaatgtgctagcatgtgttgtcttcctttccattggttgtattagagagtaggtttctttcatactgagacaaatattgttgagt

SEQ ID NO: 29521 - DNA, 1598 bp, Glycine max
  Clone ID: uC-gmflminsoy056f07_FLI
gtttggattctcaaagacagattgagattttacacagagagagagagagagagagagagagagagagagagagagagagagagagatgggaagagctccatgttgtgacaaggcaagtgttaagagagggccatggtcaccagaagaagacacaaagctgaaggagtacatagagaagcatggaactggagggaactggattgctcttcctcagaaagctggacttaagagatgtggaaaaagttgtagattgagatggctcaactatctcaggcctaacattaagcatggagatttctcagatgaggaagacagaataatttgcagcctttatgtgaatattggaagcaggtggtcaattatagctgctcagttaccaggaaggacagacaatgatatcaagaactactggaacacaaagttgaagaaaaaactcatgggtttgcttcctctttctcatcacagaaaacaaccttcatttccatcctcttttacccttcaaaaccctccactctctccttcagctcaccaactgtacggagagtactgcacctacaccccaacaacaaccacatctttcacaagtaatattgaaccacccttttcccttccttcaagtaactatgcaagcacaagtgacataactacctcagtttctcaccccttttaccaaaaccaagactccatgcaatgctattacccaattatgagagacaacagcagcaacaacaacaacaacatgcttatgtttggaagcgaaggaagttgcagtacttcctctgatggaagctgcactaatcaaggcagagaaattatcaagcaagaagaaagaattggctgccacagctacaacaataataatgataactttatgcttagtcacagcaacaacattaatgatggagaaaagtcatgtgctgctggtgagtggtttagccaaacactactagcaccgttgggttatgatattgaggatattaagcaattgattagtagcagcagtagcactactatcttcaataatgttgatgaaaacaagacagaagagaaggccatgtactactactactactagtgactgcaaactgattatgatgatgatgatgactgaatctgactactggtaaaaaaatatgatgatggagaaagggtatgttgatgttggtgtggcaaagattcagaagaaaaaaaaattgatgagatttttctggggttctgcgttctttgatgaaacatttcttgttttgacagtacatggtaaaagcttctttatattttgtatatatcttctcggaaagggtgatgatgattatgatgacgacgaagaacatgatgttagattatttttttgttaattaagtattctctccaatcagatattaatgttgtgaaaaacagccaatgtcaattcaaattattttatattagggattatatatatatatatatatatatatatatatatatgtatatatatatgtatatatataacatagtttagtgtgttaagtactactactacgcattgttataaattaatctatatcttcttgatatgtattatgtaattatatatgagaatttgtgaatttgttatc

SEQ ID NO: 29522 - DNA, 967 bp, Glycine max
  Clone ID: UC-GMFLMINSOY056G03_FLI
tgaaattaaactttatggagagaaagaagatgatgaagctctggatgaatcattttgtgaagatagcttttcgaagcttgaggctttgataaccaagattttccctcaacggtactcttttttaaaattacctaatactcgtgcctcaaaggcttcaagagcgagttattggttagcttgtctaatctcacttgttgagcagacacgatatttaaaatttcgaaagtggcctgttgagtggggttggtgccgagaccttcaatcatttatttttgtttttgagagacataacaggatagtgctggagcgccctgaatatggttatgcaacctacttctaaacgcatcttgaaggagctcaaggatttgcagaaggatcctcctacctcatgcagtgcaggccctgtggctgaggacatgtttcactggcaagccacaatcatgggacctgctgatagcccatatgcaggtggtgttttcctagtttcaattcattttcctcctgactatcccttcaagccaccaaaggttgcttttcggactaaggtgttccacccaaacatcaacagcaatggcagtatatgtcttgacattctcaaggagcaatggagcccagccctaaccatttccaaggtccttttgtcaatttgctcattgttgacggatcccaaccctgatgatccactcgtaccagagattgcacacatgtacaagactgacagggccaagtatgaggctacggcccgcagctggacccagaagtatgccatgggatgaccatatagagctgtttttcaatgaagcagcaaaatcataatttatgtaaaagaacaaaagatattttgaatgaatttgaatgctttattttatattagtggaactccacagtggtaagaagagacctggtttgccaatttgtgaatattttctttgctatacactggtgatggaagaatgttgtgttgtgc

SEQ ID NO: 29523 - DNA, 2642 bp, Glycine max
  Clone ID: UC-GMFLMINSOY056H06_FLI
caatttcaaatctacgccatagttcttctcttcctataaataccaaatcccaatttctttctccacgtccacacacttttctttcaggcacccatctaagactacccgataagaagcaactctcaatttctgacatttctttaatcgagtgcttccggtggtatcattcaagaggagagtagaggaagataaagagatgacgataaaacctgttgttcgtgtttcggaggggaagctggtggtgaaggagcgaacgattctgaccggaatgccggagaacgtggttgaaacatcgacagtggaaggaatgtttatcggagtagatttggagaaggaagacagcagacacgtggtttcgctgggaaagttgaaggatgtccggttcatggcgtgcttccggttcaagttgtggtggatggcccagaaaatgggagatcgagggagagacattccgctggagacgcaatttctgttgatggaaaccaaagatgggtcccacctcgagtcagataacgacaaaaacaagaaccagatcgtgtacacagtttttcttcctctgctagaaggctcattcagagcgtgcctccagggtgactccgacgaccagctccagctctgtctcgagagtggcgacgccgaaaccaaaacgtcgtcgttcacccacgctctcttcgtcagcgccggcattgaccccttcgccaccattcaccacgccttccgtgcagttaggaaccacctcaacacgttccgactccgccacgagaagaaactccctggcatcgtcgactgcttcggctggtgcacctgggatgccttctaccaggaagttactcaggaaggagtcgaggccggaatcaaatccctagccggcggaggcacgccgccgaagttcgtcatcatcgacgacggatggcagtccgtcggcggtgacgacgacaaacaaaactcaaactcgttgcagaggctgacgggaataaaagagaacggcaagttccagaagaaggaggaaccggaattggggataaagaacatggtggaggtagcgaagaagaagcattcagtggagcaggtgtacgtgtggcacgcgataacgggctactggggcggggttcgtccaggggtgaaggaaatggaagagtacgggtccgtaatgaagtacccaaaggtgtcgagtggagtgacagagaacgagccgacgtggaaagtggacccgttagcggttcaaggcttgggcctagtaaacccgaagaaggtgttcacgttttacgaccatttacacagttatctggcgtccgctggtgtggacggcgttaaggtggacgtgcagtgcattctagagactctcggcgcgggactcggcggaagggtggagctcactagaaattaccatcaggcccttgacgcttcgatttctagaaacttccctgacaacggttgtatcgcctgcatgagccacaacacggacgcgctctactgctccaaacagacggcggtggtgagggcttccgatgatttctacccgcgtgatccggtgtcgcacactatccatattgcgtccgtggcgtacaatagcgttttccttggggagattatgttgccggattgggatatgtttcactcccttcaccctgtcgcggagtaccacgcttccgctagggccataagcggcgggcccctctacgtgagcgacgcgccgggggagcatgactttgatctcctcaggaaactggttttgcccgatgggtcggtgttgcgggcccggctcccgggtaggcccaccaaggactgcttattcaccgacccggcccgcgacggggttagtctgctgaaaatatggaacatgaataagttgggtggggtgttgggggtttataactgtcaaggtgctgcgtggagtgctaccgaaaggaagaatgcgtttcaccatagtacggattctggtgctgctgtcatcacagggtatgtgaggggttgtgatgttcacctcattgcggatgctgctgctgatgatgattggaacggtgattgcgcgctctactctcactactccgggcagctgattgttcttccgcacaatgtggcacttccggtgtcccttaaggtgctggagcacgaggtgtatgctgttgcgcctgttaagaaggttttgggtggtggtgctggctgcagctttgcggctcttggacttgtgaacatgttcaatgctggtggtgccgttgaagggctggtttacgagcaggggttggttcgtgtggaggtgaaggggtgtggtaagtttggggcttattcctcggctaaaccaacaaggtgtatgctgggaaacaatgaggtggtggatttcgattacgacgctgattccggcttgctcatcttcaacatagatcatttgccgcaagagggacacagggttcacttagttgagttagtttatagtctatcttcttaattatttagttaccatattgttgaatcagagagggagaggatattggtatggtggtgtggtggtatttctttcttttgctggataggatacagtagagggttttcaacaatttctactttgtaagatttcacgagccatctttgttttcgaattttgatagaaattgaatacatgtttcttactctagttatttttt

SEQ ID NO: 29524 - DNA, 1223 bp, Glycine max
  Clone ID: UC-GMFLMINSOY057A11_FLI
gttggacttgatgttcaattgtctgctcttaagaaatatgtgcctacaatctggaagcagtctcttgtggggtcaagtatatgggcagtctcaactgcaaatgcaggcacttggagagaagccgagctcaagtcctgggacgaaaaggctggagttggacaagttgttttccgagacgacggaagttctgtgaaacttggggcagaagaaatggcactgtctgagcatgcagaaatgagtgacatagagagtgattccagcttagatcaatccgattccagtgactatgaggaggaggaggaatcgcaaggcataggatttctggagagtaccaatctacagagaggtattcaaactgaaactgcgacatttgccacgtgggagaaccacactagaggcatagcttccaaaatgatggctaatatggggtacagagaaggaatgggtttaggtgtaaccggtcagggaatgctggaccctatagcagtgaaggtgctaccaccaaagcagtccttagatcatgcactcgagtctcataaaagggaagagaacaaagagaagcaaggcaagaagaaacagagccgaggtggcaagagaaaacgcgagaagaaatttgcagaagcaaaccgtgcagcaaaagaggaagaagaatcggcatcagatgtctttgcattaataaacaatcacctggcaatgcacaatgaggcttttggcggtggattgatgaagaagcagcaaagtaaaggttctgaggaaggtaagaaggtggatagacgagcattggttgcttatgaggaagaggtgaaggatttgaagattagggttgaaaagctcgagcacattgtcaatgccaatagaaaagagaaggctgtgtatgagggtgctatgagaaaattaaatgaaacccgcaaggctttggcagatgctgaagcagttcatgcctctgcctcaaattcagtaacaagcaaagaaaaagagaagagatggctcaagttttagttaggagtcaagactcagttgtttttagttgcatgatataatgtctttattttatgttgatgaccttaaaatgaagagtaaagggaaaggagatttcaaaatgtgctgctcaacaaagatattagtacattacacttttgtatgcaaccttgtacatgttatgcaattattcaattgcatgatgtgtgcacgtatgtttgtatcgagtccttgtgttttgaatt

SEQ ID NO: 29525 - DNA, 1919 bp, Glycine max
  Clone ID: UC-GMFLMINSOY057B04_FLI
ttctgctcttgcccagaaattgtggcttgctggattttcaaagggcatacaggaaatgcatagaaaggcttctttggttcttgaagatgcagttaggaatatttacactgttgttgcattttgtgctggtaataaggtgatggaactctaccagttgcagttaaataaaatatttaagcaaagcttttttcatggagtggccattggttttgcatttggcttttcgcagtttctgctctttgcttgtaatgcccttctactttggtacactgcaatatgtgtaaataagagttatgtggatctacctactgctctcaaggagtacattgttttctcatttgctacatttgcccttgtggagccttttgggttggctccttacatacttaagcgacgtaaatctctcatgtcagtgtttgaaattatagatcgtgtgcctaagattgatcccgatgatagctcagcactgaagccacccaatgtatatggaagcattgagttgaaaaatattgatttttgttatccttctcgaccagaagtgttggtgttaagcaattttagtctcaaagtcaatggaggacaaacaattgctgtagtgggagtttcgggatcagggaagagcacaataatatctttgattgagagattctatgatccagttgctggccaagttttgctagatgggagggatttgaaacaatataatttaagatggttgaggagccaccttggtttggttcagcaggaaccaattatcttctcaacaaccataagggaaaacatcatatatgccaggcataatgccagtgaagctgaaatgaaggaggctgcaagaatagcaaatgctcatcatttcattagtagcttgcctcatggctatgacactcatgttggaatgagaggtgttgacttaactccaggacaaaaacagagaattgcaattgcaagggtagtgcttaaaaatgctcctattttgttgttggatgaagctagttcatcaattgaatctgagtcaagccgagtggtgcaagaggctctagacaccctaataatgggaaacaaaaccacgattttaatagcacacagggctgcgatgatgaggcatgtggataacatagtagttctaaacggaggaaggatagtggaggaggggacccaggattcattagtggcaaaaaatggtctgtatgtccgattgatgcaacctcattttggtaaggctttgcgccagcatcggcttgtatagaatgggagtatataatgtgagcaggcgcaactaatgttggttcatgagaatcgtttcatatactgaatgagttgaatgactggtgattgctgctcctgatggaattttccattgtcaggtggaggcttgcatgtagcaagaatgggagtattggatcagcactcgacattggtaggcataagaagagggtactctggcaggggtagtgtaggaattaaagataggaatttggaatttggaatttggttggtttgagactcgagtattgaagctgtggatgcatattcttttggaggcaagcagtttagactgacggtgttgtttccacggtatattttgatagaggaaggcggcggaatcaacactatttcagctgagttactcttctataagactttcttttcactcttcctgtctctcaagcgtggatgacgacttgttcactactgtatttattttctcttcatttgtgaaaattgtagaaaatacagtctcaagtgttataaaatctctgtatatacacagcgatagtctagaagcaattcctttagtttttgaattacccgaattcacgagttttttgtccttggataatagatgcaaatttccacgtgtattttgtcaagtagtttgagatattcttatagttttttaaataaaaaactagtttgct

SEQ ID NO: 29526 - DNA, 2453 bp, Glycine max
  Clone ID: UC-GMFLMINSOY057C09_FLI
attctgcaaagaaccatgcagcagctggtgcaggagatcctccaaatgaccaagcagcagatggttcagagaattccgcaaaaaacatatcagcacgtagtgcaggagatcctccacatgaccaaacagcagatggtatagaaaattctttaagcaaccaatcagaagctacagagaaacttgtaaatgatgaacagggtcctgcagaaagttttgtagaagatgaagtacatgttattgaaacgcctgaaaagtgccaaaaatatggtgttgagacccctataagcagcaaagcagaacgcctcccagaagaagcaaaagagatactgaaatcattggcaagtaaatgggaggatgtatttgatgcaaatgcattgcaggtgatccctctcaaaggggcaatgaccaatgaggtattccagataaagtggccaactacgacaggggaattgtcacgaaaggttcttgttagaatgtatggtgagggtgtggacgtgttctttaatagagataatgagatccaaacatttgaattcatgtcaaagaatgggcaaggtcctcgtctactaggacgatttatgaatggccgtgttgaagagtttatccatgcacggacattatcagcatccgatctacgtgatccatctatttctgctcttatagcgaccaaaatgaaggaattccatgatctagatatgcctggtgaaaagaaagtccatctttgggatagattgcgaaattggtttagtgaagccaaacgcttatcgtcacctaaagaatttgaagctttttatttggacacaatcgacaaagaaatctctattttggaaaaggaactatcaggcccacaccaacgaataggattttgccacaatgatttacaatatggtaacataatgcttgatgaagagaccaattctgtgaccatcatagactatgaatatgctagttataatcctgtggcatttgatatagcaaaccacttctgtgagatggctgctaactatcacacagaagagcctcatatccttgactacaataaatatcctgattttgaggagcgtcaaagatttgtgcaggcatatttgagtacctctggtgagcagctgagtaacagtgaagtggagcagctacttcaagaaattgagaagtatacacttgcaaatcatctattctggggcgtttggggaataatttcggtatcttcactttctcactcagttttatttgttttataggatgggtgtagctgagtccttagagagagaagtgattccataaacctggtttttgtgcatcatttccataaaaatggcatttccataaaaataaacttaaacattattgtcgtcgtcatcatcatcattcattattacaactgatgaaacaaaaggcaattgtatttgctattgctttgtcataaagcatatttctcttgaattttttaatgttaggtgtctcctatcacagtgcttttggatgttggtataaacaaagcatttgttttcttttgggcatcatttccataaaaataaacttaaacattattgtcgtcgtcatcatcatcattcattattacaactgatgaaacaaatggcaattgtatttgctattgctttgtcataaagcatatttctcttgaattttttaatgttaggtgtctcctatcacagtgcttttggatgttggtataaacaaagcatttgttttcttttgggaagtaagttacaaattttagctttttagggaaaaaagataaaataaactttataattttagcctctaaattgcgttttctcttgtgagacaaagcactattgggtgtagaaagactaatccaaaaggtcatagtgacaagaaatagttgcaccccatttgggtttttatgaacttcgaaattctcccaagttcccatctgggctgcacatattatgtagtttgttgccattagcagatgagaatttctccatatttgattattataaatcctacacatactatatagtatatacccaatagtaaagagggtaggaattttgttcttcattgtttcatcttctgattaatttgttcaggcacaagtgaacactatcgactttgactacaaggagtatgctaaacagaggtttcaagagtactgggcaaggaaaccttatcttttaataaactctgaagcaccttctccttataatgtgcctgagggtacaggagagctagcctcagcattgcccaccaaatcgaagaactctggtatctttaggaagatgaagagagttttgggtctcggtttgttcaagtctaagagctaggacaacaattctgccagctcttttttgttttcttagtttctctttgactgaaaatgtcaaatgagaaaagttgagaatagttacacaaaataatgtaccaaacaagcattacgttttggtattataattttattcatttttttt

SEQ ID NO: 29527 - DNA, 1507 bp, Glycine max
  Clone ID: UC-GMFLMINSOY057G02_FLI
tggataatgatgcttttcgccgaatggcccggttgaccgatggtactttgagtgaggtgctgccaagaatatcagatactgatgtacaaatatcccgtcagcgtatttctgcatttctatcttcacacaccgcttatgaattacttcccgagtcaggcaaggttgttgctttggatgttgatctaccagtgaaacaggcatttcatatattgcatgagcagggagttttcatggctcctctttgggacttctgcaaggggcaatttgttggtgttcttagtgcttcggattttattttaattttaagagagctggggaatcatggatccaatctgacagaagaggagcttgaaacacataccatatcagcttggaaagaaggaaaatcgtatctaaatagacagaacaatggacatggaactgcattttcaagatgttttatccatgcagggccatatgataatctgaaagatattgccatgaagatcttgcaaaaggaggtttcaactgttcctattatccattcatcttctgaagatgcttcatttccacagttactacatcttgcttcactttcaggaatacttaaatgcatttgtaggtattttaggcactgctctagttccttgcctgtacttcaacttccaatctgtgcaatacctgtgggcacgtgggtgcccaaaattggggaatcaaatcggcggcctctagcaatgttgagaccaaccgcttctcttgcgtcagccctaaatttattagttcaagcccaagtaagctcaataccaatagttgatgataatgactcattattggatatatactgtcggagtgacataacagctttggcaaagaacagagcatatacacatattaatcttgacgaaatgactgttcatcaggctttgcagttgggccaggacgcatatagtccctatgagcttagaagtcaaagatgtcagatgtgtttgcgttctgatcctctgcataaagtgatggaacgcttggcaaatccaggtgtcaggcggcttgtcatcgtggaagctggcagcaagcgtgtagaaggcattgtttcattgagtgacatattcaagttcttcattggtggttagttttggattggtgaatggagaagtaaaatggtatgtgctgtggttatgacacttaagcatccatacaactagccatcatcacttgtccaaaccattgaaagtgctttctacacggtgattttatctctcatttcattgtaatacaattggattggcctcttgctttattgcctctttttaagattttaggctgagaaagaggcctgtaaattcagagtatttgattgcccaaaatttattcatctctccccattcgtattatcttcaaatgtattgtgctcctgacatagataccagcaaggtgggggagcacaacttctgtaatcattccatgctgtgaagatatcaagtttgaagaaaaaaaaatgaggatgaagattgagatactgttgttttat

SEQ ID NO: 29528 - DNA, 1439 bp, Glycine max
  Clone ID: uC-gmflminsoy057g07_FLI
tggtttcactttgtgggaagagtcgtcggggaagaggggaaagacaggaaaggagaataatgcgggcgagaaaccctctctaggagagtctgcagcaaagctagggcagtggacaacaacggagcggacgtcacagtcattttccaacaatcgtcacggcagcttcagctctcgctcttcgtctcagacaactgggctgaaaaaccagagttttattgaaatgatgaagtctgcaagggatagtgcacagaatgaagtgctagaaagcgaggaaacattttttctcaagaaagaaccctcctcgaacacccaaagagcagaactgcttgtgaaagtggatgggaagagtactgatcaaaagtcaaacacaccaagatcaaaacactctgcaacagaacagcggagaaggagcaaaattaatgacagattccaaatgctaagagagcttattccacacagtgaccaaaagagggacaaagcatcttttttattggaggtcattgaatatattcattttttgcaagagaaggtgcacaagtatgaaggttcatttcaagggtggagtaacgagccagaaagattgatgccatggagaaataatgacaagccagcagaaagttttcaacctcgtggcaccgataatgggtcaagtccatcaccaacaattcctgggagtacccagaatgtagaatctggcttgagcacagcaactacctccaagacaatggatcatcaggctggaaaaatgaacaaggcttttccaattcctattccttcacagctaaatttcttcactccaacccaaatcggtggtccaggtggagtagtgtctcagctcacacatagatcggcatctgatgctgagaacaccaaatatcaaccttcagtggaatgtcagactatgactgctaccaatgaaaagctgaaagagaaagagctcactattgaaggtggtgccattagcatatcaagcgtgtactcaaaagggttgttacatacgcttacacacgcattgcagagttcaggggtggacttgtcacaggctagcatctcagtgcaaattgaacttggtaaacaagcaaacatcagatcaaatgtaccagtgtcagtgtgtggtgctaaggatggtgcagttccttctaacaatcaaaagatgatgcgctctagagttgctagctctgggaagtctgaccaagcagttaagaagctaaagacttgcagaagttaattcgaccgttatattcattctttctttattacaattcttactaattatttggggtaactttttaaaattaatttttggaaggggtattttatgtcttctgctggctttattatccagcgtgggggagatcgactgtacattcagtgtcttcttagtttgttgggatcattaggctcaccccaacaaaataaaatgaattattttagtttct

SEQ ID NO: 29529 - DNA, 1480 bp, Glycine max
  Clone ID: uC-gmflminsoy057h02_FLI
cgcatggagatcaaccgccccttcccggcctcccccgccgacatccgccgcttccactccgacgactacgtcgacttcctctcctccgtctcccccgagaccctcgccgattccgccttctctcgtcacctcaagcgcttcaacgtcggcgaggactgccccgtcttcgacggcctcttccccttctgccaggcctccgccggtggctcccttggcgccgccgtcaaactcaaccgcgctgacgccgacatcgccatcaattgggccggcggcctccatcatgccaagaagtctgaggcctctggattctgctacgtcaacgacattgtcctcggcatcctcgaacttctcaaggctcacaggcgtgtgctgtatgttgacattgatgttcaccatggtgatggtgttgaggaggccttttacaccactgatagagtgatgacagtgtctttccacaagtttggggactttttccctggcacagggcacgtcaaagacattggggtgggctcaggaaagaattatgcagtaaatgtcccattaaatgatggaatggatgatgagagtttccgtagtctgtttcgatccatcattcaaaaagtcatggaggtttatcaacctgaggcagttgttctacaatgtggagctgattcattgtctggtgacagattgggttgcttcaacttgtctgtgagaggtcatgcagattgccttcgttttcttagatcgttcaatgttcctttaatggtcttgggtgggggtggatatacaattcggaatgttgcccgttgttggtgttatgagcagtggcagtaggagtggagcctgataataagttgccttataatgaatattatgaatattttggcccagattatactctctatgtcgatccaagcaacatggagaacctaaacacatccaaggatttggaaaaattaaggaacacactactagaacagatttcccgacttccacatgctcccagtgtaccttttcagacaacaccacctaccttgcaacttccggaagaggcggaagagaacatggatagaagaccaaaacttcgcaaatgggatggtgaagattatgattctgatcccgaagaaggtggaaaggataattccaagttctcaaacatcactgcccatatgagggacattgcagatgaaatggaagaagagaagccagaagagcatccatcatcttgtagttgatagaacagagcaagttcttgcacagcatgtttgtattgtaatctttatcgtaaactatttttgtttatttaagtcattttcttttatttggtccctgacttacacttagtttcgttttagtctcatagtgaatttagtttattttgaatattttcatttgtgcatattttcatttggtcaaatggagacgtcactttaattttggttcatgtatatttcttttacatgtatgatgaggatattaaagaaagtgatgaaggggc

SEQ ID NO: 29530 - DNA, 1554 bp, Glycine max
  Clone ID: UC-GMFLMINSOY058A08_FLI
gggagatgatcatgagcgagaagagaaggaagaagaagaagaagaagaagaagaagaaggggaagttggtggagtgagagtggagagtgtagaagaggaaaatgcggcggcgattgcggagattgtgggtgatttttcagggttttctacttcgaatgaagatgattcttctagcactagcactggaccaaggtctaataatatatctcccaatgggagaatcaagcgtgttattaccgcgggtaactggcagaagggtgagcttttggggcgaggttcgtttggttctgtttatgaagggatttctgaagatggattcttttttgctgtaaaagaagtttcactacttgatcaggggaatcagggaaggcaaagtgtatatcaactggaacaggagattgcacttttgagtcaatttgaacatgagaatatagttcaatacattggcaccgaaatggatgcatcaaatctgtatatctttattgagcttgtaaccaaaggttcccttcgaaacctctaccagagatataatcttcgagattctcaagtatctgcctatacaagacagattttgcatggtttaaagtatcttcatgaccgaaatattgttcacagggatattaaatgtgcaaatatattggtggatgcaaacggatctgttaagcttgcagattttggattggcaaaggcaaccaaattcaatgatgttaagtcctgcaagggaacagcattttggatggcccctgaggttgtaaaagggaaaaacacaggttatgggcttcctgctgatatatggagtctgggatgtactgtgttggagatgttaacgggccaaattccatactctcacttagaatgtatgcaggcattgtttagaattggaagaggtgagcctcctcatgtgcctgattctctttcaagagatgcacgggattttattctgcagtgtctaaaagttgatccagatgaacgccccagtgctgctcaactcttaaaccatacctttgtccaaaggccactgcattcccagtcttctggttctgcatctccttatattagaaggggttaaacttgtcacctccaactgtgaaagataatgaagatctgacattcattggatataaaagtatctccaatgttcaatcttcaagttgctagagttggtctcgggtgtattgttgtaacaatagttcattgtgttgtgccttcagaattcagagtttgcttgcttgtaactttactcaattttttaagcactgctttggatctagcaatggataggcaatccagagagataactcaccctttggctttaacgccatatttgagaattatggtccacgtgttatctaattaatgtgataatttgtctgttgtagcagtgtaaaatatcaacgtcaagctgtaataggttgttcgaggcttccccttttgtttgtttagttagcatatgaaagaattcttaggctaaacctttgggagcggtagtaacaaggattagataccatgctatatgtacatatcacctttattagtaagcaattgtttgtttat

SEQ ID NO: 29531 - DNA, 1047 bp, Glycine max
  Clone ID: UC-GMFLMINSOY058B11_FLI
tccactggtttgagaaatttaattggttcattagcagtgagaactatttggttatcagtggacgtgatgcacagcaaaatgagatgatagtgaagcgttatatgtcaaaaggagatctatatatacatgctgatctgcatggagcttctagtacagttatcaagaatcacaagcctgcacaaccagttccacctctgaccctaaaccaagctggatgtttcaccgtctgccatagccaggcctgggattcgaaaattgttactagtgcctggtgggtttatcctcatcaggttagtaaaactgctcctacaggcgaatatctgacagtagggagtttcatgatccgtggaaagaaaaattttcttccaccacaccctcttatcatgggttttggcctactatttcgcttggatgagagttccttgggatctcatttaaatgaaagaagagtaagaggagaggaggaagcagcagatgattatgaagaaactggccctcttgaagataaatctgattcagagtctgagaaggatgtcactgatatagaacctgccactgacttggaaaggaatggtaatttgtcagcagattcacacaaacccctaccagaagacttccctgcagatccatcccaaactagtttggctactaccgatgccgaaactgcaatttcacaggattttcctgcgaaagagacaagtacattgaatatggttgatagggagatattatcagatgttggtggaaatggcttagcatctgtcacccctcagcttgaggaacttcttgatcaagctctggaacttggacctgttgctaaatcaagtaaaaaatatggaattgagaagtctcaaattgatttagacactgaacaacattttgaacaaaccaaaactgcagtaagggaaaaaccttatatatcaaaagctgagagacgaaagcttaaaaaagaacagaaacctggagaagaagattcaaatgttgaacatggaaaggatgaatcaaagctaaaagatatttctgctaatctaccagtgaaagaagatc

SEQ ID NO: 29532 - DNA, 2825 bp, Glycine max
  Clone ID: UC-GMFLMINSOY058C04_FLI
ccttaaatgagtaaaaaagagtgaagaaaggaaagaaaggagcaccatttttggtttgagaaacataattagcaagagagttcaaaatggggaagagagagtttaatggggtggtgttgatgatgctgtgtttgtgggtttgtggtgtcacagcctctgtgacttatgaccacaaagccattgtggttgatggcaagagaagaattttgatctctggctccattcattatcctagaagcacacctcaaatgtggccagaccttattcaaaaggccaaagatggaggccttgatgtcattcagacctatgtgttttggaatggccatgaaccttctcctggacaatactatttcgaagataggttcgacttggttaaattcgtgaagctcgcgcagcaagcaggcctctatgttcatctccgtattggtccctacatatgtgctgaatggaacttggggggatttcctgtctggctcaagtatgttccaggcattgctttcagaaccgacaatgagccgttcaaggctgcaatgcaaaaattcactgcaaagattgtcagcttgatgaaagaaaataggttgtttcaatcccagggtggtccaataattttgtcacagattgagaacgagtatggaccagtggaatgggaaattggtgctcctggaaaagcttatacgaaatgggctgcacaaatggctgttggtctagacactggtgttccatgggtaatgtgcaagcaagaagatgctcctgatcctgttattgacacctgcaacggattctactgtgaaaacttcaagcccaacaagaacaccaaacccaaaatgtggactgagaattggactggctggtacactgattttggcggtgcagtccctcgtagaccagcagaagacttggcgttctcagttgcaagattcatacagaatggtggttcattcgttaactactatatgtaccatggaggaacgaactttggccggacatcaggtggcctcttcattgccactagctatgactatgatgcgccgcttgatgaatacggacttgaaaatgaaccaaagtatgagcatttgagagctttgcataaagcaataaaacaaagtgaacctgctttagtggctacagatcccaaagtgcaatcgcttggatataaccttgaggcccacgtgttctcggccccaggtgcttgtgctgcattcattgctaattatgacaccaaatcttatgcaaaagctaaatttggaaatgggcaatatgatctaccgccttggtctatcagtattcttcctgattgcaaaactgttgtttacaacacagcaaaggttggttacggctggctgaaaaagatgactcctgtaaacagtgcatttgcttggcagtcatacaatgaagaacctgcctcatccagtcaagctgattccattgcagcatatgcactttgggagcaggtcaacgtgacccgcgattcttcagattatttgtggtatatgacagatgtcaacgttaatgctaatgaaggatttctaaagaatggacaatctcctcttctaactgtaatgtcagctggccatgttctccatgtgttcattaacggtcaacttgcaggaactgtgtgggggggattgggaaatcctaaattgacatttagtgacaatgtgaagctgagggctggcaataacaagctttctttacttagcgttgcagttggtctcccgaatgttggtgtgcactttgaaacatggaatgcgggggtgttaggcccagtcactctgaagggtctaaatgaggggactcgagacttgtcccggcagaaatggtcttacaaggttggactgaaaggtgaatccttgagccttcacaccgaaagtgggagtagctctgtggaatggatacaaggatcattagtggctaaaaaacaacctttgacatggtacaagacaacttttagcgcaccggccggcaatgatccattggctctagatttgggaagcatgggaaagggtgaagtgtgggtaaacggtcgaagcattggtcgccattggcctggatatatagcacatggtagttgcaatgcttgtaattatgctggatattatactgatacaaaatgccggacgaattgtggacaaccttctcagagatggtatcatgttcctcgctcatggctgagctcaggtggtaactccttggttgtgtttgaagaatggggaggtgaccctaatggaattgctttggtgaaaagaacatgaagtgtgatattttatgatgctctcttaaaaggagcagcattgacaggcaatatatatcttgtaacaaatgtctaggaaatgcaaagaagctgtcaagtgagtcctatgcggttaggaccctatgatgcagcaatttaccaaatacgtgtggtttagatcatattaggttcagtatataaaaaatatttgaagttcataattggtgctccttgtcttctggttgttcaagtatacctcaaaagattgccaaggcctaatcatgcattgcctggccaaaaacaaagatttatataagagaatttggatgcgcaaagactgtgtatactgtacatagtcaagtcaggctattgtgctgaatattgccccatgtattacagggcttgtatcaatgaagattgagcccttacacatttatttaatttactatgatacaatggaaagaattgtagacacgcaaaatgtgtcggagagtatatttgctatattctgccagaaataattgtgttttcccattataattattatgtaagaacagattgaaagtaataaaatatcctttgaaataaaaaaaac

SEQ ID NO: 29533 - DNA, 1909 bp, Glycine max
  Clone ID: UC-GMFLMINSOY058E07_FLI
attgtgaactatatgtcaagaaatggtgctctcaggcagcagctttacaaggagattgaggttgctagtgttgattcctttcaaggaagggagaaagactacatcattctgtcttgtgttagaagtaatgaacatcagggcattggattcctgaatgatcctaggaggctcaacgttgctttgacacgagcaagatatggcattgttattttgggaaaccctaaagttttgagcaagcagcctctatggaatagtttattgactcactacaaggagcatgagtgcttagttgaagggcctttaaataacttgaagcaaagtatggttcagttccagaaacccaagaagatttacaatgaacgaaggcttttttatgggggtggacctggaattgcatctaatgataattttggtaacgttggatctggtgctggcacaagttcagatcggaggagcagtcgaggaaggggatcttatatacctcctggtccaccaaatggaactcataagcctggagtgcatcctgctggatatcctcctgtgccaagggttcccttgcctcattttcatggtggtccccaatctcaaccatatgccattccatctcgtggggctgttcatggacctgttggggcagttcctcatgttccatctccagggagtcgaggttttggggctgggagaggtaattctggtgctcctccaattggcaatcatctacctcatcaacaaggcacccaacagcctattggatctacatttaacttccctgctctagagaatcccaacagccagccatctgttggtggtccattatcccaacctgggtttgccaacaatatgcatgttcaaggggctggccaatcatttcgtgatcaattttctatgcctggaatgtcccaggacttcttgggcgatgacttcaaaagccagggatctcatgttccgtataatgtcactgatttctctacgcaggcttctcaaagtggatatgctgttgattatgctacacaaggagcacaaggtggattcccagggaattttcttaaccagaattctcaagctggatattctcgctttggttctggaaacgactttatgtcacaggactacatgggccatggatcacaaggccttttcactcaggtggggttcagtgatcccttgcaagatgatgcaacacagagccatttcagtgtggcaaatgccaaccctcttcagtcccagatgaattctctttactcccaaccttttgctcactacaacacacagccgcttaacatgcaggctacccaacagcagcctcaggctcagaactcccaaaatcagaaaatccactataacgtttgaggaactttaggagcttaatgtggctttgatgggttatagtctttgcaatcagcaactgggtttgtgcctgtcttttgtgctgaaatacgtttgcatgtgacatccgaaggattgccttgggatagctatatcgaggaattggtatatatgatttcagttgatggaagtttggggcattacgaagatacaagcaggcgcatcccgggctgaaaattgataagataaccccctttaccgtactgaagttttgtattgtttgggattaaggtgaaattgttcgagaaagcattacatggaatggttttgtcgaaagggtttcgatcttgaagcagaaggggcagtttacatgtcggtgaaatactgaatatagtaatccatacggcaccaatcatcgccaaggaagttattattgtacagaaggcagggatgcggtgaaccctttcagctcttcctgacatgtaatttttcaactcgatattatagacacaagttatattatgcaactattgccactcgtaattttctgtggcatataaaggtgtgataattgtttccttgt

SEQ ID NO: 29534 - DNA, 2442 bp, Glycine max
  Clone ID: UC-GMFLMINSOY058G01_FLI
gaaaaattgtccagattttttccaacaaagcaaaggcggtgagacatgtatgtggaagaaagtagcacctcttctgcttagctaaacccccgaacgcagctgcgccactcgtttcatgcctcagcctctcgcctcggcgtgattgctaccaccttgttcgattcattcgtgtgatgttgtatgggttgaacaagggacagagattgcttcgggaatggagtgggacagcaattccgatctgagcggggacgaagaggaggaagggttcgtcttcaacgacggcgacgacgctggccctctcccgttccccttccccgtcgtcgaaaacctcctccaaacggctccctgcggcttcgtcgtcaccgacgcgcacgagcctgacaaccctatcatttacgtcaacaccgtcttcgagatcgtcaccggataccgcgccgaggacgttctcggccggaattgccgtttcttgcagtgtcgaggtccatttgctaagagaaggcatccgttggtggactcaacagtagtttcagaaattagaagatgccttgaagaggggattgaattccaaggtgagttgctgaactttaggaaagatggatctcctctgatgaacagattgcggctgacacctatatatggagatgatgagactataacacatgtcattggaatccagttcttcacagaggcaaacattgatcttggtcctgttccgggttctacaattaaggaatctgctaaatcgtctgatcgatttcgttccgtgctttcctcgttgcagactcttccagtggggggcaggaatgtatctcgtggagtttgtgggatttttcaactgagtgatgaggtactgtctctcaagatacttgctcaattaactcctagagatattgcatcagttagctctgtctgtagacgattatatgagctgacaaaaaacgaagacctctggagaatggtttgccaaaatgcatggggcagtgagactacacatgttttagagactgtgcctggtgcaaggagacttggatggggtcggctggcaagggaattgaccactcttgaagcagcagcatggaggaagttgactgttggaggtgctgttgaaccctcacgctgtaattttagtgcttgtgcagttggtaatagagttgtgctttttggtggtgaaggggttaacatgcaacccatgaatgacacctttgtattggatctcaattctagtaatcctgagtggcaacacgtccaggtaagctctcctcctcctggtcgttggggccacacgctttcttgtgttaatggttctcatttggttgtatttggaggctgtggaaggcagggcttgctcaatgatgtgtttgtcctggacctggatgcaaagcctccaacttggcgtgaaatttctggattggcacctccacttcccagatcatggcacagctcctgtactcttgatggtactaagttgatagtttctgggggatgtgcagactctggagttctcttgagtgacactttcctccttgatttgtcaatggagaagcctgtctggagagagataccagtggcatggaccccaccatctcgtctgggccacacattgtctgtttatggtggtaggaaaatactgatgtttgggggtctggccaagagtgggcccttgcgttttcgttccagtgatgtattcacaatggatttaagtgaggaagaaccttgttggagatgtgtgacagggagtggcatgcctggtgctggaaatcctgggggcatagctcctcctcctagacttgatcatgttgctgttagtcttccaggtgggagaattctaatatttggtgggtctgttgctggtcttcactctgcctctcagctttacattcttgatccaactgatgagaagcctacatggagaatcctaaatgtacctgggtgccctccaagatttgcttggggacacagtacatgtgttgttggaggaacaagagctatcgtactgggtggtcaaaccggggaggaatggatgctaagcgagctccatgaactttccttggctagctctgccatctaaatccagtgaataaacactgctgtattgaagggaatactacacggctctgcttgatgtcgtgaatttgaacataagttagcgggaaaggttgcattagcgggaatggatgctaagcattgctctggtcagaatgtgtatattaagttgttacgacaatgcatttgcttgaatggttggttctggctcgagaataacttctcgttgagtgacatgagacgaagttttttttgaggtttgtgagactttgcccttcagtacgcataatgaattattcttcctgaacagaatattagtggtaatatattagggtagtttctcacttgattttccatgtgttgtcttgttcaaattctgtaatttgaatcacgataaag

SEQ ID NO: 29535 - DNA, 1425 bp, Glycine max
  Clone ID: UC-GMFLMINSOY059B07_FLI
aacactttcatatggcacccctttggttcccaccccactggtgcttgatttaggaggtccttttctctggcttcactgtgcatcacgcaacacaccttcatcttcttccctcaccacccctcaccgttcccttcaatgcttcactgccaaaacccacaaatccaccaactcctttctctccagccccgtcgacgaagtcgaccagtaccaaccatgccaagtgttccccgaaaacagcatcaccggaaccatcgccgccgaaggagaactcgtggaagacctcatggcccttcaatcagccaaagaaaaaggacaacttgtggaacaccagagccgtttcacgtgttccccgaccaccctcttacacggcctcgccaagggtgccagaggcatggttggtctcggtaggtcccgcagctcgcttccttctcaggttttcgacaacttcagcacgcaccgaaaactcactctctgcctttcctcctccaaaggcgttgtcctcttgggcaacgtggcaacctacgagtccgaggttcttaaatctctcaccttcacaccccttgtcaccagcttccccacgcaggaatacttcatcaacgttaactccgtcaaaatcaacggtaagaggctgtccaacgagcatgagggtggtggaggggttttaactcttttgagcacaattgtgccctacaccaccatgcagagttccatctataactctttcaagacatcttttgaagatgctgctgtggctatgaacatcaccagagtggcctcggtggcaccctttgagctttgtttcagttccaggggctcgcaagtggggcccagtatgccggttattgagttggtgctgcagagtgagatggtgaagtggaccatacatggaagaaactccatggtgagagtgagcgatgaagtactgtgcttggggttcttggatggaggtgtgaaccccagaaactccattgcgattggagggtatcaattggaggatgtcatagtgcagtttgatttagccacttccatggtgggatttagttcctcccttgtcgccaaaaataccaagtgttccgattttaaatatgccagttccataactgcagactcgatttgaatattttaacccaccgctttgaggatgggctttctagtactaagtactaagttttcttgcttgattttatgtttttgaagcttctcagatctcaattactaagttttcttgtttaattatgtttctgaagcttctcaattttgtaacaacttgattttgggtagtttttttttctttttcctgcactattggttgtatatttaaaatatcgtgatgagatattatgatcttatgatttgatggcacttttgcgccactgtatttttgacattggaatgaaatacttatccctatattttattttggct

SEQ ID NO: 29536 - DNA, 1495 bp, Glycine max
  Clone ID: UC-GMFLMINSOY059E06_FLI
cacagttggttctttcatattcttcctcttggtcctttcctgggcttatttatacgcatttcccagttctcaatcactgattcagagtcatgagattcccatcaacagttctgactcacttgttcagagttatgagattcccagcaacagttctgactcacttgttcagagttatgatgtgattctaaaacccaatgtttcaatggacacatgcaatgtgtttgaaggaagttgggtgagggatgatagctaccctttgtatgatgcttctcactgcccttttgttgaaaggggtttcaattgccttgctaatgggagaaaagatagagattacacaaaatggaggtggaaacctaagaactgtgagattccaaggtttgatgcccgtggaatacttgaacaacttcgtgggaaaagggtggtattcgttggcgattcgttgagtaggacacaatgggagtccatgatatgcttgctgatgacaggagttgaggataagaagagtatctatgaaatcaagggcaacaaaatcacaaaacagataaggtttttaggtgtgaggtttagtacttttgatgttagaatcgatttttatcgatcggtgttcctggtgaggcctggttctgtgcctagacatgcaccccaaagagtgaagacaacattgagattggacaagattgatgatattagccatgagtggattgattctgatgttcttatattcaattcaggtcactggtggacacggactaagctttttgacgtgggctggtattttcaggttgataactcactgaagcttggaatgacaattaactctggtttcaacacagctttactcacctgggcatcttgggtagagagtacaattaacacaaacaggacaagagtatttttccgcaccttcgaatcatctcattggagtggacagaatcacaattcttgcaaagtgactaaaaggccttggaagagaactaatcgcaaagagagaaacccaatttcaaatatgatcaataaagttgtcaaaagcatgagtgctccagtaacagttatgcatgttacaccaatgactgcatatagaagtgatggacacgtgggcacttggagtgaccagccatctgttcctgattgtagccattggtgcttacccggtgttcctgatatgtggaacgaaattctcctctcgtatttgctaccaaaataaggagcaaattagcatgagaggtaccaacatgttagaccttatatcatttaagccatatatagcttggtactcaattgtactcagcaatcaggattaacctgttagcctttaacgtcaccggggggtaccaaatgtacattggaaatgaataatgtttgtatagtgatttcaaataattggcattcacaaaaaaaaaaaaaaaaatgataccaggactaaagtgtttatgtgcaaattcttggaggactaaatgtatattttatattgaagttctgaaatgatttttacttt

SEQ ID NO: 29537 - DNA, 1825 bp, Glycine max
  Clone ID: UC-GMFLMINSOY059F08_FLI
gcggacgccgtggggcgatggacctcggaacctatgacgtgccagaaggagtggacattctgggaagatacgatgcagagtttgcaaaaatcctcgcaaaagatgctttgaaattcgttgctgaactgcaacgtgagttccggaacgatatcaagcatgcattagagcgcagaagagaggcaaagaagaagtacaatgaagggtctcttccggggtttgatcctgccaccagtgacatcagagagcaggagtgggtgtgtgcacctgttccaccagctgctgctgataggaaagtggagatcactggccctgtggacagaaagatggtcatcaatgctctcaactctgcagctaaagtctttatggctgatttagaagatgcactgtcaccgacctgggaaaatcttattagtggtcaagtgaacttgaaggatgctgtggatgggaccataagcttccatgacaaagtaaggaacaggatttacaagctcaatgatcagacagcaaagctttttgtgagaccaagaggttggcatctacctgaagcacatattctgattgatggtgaacctgcaactggttgccttgttgattttggcctctacttctaccacaaccactcagcattccggcgcactcaaggtgccggctttggccctttcttttatctccccaaaatggagcattcaagggaagctaagatatggaacagcgtgtttgagaaggctgaggatgtagtaggcatcaaaagaggaagcataagggcaacggttctgatagaaacacttcctgcagtgtttcaaatgaatgaaattttgtatgagctgaaagagcactcggtgggtctaaactgtgggcgttgggattacattttcagttatgttaagaccttccaggctcacccagatcgcctcctaccagacagggttcaggttggcatgactcaacacttcatgaaaagctactctgatctcctcatcaggacgtgccacaggcgcggtgtgcatgctatgggaggaatggcagcacagattccaatcaaagatgacccagtggcaaatgaggcagcactggaactggtaaggaaggacaagcttagagaagtgaaggcagggcacgatggaacttgggctgcacaccctggtctcattccagcctgcatggagattttcaacaacaacatgggcaatgcttccaaccagatagacacagtgaaacgcgaagatgctgcaaacttaactgaacaagacctcttgcagataccaataggaacccgcaccatggaaggtctcagattaaacacaagggtgggcattcagtacctggcagcgtggctcagcggaagcggttgcgtgcctctttacaacctcatggaggatgctgccactgctgagattagcagggtgcagaactggcagtggctcaagtatggagtggagctagatgaagatgggcttggagagaaagtgaacaaagaccttttttgatagagtggttgaagaagagatggctaggattgaaaaggaagtgggaacagagaagttcgagaagggaatgtacaaggcggcttgcaagatcttcactcgccaatgcacgtccccaactcttgatgattttctcactttggatgcctataattacatagttgtgcatcacgccaaggaaggacccgtcaaagctttgaactaaggggttctttattgcctaatagttggatcacttggactctgtcttgtgtacttctagttgctgatgtgagaaaatcacaaatgcacgatggtgtcattgtgtctatgacttagtgattatcgacttatcgttattc

SEQ ID NO: 29538 - DNA, 1857 bp, Glycine max
  Clone ID: UC-GMFLMINSOY061A11_FLI
taatgtccatgttcactgcacctttcctcactctctcacctttctcctaaaacatctcaatgggttcttcttctattacaacatcgcccgcaaccatgaccatggctgcgatcgtgctcctgttcacggtctttgccgtttcctccgccctagacatgtcgataatctcgtacgacaacgcccacgcggacaaggccgccacgttgcgcaccgaggaggagctgatgtccatgtacgagcagtggctcgtgaagcacgggaaggtgtacaacgcgctcggcgagaaggagaagcgcttccagatcttcaaggacaacctgcgattcatcgacgaccacaactccgcggaggaccgaacctacaagctcggactgaaccggttcgctgatctcaccaacgaggaatacagggccaagtacttgggaaccaagatcgatcccaaccggaggctcggaaagaccccgagcaaccgctacgcgccacgtgtcggcgacaaattgcctgattccgttgattggaggaaggaaggtgctgttcctcctgtcaaagaccaaggaggctgtgggagctgttgggcattctcagcaatcggtgcagtagaaggaataaataagatagtaacaggcgaactgatttcgttatcagaacaagaattggtggattgtgatactggatataaccaaggatgcaatggaggacttatggactatgcatttgagttcataatcaacaatggcggcattgattctgatgaggattacccataccgtggtgttgatggtagatgcgacacatataggaaaaatgctaaagtcgtttctattgatgactacgaagatgttcctgcctatgatgagttagccttgaaaaaggccgttgcaaatcagcccgtgagcgttgctattgaaggagggggcagggaatttcaattatatgtatctggtgtattcacggggagatgtggcacagcactagatcatggtgtcgtggctgttgggtatggaacagctaaaggtcatgattattggatcgtaaggaattcatggggttctagctggggagaggatggctacatcagattagaaagaaatcttgctaacagcagatcaggcaagtgtggaattgcaattgagccatcttatccccttaagaatggtccaaatccccctaatcctggaccatcacccccttcacctgtgaagccgccaaatgtctgtgacaactactacagctgtgctgatagtgctacttgttgctgtatttttgagttcggaaatgcttgcttcgagtggggttgctgtcctcttgagggtgcttcctgctgtgatgaccactacagttgctgccctgcagactatcccatctgcaacacttacgctggaacttgtctcaggagcaagaacaacccctttggagtgaaggcattgaggcgtactccagcgaaaccccattggaccttcggacgtaagaacaaggtcagcagtgcttaagcagtttaaggaaatgtgaacgtgcagaaggagccaatgatgaagtaaaagggaagacgaaggactaaagcaccagctggatgcacttcccccttcttcacataatgctgcacgaaacataaagatctttaccattttattatgatacaaaatagataatgttctgtatcaaatttcagtcagacattggctctgtacatagggttatattatcgatgcactgtatttgtattcaaattccaaatggcgaacatatttgattgctgttagtttccaaggttctgtagattatgtgacaatgcagcagcaatatttggatttgtcccatattcacatgctattttaatttgcttacaatgtggaattc

SEQ ID NO: 29539 - DNA, 3063 bp, Glycine max
  Clone ID: UC-GMFLMINSOY061B07_FLI
gggaagatagaaaaaaacaaaaacaccttattgacaccaccttttctatcatccttcaagtcatcatctttgatgatgcccatcctcctggtcattctcttggccttgttttctccttcattaggccttcctttagcatctttccaaccaaaagacaatttcctcattgattgtggtgctgaaaacacagccactctccctgatggaagacatttcaaatcagaccctcaatccagatccttcttgcaagccgatgatgagtacaaagtctcagcaaatgatgtgaatttgccttcacctgtttactcaaatgcaaggatcttcattcaggaagccaagtactccttccatttggttcaaccaggtttccattggatccggcttcacttctaccccatcaagaacaacatctttgatcttcagaaggcaactttttctgtctacacagacacctatgtgctcctccacagcttcaatgtgaacaacactgacaagccaatcatgaaggagtacctaatcaatgcaactgagccacaattgaccatgtccttcattcccttgaagaattcagctgcattcatcaatgccatagaggttgtctcagctcctgataacctgatattcgacaccggagccggccttttccccgttggcgagatcggaggcctgaccacttatggcttccagcctgtttacagggtgaacaatggagggcctctgatcacctcatcaaatgacacccttggaaggacttgggaatctgatgagcatttcctcacaaacaagaacttggccaagagtgcctcggtggcaacctctgctgttaagttccctcaagacaatccttccatctctcccatgattgcaccacaaactgtgtatgcctctgccactgagatgggtgatgctggtgtcaatcagccaaatttcaatgtgtcatggaaatttgatgtggacacctcttttggctaccttgttaggctgcacttctgtgacattgttagcaaaggcctcaatgagctctacttcaatgtttatgttaatgggaaagtggcaatcaataacttggatttatcagccatcactggtgccttgtcaacaccatactacaaagacattgtggtgaatgcaacattgatgtctgaggggctaacggttcaggttggtccagcaaatgctgatggtggaaatgccaatgcaattatgaatggcatagaggtcttgaagatgagcaactctgtcaacagtttggatggggaatttggtgttgatggaagaagtgttagtggttctaaccgcggcacggtggcagcggttggatttgccatgatgtttggagcatttgtgggtcttggtgccatggtgatcaagtggcacaagaggcctcaagactggcaaaagaggaatagtttctcttcatggttgcttcctctgcacgccggtgacaccagcttcatgagcaagaactcaatgggaaagagcaacttcttctcctcgtcgatgggattaggccggtacttctccttcgcggaacttcaggaagcaaccaagaactttgactccaagaacataattggtgttggtggatttgggaatgtgtatttgggtgtgattgatgaggggactcaagtggcagtgaagagaggaaaccctcaatcagaacaaggcatcacagagttccaaacagaaatccaaatgctttcaaagctaaggcacaggcacttggtgtccttgattggatactgtgatgagaatgatgagatgatcttggtttatgagtacatgcctaatggtcacttcagagaccatctttatggaaagaacttgcctgctctctcatggaagcaaaggctagatatctgcattggatcggcccgcggacttcactaccttcacaccggaacagctcaaggcataattcaccgtgatgtcaagaccactaacattttgcttgatgagaatttcacggccaaggtttctgattttggtctttcaaaggacgcgccaatggggcagggtcatgttagcactgctgtcaagggtagctttggttatcttgaccctgagtacttcaggaggcagcaactgactgaaaagtctgatgtgtactcatttggggtggttctgcttgaggcactgtgtgcaagaccagccatcaaccctcagttgccccgtgaacaagttaacttggccgattgggcgatgcaatggaagaggaagggccttcttgacaagatcattgaccctctcttagttggttgcatcaatcctgaatccatgaagaagtttgctgaggctgctgagaagtgtttggctgatcatggtgtggataggccttcaatgggggatgttttgtggaacttggagtatgctttgcagcttcaagaggccttcacacaaggaaagcctgaggatgagtccaagtcagcatcagcagctgttcctacttcaccaacacctcctactccttccgatgatcgcccggcagctccggctgtgcctgcacgtccggaagcagcgaataatgcttcatcagaagtgaattctattgatgaccattctggaactgcaatgtttgctcagtttagcaatctcaatggtaggtgaaggcctaatttggtttcatgaatggaaggaatcatcacctggacagctacaaacaaatttgatcatgtctagggagatcttatagtaactttctcaaggcttggaccaaaatgtttcatgtgtaatgatgtgatgctgtatgctgactgctgtttctcttctaggtactcttgtctttctgtattgtgtgtgggggtactattttgcatgatagcaaaaaaaaaaaaaaggtgtcaaatttgtcatgtgattaagttgttggttgtaagtatgcatgcattcagcagtaccatcaatcatttatggttttatatttatgaattgttgtatattgttatgtaatttttagggtgagggtaattgtagaagcaagttcaaagaaactggctaccgacaggtagtgaatttcacttgtaatcgaccactatattagcaagagttttcttgtcctttcac

SEQ ID NO: 29540 - DNA, 1029 bp, Glycine max
  Clone ID: UC-GMFLMINSOY061B12_FLI
cacagaacacgccgagtcgactcagttgctgttcgagtactcgctcttcttcaaggtcgcacgcatggtcgccaacatcgcaatactcgaatccgcattaaccgagagcgggaagctctgcgtggtggatttcgatatctgcgacgagaaccaatacgtgagtcttcttcacgagctttcggcccggcggaagggcgctccggctgccgtgaagatcgtcgtggtgacggagaattgcgccgacgacgagaggctgaatattgtgggcgtgttgctggggagacacgcggagaagcttgggattggcttcgaattcaaagtgctgactcggagaatcgccgagttgactcgcgagtcgctgggttgcgacgcggacgagccgctggcggtgaactttgcgtacaagctttatagaatgcctgacgagagcgtctccacggagaaccctcgcgacaagcttctgcggcgtgtgaagacactcgcgccgcgcgtggtgacgctggtggagcaggatgccaacgccaacacggcgccgttcgtggctcgagtaaccgagttgtgcgcgtattacggcgcgctgttcgactcgctcgagtcgacgatggcacgggagaacttgaagcgagtcaggatcgaggagggactgagtcggaaggtggtgaactcggtggcgtgcgaaggaagggaccgcgtggaacggtgcgaggtgtttgggaagtggcgcgcgcgtatgagcatggctgggttcaggttgaagccactgagtcagcgagtcgctgattcgatcaaagcgcgactcggtggcgctgggaaccgagtcgcggtaaaagtagagaacggtgggatttgctttggctggatgggaagaactctcaccgtcgcatctgcttggtgttaactagttaactcaactttttactctctttattttaaatttctttggatatttcatatttgtatacacattgttattatattttaatgttacctagagaaagtgaaaaatcatagagttggaaaattataatt

SEQ ID NO: 29541 - DNA, 2055 bp, Glycine max
  Clone ID: UC-GMFLMINSOY061D12_FLI
catcacggacccagtttgacttgtgtcaggggtttttcattctcacagtcaccaacccttgttcttcctctccactctcaccgtcccgccaaaaccctcctacaaatcgccacgacgccgtcgtttcggagttgtggctgcgcaccaatgtccacgttccaggttcgcgacaaaatcgacctctccgacgtcgagagaagaatcttcgacaggcttctcgccactcttcgccacttcgacctccaaactcagctccgagtcgccggtggctgggtccgcgacaagcttctgggaaaagagtgctatgacattgatatcgcgcttgacaatatgatgggaaccgagtttgtggataaggtgagggagtacttgttgtccattggcgaagatgcacagggagtttgcgttatcgagagcaatcctgatcagtccaaacatttggaaacagccaggatgcgtttgtttgatatatggattgattttgttaacctaaggagtgaagaatacgctgagaatagccgcattccttctaagcaaagatttggcacagcagaagaggatgcatataggagggatttgacaattaacagcttgttctaccatatcaacactgactcagttgaagatttcaccaagagaggcatctcggatcttaagtctggaaagatagtgactcctttacctccaaaggccacatttcttgatgatccattacgagttcttcgagcaattagatttggtgctagatttgaatttactctagatgaagatctgaaagtagctgctgcatgtgatgatgtgaaagatgctctagctgctaaaattagcagagagcgcattggaactgagattgatctgatgatatccggaaatcaacctgtcaaagctatgacttatatttgtgatcttacactattttggattgtattcagtcttcctcctgaatttgaaccttacatttcagatgggtgtgaaaggctttgcatttcttacttggatactgcatggaaccttatccatttacttggagagtcaacttttactgctgaacaaaaaaggttaacactttgtgctgctttgtttctccctcttagaaataccacttacagagaaaagaaagctaagaagattcctgttgttaatcatattatccgggaatctctcaagcggaaagctaaggatgcggaaatggtgcttaacttacaccaagcgtcacataaatttttgtcattgatcccttgtcttgcatctagtgaggatgtccaagttgttgatcatgattggctgggagacttagtggatgtccctgtctcttctagagtccgggtactaacagggtttctcttaagagagcttaaagattattggcatgttgctctgttgatatccactatactacatcccattgacattaaggatgaaccatcacagttgggcaaacgaagagatctgtttaatactgtggagaattctataatcaaactaggccttgagaaagtatgggacataaaacaattgatcaatggcaaagatgttatgaatgccctacagctaaaaggaggacctcttgttaaggagtcgctggataaagcaatggcttggcaacttgcctatccatctggaactgcagaggaatgcatcgaatggttgagagaagccaattctaagcgtattaagttgcagtgactctagtgaggttgattgccttgattgattgtctattccttcctcaccttgttatggattgagaccacgtgccctggatggaggaagcttagccagttggctgcatgaggtagatgatattgggagtacatcagcattctttgcttgaggttgccctgccactcgcaacctaataaagcctcatgcagttccttctcacttttgggatgtaaatttgaaccctggaaagtgttttttttgtgtgtgtgtaattgtgaaagaagaaaggatgataataggtatcatagcctacctagtttttgtttaatgatatttatatctgtgtggttgtgcaagaagaaaaaatgagaatagattgagctttctatc

SEQ ID NO: 29542 - DNA, 1430 bp, Glycine max
  Clone ID: UC-GMFLMINSOY061H05_FLI
ggattcacggagatgtgttttgccaggaattggtttgcacttgaatgcacttgcaagcttaaaggattgcaaaaacataaaaattgacacattgtcatctggaaggcaacctaatctgctcagctctccttcatctgtgcaactctctccaagccaagaacatcaactatcattggtacctgcatcagtggaaagagatttggagccattggagaatgaggttcagcctggtgaagattgtacccagtcattggtattggttcagatggctggtgaagatttccagcagaatagtccgaaaaagaaaaggcgcaagttggaaccagctggggaaggggagtcttgcaagcgttgtaattgtaagaaatcaaaatgtttgaagctttattgtgagtgctttgctgctggagtctactgcatagaaccttgtgcatgccgcgattgcttcaataaacctattcatgttgagactgttcttcaaactcgccagcagattgagtctcgtaatccacttgcatttgctcctaaagtcatacgaagttctgattctgtatctgaaattggggatgaccttaacaaaactccagcctcagcacgacacaaaagaggatgtaattgcaagaaatcaagctgcctaaagaaatattgtgaatgctatcagggtggtgttggttgctccgtaagctgtagatgtgaaggatgcaagaacacatatggtagaaaggatggttctgttccttctggattagaagccgaacctgaagaagaaacagaagcatgcgaaaagggtgtggtggaaaatgcttcatggaaaactgaaactcagaataccgaagaccatcccgaccaatctcttgctacaacaccattaccgctttccagatcattgcttccattatccttttcatcaaagggtaagccaccaagatcttttgttactaccatctccagttctggattgtttgtgagccaaaagcttgggaaatcaaatgctccgcggtctcaacatcaacccaaatgtgtaaagcctttgcaaactgttccagatgatgactctcctgtcacctgcatcaaaacttcttctcccaacggcaagaggatctcctctcctaattgtgacgtgggatcatcacctactactcgcagaggtgggaggaagttgatattacaatctatctcttcatttccttctctcacccctcaccattagaatgaagatcttcttcttcggcttaagttagcctacccccacccctcttcccttggttcacgttttcagtttgttgcagttggagctgtatgcttagggtgaatgtacatgattgagtttcgttttactttcgtaatatgtttgttccgttcatttcataatgtacaacttcagttcagttgtataatatctatcttaactgatggttatcatcactcct

SEQ ID NO: 29543 - DNA, 296 bp, Glycine max
  Clone ID: UC-GMFLMINSOY062A02_FLI
aattaacttgttaatgaggtgagtaactcctttaactatatataaattaaggggtatatatattattagttgctcacctcatgttgttgctcatctcacgaagaaactcattttagattacttttttcctttcattatgtgtatgctggagcggtggactggtagctacatagattctcgctatgatggggcatatgatcatgaggtcttttctcaggtcggttgtgtgttgtaatttgtaacgagatatccgtaacacaataggatcaaattaaccgtgttttgttgtttcagat

SEQ ID NO: 29544 - DNA, 755 bp, Glycine max
  Clone ID: UC-GMFLMINSOY062B01_FLI
atcttgcacatcttttcattcttgcccagggatctaaatttcattgagcatacaagtaatattggttggaaagagcatcaaagagctaggcctatcattatagatccaggcttatatcattcaaagaaatctggtgtttactgggctaaagagaagagatctgttccatcttcgttcaagttattcacagggtctgcatgggttgtcctgacaaaatcatttcttgagttttgtgtttggggttgggataatcttcctcgaactctccttatgtattacacaaattttctttcatcccctgagggttacttccatacggtcatttgcaatcataaggactatcaaaacacaaccattaatcatgatttacgttacataaggtgggacaacccgccaaagcagcatccagtcttcttgaaattggagcattttgatgacatggtccatagtggtgcaccttttgctcgaaagtttaccaaggatgatccagttctcaacaaaattgataaggaacttttgagaagatcagatggtcactttacaccgggaggttggtgtattggcaatcctcttttgggaaaagatccttgtgctgtttatggaaatccaattgtagttaaacctaccttacaatcaaagaagctagaaaaactaatagtgaaactattagattctgaaaattttaggccgaaacaatgtaaatagtagtcactctgcaacgtgaaatttttatacacaattctattggcattttt

SEQ ID NO: 29545 - DNA, 745 bp, Glycine max
  Clone ID: UC-GMFLMINSOY062D11_FLI
gcaaacttgatccctttagagatgcagagattttgagaaccaaccttccttcgctgagggagtcctcgattcgcgttcttatcgcttgcaccattttcttgaagcaagctgctgctgcaggcctttgtcttgctcaaataggccaaatgatgactagggaattttgtgatggtgaagagtcaccaagtgaattagaaaatatttgcttgaaggtcaagactactagcgtccctcggggttccgacgataacgtgaataaccgcaaagatgaaactgaagaatgtgatgaagttggtggcattatttccttggccgacctcaaccaaggtgaatgggaagcgtttttggagggttttagtgagcttttgcatggattttttgagggtaagaggtgcaaaagcaaaagttggaacttaaatggaagttactgaacttcaggaagataggtaaccaaagcaagagatgaatcattctcgcttgtaactgtacattaacgccaagatatatattcttagtgtagtttgtatatatatatatgagaaggatggaatagcgattggttaattaggtggtaatgccatccattccattctgcaactttgtttttctttttccttggaaccttttacccttctttgtcaaaatagagttgtatcctattttagtatttttttttttttgaattttggggattcaaattgtaatgggatgcattgtttatagtaattcttcctaatattatgtt

SEQ ID NO: 29546 - DNA, 1576 bp, Glycine max
  Clone ID: UC-GMFLMINSOY062G02_FLI
ctaggtacaatgtcggggacggttttcacgtgatagcggcgcacaccgacagcccctgcctcaaactgaagcccaaaacggcgtcgtgcaagtgtaactattccatggtgaatgtgcagacttatggagctggcttgtggtacacttggtttgatagggatttgagtgttgctggaagggtcattctcagaactggccataattcttttgtgcataagcttgtcaaagtcgatagacccattttgcgcattcccacactcgccattcatctcgaccgcacagtgaacctggatggttttaaaccaaatctagagactcatcttcttcctttactctcaatgaaacctgaggacacttctttggaatccaactccaaggagaagaatagtgccttgtcatccaaagctcatcatcatcggctgcttatgcaggtactgtcagatgagttgaactgtgatgttgatgacatagtgaatattgaactgaatgtttgtgatactcaacctagctgccttggaggtggaaacaatgaatttattttttctggaagattagataatctggcttcaagttattgtgcattaagggcacttattgactcgtgtgaatctcctggtgacttagcaagtgaaaatgcaattcgaatggttgctttatttgacaatgaggaggtgggttcaggttctgttcaaggagctggagcacccaccatgtttcaggccatgagacgtatagttggtgacttaacaaataactatgttagtgaaggctctttttgagcgcactattcgccaatcatttcttgtgtctgcagatatggcccatggagttcatccaaattttatggataagcatgaagaactccaccgaccaaagctgcagagagtattggttattaagcacaatgcaaaccagcgctatgctactagtggaatcacaccttttctttttaaagaagctggaaaaatccataaccttccaactcaggaatttgcggttagaaatggcatgggatgtggatcaaccataggcccaatacttgcttctggagttggcatccgaacggttgactgtggaattgctcaactttcaatgcacagtataagggaaatatgtgcgaaggaagatatagacattgcttacaagcatttcaaagctttctaccaaagcttttcaagcgtagacaagatgctgactgtggatacctgagagttgcatttgctgaggaagtgttgatggtaaaatcagcacaatgtttttaagatggctttggattcaatctccgaacaagttgatttccctccttgaactcaagcagatggattatgccagaattttgttttgcaaatataactgcgttccgattctttctatttgcccaaagcgtacttgtaaatacattaaattaagacatgaattttcttgtcagcagttcttagattgttggagtaggtggtaagagtagcacaccatgaaatctgaatgcctattatcatgtttaacgttaattatcgcacgtgccacgatgccaggatggtatagaacttgaaatagataatcaagtattgggtggtgc

SEQ ID NO: 29547 - DNA, 1975 bp, Glycine max
  Clone ID: uC-gmflminsoy063a07_FLI
aaaacaaaaggtaagaacaagaagcacagaacacaggttgcttgaaccttacacgtcagcatcgttccgtgtggagtgttgagagatggggaattcgttcggatgttcggcctccggcgagaggcttgtgtcggcggcgagggacggcgacttggtggaagcgcagatgcttctgaactgcaacccgtgtctcgccaagtattctactttcggtggcctcaattcccctctccattttgcagctgccaaaggccacaacgagattgtggcattgttgctggagaatggagctgatgtgaattccagaaattattgtggccagacggcgttgatgcaagcttgtagatatgggcattgggaggttgtacaaacacttctactcttcagatgcaatgttatgagagctgattatcttagtgggaggacagctcttcactttgcagctgtgcatgggcatgtaagatgtattagacttgttgtggctgactttgtaccaagtgcactttatcaagctatacatgctggcacagatgttgacaggggtggtggatcaaatgcgaaagggaaacatgagcaaagtgccctgtccaagtttataaataaaaccgctgatggaggtatcactgcccttcatatggctgcactaaatgggtactttgattgtgtacaactgctgcttgatcttaatgcaaatgtgaatgctgtgacttatcattatggaacatcaatggatttaataggggctggaagtactccattgcattatggtgcttgtggaggcaatttaaaatgttgtcagatccttgttgcacgaggtgcaagtcgtctggctttaaattgcaatgggtggcttcctcttgatattgctaggatgtgggggcgtcattggcttgaacaattgctggcacccagttctgatgcctcaatacctacattctctcattcaaattacttgtccttgccccttatgagtgtgctcaacatagctagagagtatggattgcaatcatctccaacatcctctgatgagattgacttttgtgctgtatgcctggagaggccgtgttcagtggctgcagaaggatgtgggcatgagctttgtgtaagatgtgcactctatctttgctcaacaaacaatgtttcttctgaaatgcttggccctcctggctctatcccttgccccctatgtagacatggagttgtctcttttgttaagttgccaggttcccaagcaaaagaaaataaattacacgtgtctcttggcctgtgtaccccatgcatattacatccacgtgacctagaccagccatccctttctcatacaccagagattggaagaaatcgtgtagcttctgttccttcggagatacgctgccccgtcacttgcagtccatttccatctatggcaattcccttatgtacctgcaatgatggtccatgtccatcatttgaacctggagaagtagaaacacaagatggatcacctcatcactctcaagcatcaacagtggatcaggataaaatcgaagggccaagactggataaaacaacctgctctagcatgttttggggtagaagaagttgcagcagggagcaccaatgcaattcagaaataaatgcttgactcgtgccatgcttgtacgacacatactcgtgttgtggatactggatacactatatagatcagcaggatcagtccacagttgtcttattaatcagcctcaaatagtggaactcgtgatctctcttgaagagaaaaaactgctcttcggatcctcctcttggctgcacaggctgaatggtaggtgatagacacaattctggcgtttcagcaacacaaccaccctctggatgtcttttttttcctgatatttaaggagcgtgtgtgaaattagtttcgatttcgtgagatttttattgtgattattgtaattggatttcattttatcaaagaaaagttgtcttttttaagggg

SEQ ID NO: 29548 - DNA, 1506 bp, Glycine max
  Clone ID: UC-GMFLMINSOY063C05_FLI
cttgatcatggtcacgatgtaaccttaactgataaaaccaacacaaccacacaactcaactccatctccacgctttctcaactgagtcttctctgcaacttcttctataaaaaaccatctttgttttgtttcttcacttgtttcctcgtccaccttctgacttctgagtaagtcgtcttcttcagcgagacacgatccagaaattgatgaaggcattcataatgttaaactctactcctacaaacaactaagaaatgccactgaaaagtttagtccagccaataaaattggagagggtggttttggttctgtctacaagggacggcttaaagatggaaaagttgctgcaataaaagttctttcagctgaatcaagacaaggggtgaaggaattcttgacagagattaatgtgatctccgagatagagcatgaaaatttggtcaagttatatggttgctgtgtggaaaaaaataacagaatattagtctacaattaccttgagaacaacagcctatcacaaactcttctaggtggaggtcacaatagtctctactttgattggggaactcgatgtaaaatatgcattggggttgcacgtgggcttgcctatcttcatgaagaagtgaggcctcatattgttcatagggatataaaagcaagcaatatcctccttgacaaagatcttacacccaagatttcagattttggtcttgcaaagcttattccagcaaacatgactcatgtcagcacacgtgtagcaggaacattaggttatttggcaccagagtatgcgataggggggaagctaacaaggaaagcagacatttacagctttggcgtcctccttgcggaaattatcagcggaagatgtaacataaactcacgattaccaatagaagaacaatttcttctggagaggacatgggacctttatgagcgaaaggaattggttgaactggtggatatatcactaaacggggaattcgatgctgagcaggcttgtaagtttctgaagattagccttctttgcactcaagaatccccgaagctccggccatcgatgtcttctgtggtcaagatgctcactggaaaaatggatgttaatgacagtaagataacaaaacctgccttaatttctgattttatggaccttaaagttagaaggaacgaagaaagtagtattgatatgaagaattcatctatgtatacaacctcttcttcagacaaccatgatagtaccatgtcatttgccacaactactacctttgcagcaatatatgatgaaagcatgtaaacattgatcaataagatttgtcctttactaaaaaaaatgttttgatttgtttaggcatgtatctcatgtaaattttgcaaccttttagatactttttgagtgatttttttcctggatgtagtcctccatgactaggaagttgctatgtgctgttctgtaaatataaacggggtttgtgttcgatgataaatttgaagatcttttagttttct

SEQ ID NO: 29549 - DNA, 1322 bp, Glycine max
  Clone ID: uC-gmflminsoy063h08_FLI
aaatttgtgtaggtggatttgacacagcacatgcagctgctcgtgcgtatgatagagcagctattaaattccggggagtggaggcagacatcaacttcaacatcgaagactatgaggaagacttgaagcagatgaccaatttaaccaaggaagagtttgtccacgtacttcgccgacaaagcactggatttcccagaggaagctccaaatatagaggtgtaactttgcacaagtgtggaagatgggaggctcgaatgggccaatttttgggcaaaaagtatgtttatctgggtctgtttgacaccgaaattgaagctgcaagggcatatgataaagcagcaataaaatgtaatggcaaggaggctgtcaccaattttgatcctagcatctatgatagtgagcttaattctgaatcctcaggaggtgtagctgcagatcacaatttggatttgagtttgggcaattccagctctaaacataacaatagtcaaacatcggggaatcacttcgcaaattctgcaaccgatcagcatatgccacctgaatctaattggcggaatgggggaagcaagcctaaggttcatctggtaaatatacttccaaaaccatgtggtagaagcaacatagaagcctatgggcacggtgagagtgaaaccttgaggttgctaagccaaactcaccttcaatcccctaccaataaagaaatgcacagatatggtccgtataggtcgccagcagagccacaaaagcctcacaattttgcacatcatcttcaccaaccaagttttcatgttcctagcagcagcagcaatggaggccgtattggaagcgatctttcgttatcaatgtccgatcaacaacaatggcaagccgggcctccacatttgttagcaactgctgcagcatcatcaggattcccacagcaaattagaccctcccaaggttggctgcagaaaaatgggttccactctctcatgagaccctcatgaccatcctcaagattttttctaccatgccattttgcattttgaaaaataatctccccctactatttgttttgtgaacatgtacaagtgaaagtgaatgcagtttagattattattatgtaatgtccaacctcccccttctttaggaagcccatacataactgtaactttactattggggtgaaagacaagaagggatgaaaaaaaaatagggaaagccaatttgggaactcgctctggatttgttataggccagtcaaactaaccaacggacaaaatctttaactagatactaagatattctgggcgctgactaaagtttctgatctgatcttt

SEQ ID NO: 29550 - DNA, 1257 bp, Glycine max
  Clone ID: UC-GMFLMINSOY063H10_FLI
catgctttgaagttgttgaaaagactggaaatgatttgcattgcaagtgcatagatgctggtcttttcctgcctggagccaaacttagtttctggagagatggaaagcttgtgagagggaataacaagctccccactctatcaacaaaggattgggctgacattgactttggtatagcagagggagttgatttttttgccttatcttttgtcaatcatgctgattctgttaaggatctaaagaactacctctcttcaaagtcaaccaaatccataaaagttttggcaaagatagaaagctcagaatctcttcataaactggaggaaattgtgcgagcttctgatgggatcatggtggctcggggtgaccttggggtcgaaataccacttgaacagattcctacggtccaagaggatataatttatgtatgcagacaattaaacaagccagtgattgtagcttctcagcttcttgagtcaatggtcgagtatccaacaccaacacgtgctgaggtagcagatgtttctgaagcagttagacagtatgctgatgctttgatgttgtctggagagtcagctattggatcatatgcacaaaaagctttggcagtcttggatatggctagcagtagaatggaatcatggagtcgggaggaaaacagacaaaatcttgttaactaccatcaacttggagcatcattgccagaatgcataactgagcaaatatgcaattgtgctgttgaaatggccaacaaccttggtgtggatgccatctttgtgtacacaaagtatggacacatggcatcacttctatcacgcaaccgcccaaatcctcccatctttgctttcactaacgatgacagtacccgcatggctctgactttgcaatggggtgttgtaccccttctggttgatttgtccgatgatgctgaatccaacatctcaaagtctgtccaacttatgaaatctagagggttgatcagccaaggagatgttgttctagtggtctcagatgttgctccaacacgtgccactcctatggctttccagtctattcaggtgaagactattatctaaaacgcaaggctgcaaaaatattgaaggacacgtgtctgtgtattttataggcttgggataggatagtattgtattattggtttcttgtcttttttttttattggtttcttgtccttatgtaaaacaacaaagtttataaattccaaatggtagaactctagcaagttttgaaacctctttc

SEQ ID NO: 29551 - DNA, 1894 bp, Glycine max
  Clone ID: uC-gmflminsoy064a03_FLI
aaactactcatcactcactccaaacccaccacaccaccattattcatatctcattctctaacctttcactattccctctcattcactctctagctagtttcctcatcatcgtagaagaaccaatacttgtactctctcttactttttaaccatgtagaatgattcacctaaggaaaaattagtagcttcttgttgtgctttttattttgttttgttttgtgtagagataaatctgtttggtattgttttgtgttttatgaattatttgatgggtgaagagggagaagaagtggtgagaaagcaaggacaaaggggtgttgatggagataaatggtacttgtatagctgcttacaagactgtaaatattggtgctgtaatttaatacacgagactagcagttctttttcgatggttccttttgagtgaaaaaaaccttgtcttctcatcagctttctttggagagatcttaaagacgacattgactgctaacaacaataaagtggatcaatcattaaaggcttacttcttcttcttcttcttcttcttcttcttctaacaacaataagatcccatctttcccactcatgaagagacttaacagctcagattcttccactgccctcatgacaatttttccatcatcatcaacagaggaacatagtccgaggaacagccaccacatgtatggcagggagttccgatcgatgttggacggactcgacgaggaagggtgtgttgaagaaccggggcatcaatctgagaagaagcgtcgactaagtgtggaacaagtgaaggctttggagaagaactttgaggttgaaaacaagcttgaacctgagaggaaggtcaagcttgcccaagaacttgggttgcaacctagacaagtagccgtttggttccaaaaccgccgagccagatggaaaaccaaacaattggagagagattatggtgtcctcaaagccaattatgatgctcttaagcttaactttggcaccctcaatcaggacaacgaagccttacgaaagcagataaaggaattgaaatcgaggctgctgcaagaagagaacacagcaggaagcggtgtttcggtgaaggaagaagagataacaacgatgcctgcagactcagaagagaaaacgatggaacaaagtaagagtgacccaccttctgaaacctcgaacattaatcctagttcggagtcgtcggaggaggaccacttgaattacgaatgtttcaacaacaacagcgacgactgtgtcgtcggaggatccgccgcagcatcgctcttgcaagtggacttcatgaaagacggttcttccgacagcgacggatcaagcgcgatcttgaacgaagacaccatgtacttgccgtcttcgatgaactgttttcagttccagaaaccgtatcatcacgcgcagtacgtgaagacggaggagcacaatttcttgagcgccgatgaggcctgcaatttcttctccgatgaacaagcaccgaccctgcaatggtactgtccagaacagtggagctgagatagaagaaacatgggaaaattggaaaccgctttcagaaatttttgtttaatatgttgcacggttgtgttgaacacagctcattgaggtaaaagttgtaaaaaaggttgccacttgccaacagaggctgcttgaaggtagaaaatgaaacactgtgcagaagatagagttacgaaagagagaacagagatcaatggctgcatggcgtggggtcggagatgaaggatgacgattaaggttaattattactctcgatcgtgggtaatatcaataattattcaatcgtaaagcaaaccatgctgtaaaaaacaaatttcaattcaagtatagaataacgatgtagtactttatcaaacagaaaacg

SEQ ID NO: 29552 - DNA, 1014 bp, Glycine max
  Clone ID: uC-gmflminsoy064a05_FLI
agcatttccttcatccttatcctaaggattcagagaaaattatgctagcaaggcaaactggcttaacaagaaaccaggtggcaaactggttcattaatgcaagggtgcgtctatggaagccaatggttgaggaaatgtacaaagaagaatttggtgattctgagatgagcagcaatctattatcatcagagaacacactcaaagctccaagagatgatgttcaagcttctgacaataaaagggaagagtcccaggacaacttaataaacgttgatgatagtgttcagcatcatgggttgaagttagatcatgcctcggaattggacagagggatccaaagcagtgatcatggagaaaatgccatggatcctagaattggaaaattgcaaggtgaccaaaggttcaacatgaacaacagcaataacaatagtccttattatggtgatggctgcgtaatggcttctactcctgccacatatgatttaccagagttaggtaacattgctgtcgatggccacgtgtcgcttgcattggaattgaggaactgtgaaagccaaggatttggtgtgtcaaatgatgacatgcataaacgacataagaaaacattggcttcttccccagagactgatttgctagattaccatttcacagacccaggaaagcaacaaaacaaatttggcaatcctcacctattgcacgagtttgttgtgtgaagaagggttggagaaaattctaaagttttcaagggaactaaggaaatgtgtaccaccaaagtagtagatagatagacaaaagcctatgttgttgttgttaacttggttgctcattcttgttgtccacagttcataaaaagcgatgtaaatcatgaaccgtacaaaaaatatacacgtaggtatgtgtagatatattctcttgtaatatcgtggatggatgattggttgtatcatgtgcaggcaatttttgtaaggacaaggaacttatcttgtgcatcatgatgtataagggaatcttgtc

SEQ ID NO: 29553 - DNA, 2818 bp, Glycine max
  Clone ID: uC-gmflminsoy064a08_FLI
ggaactgcctgagaagttggggtcgaaatagagatttgtttcattggagttcatggacctgtcctctttgccggatttgtgaggcttgcagaaggactggtgatccaagtaagttcatgttttgcaaaaggtgcgatggtgcttaccactgttattgtcttcaacctccacacaagagtgtttgtaatgggccttatttgtgcacaaaacacgcaagatgtcacagttgtggatccaatgtccctggaaatggactaagtgtgaggtggtttatgtcatataccaactgcgatgcatgtggaagattgtttacgaaagggaactactgtcctgtttgtttgaaggtttacagagattcagaatcaacacctatggtttgttgtgatagttgccagctctgggtacattgccagtgtgacaatatcagtgatgaaaaatatcaccagtttcaattggatggggaatttgcagtataaatgtcctacatgtcgtggggaatgttatcaggtcaagaatcctgaagatgctgcccgagagatttggaggagaaggaatattgctgaaagagatttgattgctagcttgagggctgcagctggtttgccaactcaagaagagatattttctatttcaccattttcagatgatgaggatagtgggcctttaaaactaaagagtgaatctgctcgttcctttaagttctctctaaagaatttggccaatgactcaccaaagaagaaatcttctagcaaaaagactgctaagaaaaaagactcacagttatttatgactagtaaaattgacacacacaatagttgtgaaggacatagtgatattaaatctttgcatagcttagatgatgataagaatgatgatatacaatcccagagaaatgaaggtccagatgtttactcatcccctgctgctggaagcttgagtcaaactgaagcatcttttcctattgatcagccagggattttgaaacaaaagtttgttgatgaggtgatggtcagtgatgaagagaggaaaccaagagtagttcgaattaaaagcaacaaggcacttattccagatagtgaagaggaaagtggaaaacacagtcttaagactcagaatgtgaaagggaagaagttggttataaatttgggagcacggaaaattaacgtggctagttctccacggtctgatacttcaagctgccaaaaagatcaagatccggtgactgttaatggtatacatctttctttttgtttttcttgtcactatatatttgcttgagaagttgtaattgtgtgatttgtgtaaaagtggtatggggctgatttttcagacattacttctttctgcccatgaaatcagtgacacattttacacattatccaggagaaaacatttaattatcctgtcaaataattactattgtgcaacaaaatttatagtaattgtataatttgtaactgctttttgtgtgtatgtatatgttcttgaatggtttgattgctttatttggttttgcttctttcctcttttatttttgtgtgatttttccaattcaaattttctttcaggaaatgaagatataagccaatggaggaagggagacaagtttgcattagatagacaagatgacacagctaggcatattgacggtaaaggaaacaaagttgattctgggcaatcaaaaattttcagggtttcgggaagagaagggaatttgattaagctgggaaaagttaagccagatgtttctgaattcaacctgacctctggtagaggcaatatgtctgatgggcggataaaacatagtattgatggaatgattaatcaggttggaataaaagccccatcaagaggtgaaaggacatatttggggaagcagtcagaaggcagctctgatgcatatgagacagatgacaataataatcgtacaccttcacattctttgccaaaagactccaaacctttactgagatttaaattcaagaaaccgagcattgaaagtcaaaattcttctcaacaggaggaagagaagatgacaatcaagggccagaggtcaaaaaggaagagaccttcaccttttaaggagaaaacaacatttaatgagtctgaaggtgtaagtcaatcacgtcaagacagtgcaatggatgggataatggatgcaaactggatattaatgaaattgggcaatgatgcaattggaaagagagttgaagttcatcagacatctgacaattcttggcacaagggagtggttactgatgtagtggaaggcacttcaaagttatatgttgcattagacgatgggaaagtgaagaacgtggaactcaggaaacaaggggtccgttttgttcctcaaaagcagaagagatctaagacatgaactaaacttgtccaccctttgtgatcatttaatgtggatacttttcttaattgactttgaagatttttcatctttgaggcctcttactgaatttatgttcgtagctgctcacattgccgctgatttttgggtgaagcattcttgattggagcaaatttcagtcgaaagaattaaccatttacctcagtcctttttctgggctgcaggttcttgatcgcgagttagatttttgttccttttctacatgtatctgatttcaaagtagatcctacctgtgatgtataggttcaccatttctgtagaatagattagttaaggccaacgtgttagctgtatgattaatattggtagtatatttgtgaattccaggtttcatgatttgagatattatcttgaaagatgaaattatcgtcaactttttagagttgatggttgttc

SEQ ID NO: 29554 - DNA, 1509 bp, Glycine max
  Clone ID: UC-GMFLMINSOY064D01_FLI
gcaagccccactcaaccaccacacctctcctcgttcacgctacccctttctgctcttcttctacctttcaagttttaaaagtataaagatggcagagacattcctatttacctcagagtcggtgaacgagggacaccctgacaagctctgcgaccaaatctccgatgctgtcctcgacgcttgcctcgagcaggacccagacagcaaagttgcctgcgaaacatgcaccaaaaccaacttggtcatggtcttcggagaaatcacgaccaaggccaacgttgactacgagaagatagtgcgtgacacctgcaggaacatcggcttcgtctcaaatgatgtgggactggatgccgacaactgcaaggtcctcgtcaacattgagcagcagagccctgatattgctcagggtgtacacggccaccttaccaaaaaacctgaagaaattggtgctggtgaccagggtcacatgtttggctatgccactgatgaaacccctgaattgatgccattgagccatgttcttgcaacaaaactcggtgctcgtctcaccgaggttcgcaagaacggtacctgcccttggctgaggcctgatgggaagacccaagtgaccgttgagtattacaatgacaatggtgccagggttccggttcgtgtccacaccgtgctaatctccacccaacacgacgagactgtcaccaatgacgaaattgctgctgacctcaaagagcatgtgatcaagcctgtgatcccagagaagtaccttgatgagaagaccattttccacttgaacccttcaggccgttttgtcattggtggccctcatggcgatgctggtctcaccggccgcaagatcattatcgatacttatggaggatggggtgctcatggtggtggtgctttctccgggaaggaccctaccaaggttgataggagtggtgcttacattgtgagacaggctgctaagagcattgtggcaagtggacttgccagaaggtgcattgtgcaagtgtcttatgccattggtgtgcctgagcctttgtctgtgtttgttgacacctatggcactgggaagatccatgataaggagattctcaacattgtgaaggaaaactttgatttcaggcctggtatgatctccatcaaccttgatctcaagaggggtggaaataacaggtttttgaagactgctgcctatggacactttggaagagaagaccctgacttcacatgggaagtggtcaaacccctcaagtgggagaaggcctaagtaattcattccactgctctatgctggaagttttttgagcgttgcccttataatatgtctaatatccataactttccacgtctcttactctgtgtgtttctctcctcttcctcctattttgttatttgtatgttcttttgtaattttttacgtgatcaactaaaaacatgtactctctgtttgtatgtatgccctaccaatgtgtctcttaatatcaatatcaaaaagagagtgttcaagtt

SEQ ID NO: 29555 - DNA, 1206 bp, Glycine max
  Clone ID: UC-GMFLMINSOY064D10_FLI
gctcaaatctgtcaagaaatatcaatttcattgaacacacacgcattgctggttggaaactgtgagtgaattgctctaaattatattctgcatgtttttctccccttgcagttgattgtgatttccttgtattactgcttatatgcaggaaccaaagagcaagacccatcattattgaccctgctctttacttatcaaagaaatctgatttagcattgactactcaacgaagaacacttccgacgtcttttaaactgtttactggtatgtctatatctattatctataaacatttataaattttattttctactgcaaatttaaagtaagatgcccttttaaggtttagcagtcctagggttataaaatatctagctactaattggctatcaacatgtcagaatcctatatttttctcttatgttatgtgaacaggctcagcttgggttgtactgactcggtcctttgtggagtattgtatatggggatgggataactttccacggactatgctaatgtattacacaaattttatctcctcgccagagggatattttcacactgtcgtttgtaacactgaggaattccgtcacacggcggtaaaccatgatcttcactacattgcttgggacactcctccaaagcagcatcccatctctttaactatgaaggactttgacaaaatggttaaaagcaaggcactcttcgcgcgcaaatttgcaaaggaggatcctgtgctagacaagattgacaaagaacttctggggcgcacacatagattttcacctggtgcatggtgtgatgggaacacagatggtggggcagacccttgttctgttcgtggcaatgatacaatgtttaggtcaggacctggtgctgagaggctacgtgagctgcttcaggtgctgttatctaaagaatctctaagcaagcagtgtttgtgacaaaggggtaccctccaagtaggatgaatgatgtcaagtgtacataagtgtggttatagatcatatatatctgatgtaaaaggtctgaattttgtgttcaatataggttctcatattaacaatcaacaagcactcacaccagcagttttggtgcttgtttcggtctaggcacgcttttggttgcactgccgggcaaccatttatgcaattgcaacactttttgttgagttacaaaaaaaggcaattaaatttcacagtggac

SEQ ID NO: 29556 - DNA, 1140 bp, Glycine max
  Clone ID: UC-GMFLMINSOY065B03_FLI
ctttggaagcgccaatggtttgctgttgggtggattgatcataacagcaaatattgcaccaaagttgttgattccggaagagcaaatcctgtatggagaaccaagtttgtcattcctgttgatgactcagcgtcaaacatccaagatttggcactgaacgtggaagtttacagtatagaccctgtattcttcacagaaaaacttcatgggtcagcaacagtttttctcagagagtttcttgtcatgaaggtaaagaattctgaggggtcaaagccaaggcaagaggaaattggaagctaccaattacgaaagaagaaatccagcaaaccaagaggttgcattgatattttaattcgcatttctgacaaaaagaaagagccaaattcccaatcaggtaacaaggaagggattttgctcttagatgatggggatggtactcgattgaccatagaggaaggaataaggcaagcctatccacagaagcctcaagtttcaattcatcagccagaaaaagatcatgtacaaacaaacgtcccagactaccattcactaccatccaccactacaaactattatgatccatatgagggtgaaacaagctaccatgaggtggatgaaccaagctaccgtgaggtggctggaccaagctatctactgcctagaacaataacgcctcctccaccacccccaccatcaaatgttggctatattcccacttttctcccaagaaatgatggcctgtctccaagctacagagagatgtcaacatccagggcagcccttggtcagagggtacctgcaggagttgcaatggggttaggtgctggagcactcgctgcgggtgctgtaatatttggcgatgacttcatgtcaggatttgatgttcctccggacctcggagattctggtttcaacctagaaatggatccccctttctgaacaagcattgatcagttttaagtaattatatttggctgcacacagcgtaccagcaaaacctacatgtcattgtatatcggttccactttcatattcttacgtgtaattctgatataaaaaaatgctgagtttctttgatagggctgaaagataaagttgtttactacttttctttgtgactggcaatattttctttcagtg

SEQ ID NO: 29557 - DNA, 978 bp, Glycine max
  Clone ID: uC-gmflminsoy065b12_FLI
agaagtacattgatattgtgactgagacatatcctacttggcttgatggttcgtctttggtgagccaaaaagctgtttcttcttgtgccctcgatggatgaataactactttcatcaaaaggaggaaaaattatttatagaatgaaagtaaggaataaaagtggggacagtggtggccatggttcagaggctaagggacctatgggcccagtattcagtacttttgtttatgaagaggaatatggcagtgactcacaaatggaagccattcatggatttgccagggaaggagatatggctaatctgctcaagtgtattgaaaatggtgtttccatgaatttaaaggacagtgagggccggacaccattacactgggctgtggatcgtggccaccttaatgtcacagagttgcttgttggcaagaatgctgatgtgaatgccaaggataatgatggacaaactcccttgcattatgctgttacatgtgagagagaagccatagccgagtatttattgaagcataatgcagacatatattcaaaagataatgatgggagttcaccacgtgacatctgtgagtcaaactggccctgtatgcagcatgtggggggagaagtaaattgattgattgattgtttgcttgttgctgcttctggccaatacaaccttttacccaaatccctataggatgttcgtgtctatataacttgattttttttgtccttactcatggtgtatacacccttttcagtctagtgtacgctgtacgcctatgcaccgcttaggaggttagttaattaggttgtattctgttctattattgtttcctctgcttaactctttaattctggctctcatttcttatatatttcatggataaactagaaatagtgacagggaaagggtatcttcaacgatatcctttcctcggaaaaccttctacccttctattgaaggtgatatagattttacagggtt

SEQ ID NO: 29558 - DNA, 1840 bp, Glycine max
  Clone ID: UC-GMFLMINSOY065C06_FLI
gttcgctaaatctgcatcaatcaatcaatctttgtcttcctcacaaccaccaccattctccgccggtcaaaccaccgtttcagtggcgggaaccgagcttgaccgttattaggtgcatccctgtttcgtttagacatggaggtttccgtttcgtcgccgccgagaaagtccatagcggagaaggtattcggaggttactataacgggaacaatagccacaaaaaacgtggcagtgaggctcacgatgatgacagcgatggaggcatggaactcatggagattggcgcccaaaggaccaagaacgtcttgattctcatgagtgatactggtggcggtcacagagcttccgctgaagccatccgtgacgcctttcaaattcaattcggtgacgaatacaggatttttgttaaagatgtttggaaggaatacactgggtggccgttgaatgatatggaggggcaatataagttcatggttaagcatgtgcagttatggaatgttgcgtttcacagtacttctcctagatggattcactctgtgtatttggctgccattgctgcttactatgccagggaggtggaggcggggctgatggagtacaagccagatatcatcatcagtgtccatcccttgatgcagcatattccattgtgggttttaaagtggcaaggtttgcagaagaaagtgatttttgtcacagtgatcacggaccttagcacatgccatcctacttggtttcatccttgggtgaatagatgttactgcccatcacaagaggtggccacgaaagcctcacaagatggccttgaggaatctcaaattcgagttttcggcttgcccattaggccttcttttgccagggcagttcttgtgaaggatcaattgagagaagaactcgggttggatcacaacttgcaagcagttttgctgatggggggtggtgaaggaatgggccctgtcaagaaaactgcaaaagctctcggagaagcacttttcgataaggaagctgagaaaccaattgggcagttagtcatcatatgtggccgtaacaagagcttagtatctacccttgaatctcttgaatggaagattccagtaaaggttagaggatttgagacccagatggccaaatggatgggagcttgtgactgcatcataacaaaagctggaccaggtacaattgcagaagcattgatcagagggcttcccataatcctcaatgactacatccccggacaagagaagggtaatgtgccttatgtggtaaacaatggagctggcgtcttcactcgtagtcctaaggaaacagcaagaattgtggccgaatggttcaccacaaaatcagatgagaggaaaacaatgtcagagaatgcacttaaactggcacagccagaggccgtgtttgacatcgtgagggacattcatgagcttgctgagcaacgagagccagcaaactttccatacttgttgacctcatcatttactagcctaatctgattgattatttgtgcttctttcacgttagctttcttccattaaaattgacatgtagagttagctttattgattatatcattctttatcctagtgatttggtttaactgtgagctacaaaattgtggtaaaaccaagctcaggttttataataattaaagatgcttgccaggtgatgggttgtctgtaattgcaagaagggttaacattctactaaaaactgtctaatgatttttttttcctatttttttctctggaattgtatttagcactaaaaactggctttgtaattggcttctttatcaggcaatgtaaattgtcaatggtcatcctttggaagaacgcc

SEQ ID NO: 29559 - DNA, 1612 bp, Glycine max
  Clone ID: UC-GMFLMINSOY065E09_FLI
atgagatcaagatttggattcgttgcttactctggagaaaaaaacaatctgaacccaaattcgcaggtcgttgaaagttgaaatccaaggagaaacacaaaagaagaagaagaaaaaggaagaaaccagcgtcacatcatcgtggttctgcaaaatatatttttctttttgggtgaataaataaagggttgtgcgtggtggtgttttgttgtgtttgtgagtatctgaatccgcgcagttaggtttgtgattgattgattgatcaatcaaagagagagagagagagggaatgggagatcaagtggagggaacggtgcagaacgttctggaacaggagactctgaagtggatcttcgttggtggcaaaggcggcgtcggcaaaacgacatgcagttcaatcctctccattctcctcgccaccgttcgctcctccgtcctcatcatctccaccgaccccgcccacaacctcagcgacgccttccagcagcgtttcaccaaaacccccactctcgtcaatggcttttccaacctctacgccatggaggtggatcctactgttgagcatgaggacatgggtggcgctgatgggatggactccttgttctccgagctcgccggcgcgattcccgggattgatgaggccatgagctttgctgagatgttgaaattggtgcagacaatggattattctgttattgtatttgatactgctcccactggccatacactcagactattgcaattcccatcggttttagaaaagggtcttgcaaaagtgatgtctttgaaaaataaatttggtggtttgtttaatcagatgacccgcatgtttggcatgggtgatgattttggagatgatcaaattcttgggaggcttgaaggcatgaaggatgtaattgaacaagttaataagcaattcaaagatccggacatgacaacctttgtctgtgtgtgcattcctgaattcctttctctatatgaaacagaaagattggttcaggagcttacaaagtttgaaattgacacccacaatatcatcatcaatcaagtaatctttgatgatgaagatgttgaatccaagttacttaaagcaagaatgaaaatgcaacagaaatatctggaccagttttacatgttgtatgatgactttaacattaccaagctgccactgctcccagaagaggttactggggttgaagctctgaaagcattttcaagacattttacatcaccatatcaagccttatgcagtaaaggagatccagtagaacggttggagagtaaagtatcagcattacagcgccagttacacgaggctgaagaagagttggagagactcaaaagtggcaattaggtttgatggtatccattcatgaataatgtcattgtatgcctttttggttcacattattttttagcttaaatttgataaagcatctttttctttgttgggctgccaacacaagtcattccctatatgctttttatttaattattgtcacagtgagctttcttataaccccccaaaaaatattgctgaggttagtctaatttgtttcatgaatattctttacttgtatctttcatattatgagtagaatagtttcttatc

SEQ ID NO: 29560 - DNA, 1505 bp, Glycine max
  Clone ID: UC-GMFLMINSOY065G06_FLI
tgtggtttcaaaaaggcccatgaaaggacatggaagggaaatgattcagttgggtgttcccattgctgatgcaccaccagatgtggacaatgtaacaggaatctccaaagataagaaagtagaatctatcccttctttgttccaagatatcattgagcgcctggctgcctcacaagtgatgactgtgaagcctgatgcttgcattgtggatttctttaatgagggtgagcactcacatcccaacaattggcctccttggtttggaaggcctgtttatacacttttcctgactgaatgtgacatgacttttgggagaataattgtctcagatcatcctggggagtttagaggtgctgtcaggctttctcttgtacccgggtcccttctggtgatgcaagggaaatcaactgatttcgccaagcacgctcttccttctattcacaaacaacgcataatcataaccttcacaaagtcccaaccaaaatgttccctgccaaatgattctcagcgacttgctccaccggcagcgtcccattgggcaccaccacagagcagatctcccaatcacgtgcgtcatcaattaggcccaagcattatcccacggttccagcaactgtagtactgccagctccatccatacatgcacctccaaacagtatgcagccattgtttgtgccagcaccagttgcacctcccatgtcatttcctacacccgtaccaatcccacctggttccaccggatggacctcagctccttcgaggcatcctcctcctcgaatccctgttcctggcacaggagtcttcctccctccacctggctcaggtacttcatctcaacacttgccatgtaccgtacctgaagtgaacccaagtgtggaaactttgaccgtgtcgggaaaggaaaatgggaaatccaatcataacacaaattcttcaccaaaaggcaaaatggatggaaatatacaaggggggcaagaaagcaatggaaatgcagatggaactcaagctgaacaagctgtagtagagaaagaacaggaaagcaatgacacaacggctgcaaaccattgagctatgccggattagagagagggagagagatgaaaagcttatcaaaggaaagaggtagctacggatttaacgagtttggagcaaatgtaaagagcggcaacatttgacacgacaagatacaattctgcaaatgagagaacaatggaaggaggcagaactttttggttcacttttgatcctttgtttgctccattccttttttgttgtcttattatatttaatttttacagcaaggttaaccccattcttagttcagattttgatttttcctatctttgaattattttacgtgtttagcggttggtttttgttgtggtaatgctttcttctaccatttgttaaacaattatgatgcctgcatggtgagatagaatctgaggactcttgaattaaagtagaagcaggcaaaataatccattgaaaatgtttaaatattt

SEQ ID NO: 29561 - DNA, 1754 bp, Glycine max
  Clone ID: UC-GMFLMINSOY066A05_FLI
gtgggaaatgggtcgctccgatcccagaaagatcatattctccgccaaaatgggactcgctctcattcttctttcgcttttgatatttctgaaacagccctttgaggacattagtaaacactccgtttgggccattctcactgtcgttgtcgtcttcgaattcagcataggggcaactcttagcaaagggcttaacagaggattggggactttgttagctgggggactagctttgggaatgggacttttatcaaaattggctggaaaatgggaagaaaccattatagttattagcattttcactgcaggattttgtgtcacatatgcaaaacaatatccaacaatgaaggcttatgaatatggtttccgtgtgttcttgatcacctattgcttcattattgtatcagggtatcgttcaggagagtttgttgaaacagctgtagatagatttttgctcattgcactgggtgctgctgtggctctgggggtaaatgtatgtatatatccaatctgggctggtgaggatctacacaagcttgtggcaaaaaatttcgtgggcgttgcagcatcattggaaggtgttgtaaataactatcttaattgcattgaatatgagagagtgccttcaaaaattctcacgtaccaagcttctgaggatgtggtttacaaaggctacagatcagctgttgaatctacaagcacagaggattcattgatgggttttgctgtctgggagccacctcatggtcgatacaaaatgcttagatatccatggcaaaattatgtgaaagtaagtggagcactaaggcattgtgcgtttatggtcatggctatgcatggatgtatactttctgaaatacaggctccacctgagaagaggcaagtgtttagtagggaggttcaaaagctaggttctgaagcagccaaaattctacgagaacttgggaacaaagtaaaaaagatggagaaactaggcgaggaagacattctttatgaagttcacgaggcagcagaagaattgcaacagaagattgacaaaaaatccttcctccttgtaaattcagagagctgggaaattggaaaccgtccaagaggggagggtgatcctcaagacctcttgaacatgaatgaagaaagacactttttggagtacaagtctctcagtgaagctgtgcttgacctcagaactgccaaagttccaagaagttggggagaactagcaactcctgacaacaaacctgcagcacctataggtgttggtgatgaaaacttgttcaagaaacagatatcttggcctgctcatatttcatttaaagcagatgcagggacaagagaggaagaatctaaaacctatgaaagtgctagttcattgtctctagcaacatttacatcccttcttattgagtttgtggctaggctccagaaccttgtggattcttttgaagagttaggtgagaaagcaaaatttaaggaccctcttgagcaagcaccaccaacatctggtgggttttggaacaggttgtgtaattgtttgacattcaaggactgagatatgactgcatatacatatcatggactgatctaaattaaatgccggtatcccaaaatctgtgtgtgctcttctgattctttagataatctgaactcttcctcagagtatttattcttcattggctttgcctgccaaggacaactcacctcttgttaaatcaacaactgccaagcgctattactgatactaactaaattttgac

SEQ ID NO: 29562 - DNA, 2926 bp, Glycine max
  Clone ID: UC-GMFLMINSOY066F03_FLI
ggccctttacctctcgccgtcgcctccatgccgctcctccgccacctccacctcggcggcaacttcttctccggccagatccctcccgagtacggcacctggcaacacctccgctacctcgccctctccggcaacgagctcgccggctacatcgccccggagctcggtaacctctccgccctccgcgagctctacattggctactacaacacctactccggcggcatccctcccgagattggaaacctctccaacctcgtacgcctcgacgccgcctactgtggcctctccggcgagattccggctgagctaggaaagcttcagaatttagacacgctgtttcttcaggtgaattcgctctccggttctctcacttccgagctggggaacttgaaaagcctcaagtcaatggacctttccaacaacatgctctccggagaggttccggcgagttttgcggagctgaagaatctcactctgttgaacctgttccggaacaagctccacggcgcgattcccgagtttgttggagagttaccggctttggaggtgttgcagctttgggagaacaacttcaccggaagcattcctcagagtttggggaaaaatggaagactcactctcgttgatctttcttcgaacaaaataacggggacgctacctccatatatgtgttatgggaatcgtcttcagactctgataactctcgggaactatttgttcggtcccattcctgattcgcttgggaagtgcgagtctctgaataggattcggatgggagagaactttctgaacggttctattccgaagggtctatttgggcttccgaagcttacgcaggtcgagcttcaggataatcttctcacgggacagtttcccgagtatggttccattgccactgatcttggccagattagcctctctaataacaagctctctgggccgttgccatccaccattgggaacttcactagcatgcagaagcttcttcttgatggtaacgagttttcaggtcgaattcctcctcagattggtaggctgcaacagctttcgaagattgattttagtcataacaagttctcgggtcccattgctcctgagataagtaggtgcaagcttttgaccttcattgatctcagtggtaatgagctctctggtgagattccaaaccagattacttccatgcggatattgaattatctcaacctttcaagaaaccatctagatgggtctattccaggttccattgcctctatgcagagtttgacttctgttgatttttcatacaacaatttctctgggttggttcctggcactggccaattcggctactttaactacacctctttcttagggaaccctgaactctgtggcccatatttgggtccttgtaaagatggggttgccaatggccctcgccaaccccatgttaaaggtccactatcttcttcattgaagcttttgctagttattgggttgcttgtgtgttccattttatttgctgttgcggcaataatcaaagcccgggctttgaagaaggccagtgaagctcgggcatggaaattaaccgcgttccagcgcttggacttcactgttgatgatgttttggattgcttgaaggaggacaacataatagggaaagggggtgctggcattgtatacaaaggggcaatgcctaacggggataatgttgctgtgaaaaggttaccagctatgagcagaggatcttcccatgatcatggtttcaatgctgagattcagacattggggaggattcgacacagacacattgttagactgttgggtttctgttcaaatcatgagacaaatctcttggtgtatgagtacatgccaaatggaagtttaggtgaggttcttcatggcaagaaagggggccacttgcattggtacacaaggtataagattgctgtggaggcttcaaagggcctttgctatctacaccatgactgttcaccactcattgtccatagagatgttaaatccaacaacatccttcttgattccaattttgaagcacatgttgctgattttgggctcgctaaattcctgcaagattctggagcatctgaatgcatgtctgctattgctggttcttacggatacatagctccagagtatgcctacactttgaaagttgatgagaaaagcgacgtgtacagctttggagtggttcttttggagcttgtaacaggcaggaaaccggttggcgagtttggcgatggtgtggacattgtacaatgggtgagaaaaatgacagactcaaacaaggaaggagttctaaaagttcttgatcctagacttccctcggttccacttcatgaggtgatgcatgttttctatgtagccatgctgtgtgttgaggaacaggcggtggagaggccaactatgcgcgaagttgttcaaattctgaccgagcttccaaaaccaccaagctccaaacaaggagacttaacaatcacagaatcctctttgtcttcatcaaacagtttagagtctccaaccacggcatcaaaggaacccaaagatcaacatcctcctcagtcgccaccaaccgatctacttagcatttgaattttgaagtgctcagttggggacagggttgtgtttcatatttatttcgtttgggttgtgatagcttatcttatctacttgctttcttcagttttcttttcttcatttggggtagggttttcttttaaggtgttaaatgtttgaatgtttattctctctttaatgtttttgtaatttgtacagtaggattggtggtgggagtatttttcttatataaagtctttgtcttcatcatgtagcacttgttttatggtacgtacagcgctgttgctgttctgatcctgcaccggggaacagtgtaaacatcgtgagaaagttttttttattttatttt

SEQ ID NO: 29563 - DNA, 1674 bp, Glycine max
  Clone ID: UC-GMFLMINSOY067A01_FLI
cttaaacaatcgggcccctattactaactttattcctttgagtttatcaggcaatagtggaaaataagctgtttatgataaattaccacgatgtctatgttccatttcttgacgagatcaatgcccttgatggtagaaaatcctatgctacccgcaccatatttttcttgacaccacttggcactctcaagcctattgctatagaacttagcctcggaccaagttccggatggaaacgtgtagttacccctcctgtggatgcaactacaaattggaagtggcagcttgccaaagctcatgtttgtgccaatgacgctggtgtgcaccaacttgttaaccattggtaagcaaacccggaagcaccatacatataaaatatttaacttcaaattacatgttgttggttaaattagccaatttttttgttcggtaaaggttgcgcacacatgcctgcatggaaccatttatattgtctgctcataggcaattaagtgcaatgcatcctgtttttaagctgttggatccacacatgaggtacacattagatatcaatgctttagcccgtcagaaactgatcaatgctgatggaatcattgagtcttgttttactcctgggcggtactgtatggagatcagttgtgctgcatacaaaaacttgtggcgctttgacatggagggcctccctgcagatcttatacgcaggtaaaagtagatgaaaatgataattctttctctttctctttctctctctcagttgaatgaattccattccatccctactggctggtgcaggggaatggcggtacctgacccaacacaaccaaatggtgtaaagctcctaattgaagactacccttatgcaacggatggacttctgatctggtctgcaattgaaaactgggtccgcacctatgtgaaccactactaccaccattcaaattcaagcctgatttgcaatgacaaagagctacaagcttggtactctgagtcaatcaatgtgggccatgccgatcttaggcatgaaaggtggtggcccacattgaataatagcgaggatcttgtgtctatccttaccaccttgatttggacggtatccgcacagcatgcagctattaattttgggcagtacccttacggaggttatgtgcccaatcgtcctccgttaatgagaagattaatcccagaagcagaagtcgagagtactagtactgaatatgccaatttcttagctgatccccaaaagtttttcctaaatgcgttgcccagcgtgttacaagctacgaaatatatggctattgttgacatcctctctacccactcatccgacgaggagtatttgggagagcggcgacactcatccatttggtcaggtgatgcagagatcattcaggcattctatagcttctccacagagatcagacggatagagaacgagattgagaaaaggaaccgtgatccaacactcaggaaccgttgtggcgcaggggttttaccttacgagttacttgcacctacctctcaacccggcgttacatgtagagggattcctaatagtgtgtccacgtaaagtaaactaaatgctcagcctcaatacttgtcagagtatactaagatttttctgtaatcaagccattagacattaattcacacactaattctgaacttggatctagt

SEQ ID NO: 29564 - DNA, 1500 bp, Glycine max; identical to SEQ ID NO: 29422
  Clone ID: UC-GMFLMINSOY067F04_FLI

SEQ ID NO: 29565 - DNA, 1081 bp, Glycine max
  Clone ID: UC-GMFLMINSOY067G12_FLI
gggttttcaccgagcatttgcattccgcattgaatatggctgaggctacacaatctaatgctgagttgttggagtggcctaagaaagataagcgccgcttcctgcatgttgtgtatcgtgttggtgatcttgatcgcaccattaagttttatactgaatgttttgggatgaagcttttgaggaaaagagatattccagaagagaaatatgccaatgcttttcttggatttggccctgaacaatcccattttgttgtggaattaacatataattatggggtgacctcatatgatattggaactggctttggacattttgctatcgcaactccagatgtttacaaattggttgaagacatccgggctaagggtggaaatatcaccagggagccgggtccagttaagggtgggaagtctgttattgccttcgtgaaggatcctgatggttatgcttttgagctcattcaaagatcttccacccctgagccattgtgtcaagtaatgcttcgcgttggtgatttagagcgctcaattaagttttatgaaaagactttgggtttgagggtggtaaagaagactgatagacctgaatacaagtatactgtagctatgcttgggtatgcagaggagcatgagacaactgtgttggagctgacatataactatggtgtcactgaatacaccaagggaaatgcttatgcacaggttgctattggtactgatgatgtatacaagagtgctgaggttgtcaacatagtcacacaagagcttggagggaagattactcggcaaccaggaccagttcctggccttaacacaaagatcacttctttcttagatcctgatggatggaaaactgttttggttgacaatcaagattttctgaaggagctggagtaaagagttctggcttttcatagtactaatgctattatatgaataagtgatcagctcgtgtttatcagtgaagtagtagtgttcagtatggtttctctgatgtgtttgcctgtttggttgagattctagacagtctacagtgatatccaacagtatttcaatatatttggtaaaagttggagaat

SEQ ID NO: 29566 - DNA, 1467 bp, Glycine max
  Clone ID: UC-GMFLMINSOY068H03_FLI
gtttttcagggtagggaagctaaaaactccatcttccctccctcttctccccccccccccccccctcctctctctctctaaaaaacatgatttttaataaagggtcaacgcattctaaccttgactgtttcgtacggtgtaccacacctgtggttcaatcccagtttcttccaaagtcggagattacaagccttaaccgtttgtggcatccgtgggagagagaaagcgtggaatattttacgttgggggatctttggaattgctacgacgaatggagtgcttatggagcaggagttcccattaccttgacaagtggagagacacttgtgcagtactatgtgccttatctctccgcaattcagattttcactagcaatagtttcagggaagagactgaatcaggtgactgtgaaacaagggattcctatagtgattctttcagcgatgagagtgagtatgacaaggtatggaggtgggatggaacttcctcagaagatggaggctccgagcaagactgtctctggcatttcagtgatagattgggtcacctttattgccaatattttgaaagagcaactccgtatggaagagttcctcttatggataagattactggattagcacaaagatacccggggttgatgtcattaagaagtgttgatctttcgccagcaagttggatggccgttgcgtggtacccaatatatcatatccccatgggaagaacaattaaagacctttctacatgcttcctcacttatcacacgctttcatcttcatttcaaggcatggaccttgacgatgacatagaaggtggccacgaaaagaaaaaggaaggggaaggcatagcactgccagcatttggtttggcaacttacaagatgcaaggggggaacgtgtgggttgcaggaaatcgtggtcgggaccaagaaaggctattgtcactattgagtgtggcagattcatggttgaagcaactcagggtccaacatcatgactttaatcacttcatgggcattcggcatggctaaaaaaaaaaagggttaatccactactctacaaagaattcgcacttgcaaagctaaaaatcatccttttctcggatgtttgattttatgtgcactttcttggaccattaattgcaccatattttcttcttctttttctttttttcttttctcctgaggggaagtgtgagaaatgaggatatataagtatgtagtagtagttgttgttggcctttaacccttgagagcattttaggaccaaaaacccttgttaggttccaaccaagcaaaaagggtgtgtgtgtgtgtatgaattgactcctttcaacagcctctcatgaagaggtaattgtatgtagagagataggtgagggaggtcagagggaaagaagtgagagtatattgtgtattgatcacaatggttaatggatgtgacaaatgatgtagaatcaggttgcac

SEQ ID NO: 29567 - DNA, 2179 bp, Glycine max
  Clone ID: UC-GMFLMINSOY069A08_FLI
ctttgtttgaactttcactcgcagcttcttattcttgtgatttaagttcctctactctcagtccaagctattgttttggtgggtgtatatcaaggtggagtgatatataaaatggaggagagaccagaagcagaactgatatctataccggcgacacctagggtgtcgacgccggagatactgacaccgggacagaggtcgccaagagcagcatcaaaggaaggaaaatcatggaccccaacttcttttatatcaccaaggtttctgagtccaatagggacgccaatgaagagagtgcttgtaaacatgaagggttacttggaggaggtgggacaccttaccaaactcaaccctcaagatgcttggcttcccatcaccgagtctcgcaatggaaatgctcactatgctgcatttcacaacctcaatgctggtgttggcttccaggccctctttttgccagttgcttttgcttatcttggctggagttggggaattctttccttaaccatagcatattgttggcaactttacacgttatggattttggttcagcttcacgaagcagttccaggtaaaagatacaacagatatgtggagctagcacaagcagcatttggggaaagattaggagtctggcttgctctcttcccaactgtttatttgtcagcaggaactgcaacagctttgattcttattggaggagagaccatgaaactgttcttccaaatagtttgtggtcccacgtgtacctcaaatcctttaaccacagtggagtggtacttggttttcacttccctatccattgtcctgtctcagcttccaaacctcaattcaatagcaggactctcactcataggggcagtgacagccataacttactccaccatggtttgggtcctctctgtaagccaacaaaggccaccctccatctcatatgaacccctatcattgtcacaaccttctgcttctgtatttcttgccatgaatgcacttggaattatagccttttctttcagaggccacaatttggccctagaaattcagtccaccatgccttcaacttttaagcacccggctcgtgtgccaatgtggaaaggagcaaaggttgcttatttcttcattgcaatgtgcctcttccctattgctattggtggcttttgggcctatggcaaccaaatgcctccaggagggattctcactgctttgtatgcatttcacagtcatgacatctcaagaggaatattagccttagctttccttcttgttgtgtttaactgcttgagcagtttccagatatactcaatgcctgcttttgacagttttgaagctggctacaccagtaggacaaaccgtccctgctccatatgggtgagatcaggctttagagtcttctatggatttgtctccttctttataggagtggcacttcccttcctctcaagtcttgcaggtttgttaggaggactcactctcccagtcacttttgcatacccttgcttcatgtgggttcttataaaacagccaccaaaatatagcttcaactggtacttcaactggattctcggttggttgggggttggttttagcttggccttttccattggaggtatttggagcattgtcaatgatgggctcaaatttaaattcttcaagcccaattaaaattttcaataataggccatgcaaatgcagatgcactatatagtaatgctactctttaggcgttttccaatggtctaatatttagtgcatctcttctgccctaagctatctttggtggaagatttggttctattgtggtggtaaaaggaaaaccatataatgaagagaatgatccttgcatgttaagtggagacagggttagaccttgcaagttactcaagtttaaagaatatctctccatgccttcaccgttcctcttgatgtggttctcttatctcttggtgctatagcttgttatgtttagaacaattggtggtttgctcttattaatttttgtaattgtagagacctccagaacaaaaatcgtcaaagtctttcaaattgtacgttgtaacccgtgtggtttcaaaagtgaatttctcagcaaatctatcccctcctttcatttttttttattttttatctttgtattggtgactattaatttggttaatgagaagcagataaatcttatatc

SEQ ID NO: 29568 - DNA, 550 bp, Glycine max
  Clone ID: UC-GMFLMINSOY069B03_FLI
aaaacactcaaaagaggagaaaaaaagaagaaaagaatggtaacaatagctggtggtgtgagtctttcaagccctagcagggtatttgctaatgctaagggaatagactcagcacaaaaggcccaggccgtgaggtttccagctctgtcgaggcccattcaaaagtggcctggtttggtgaagacccggcccgttcgggcgacgccggagaagatatcggagaaggtagaggagagcataaagagcgcggaggaggcgtgctcgggaggcggcggtgacgcggaatgcgcggcggcctgggacgaggtggaggagctgagcgcggcggcgagccacgccagggagaagcagaagcagtctgacccgctcgaaaattactgcaaggacaatccagagactgatgagtgccgcacctatgataattgatgactgaactcagtcattccaaagttacatgcatgcatctattacttttaccttctgttacgtacatcagacaccatgtattattaattaattcttatttataataaacacaattcaaaatctg

SEQ ID NO: 29569 - DNA, 1589 bp, Glycine max
  Clone ID: UC-GMFLMINSOY069B05_FLI
ttttcttctttccttcacattttctctctcaccattctcttcttcttctccctttcttagattctcccttttttctctttaccctccgccatggctgaggataagatttttgtactctgctgctagctgttgctttgtttgaatttattttagccacataacacgttgtgttccgatcagttcttactttcaacattttcaattgaagagatgtcttcctctgtcaccaatggcgatgattctctcactggccacatcatatctacaactattggaggcaaaaatggggaacccaaacagactattagttacatggctgaacgggttgtaggaactggatcatttggaattgttttccaggcaaaatgtttggaaactggggaagcagtggccattaaaaaggttttacaagacagaagatacaagaatcgtgaactacagttaatgcgtgttttggatcatccaaatgtcatctctctgaagcattgtttcttttcaactacaagtacagatgagctttttcttaatttggtgatggaatatgttccagagtccatgtatagagtcattaagcactataccaatgctaatcaaagaatgccaatcatctatgtaaaactttacatgtaccagattttcaggggattggcttatatccacactgttcccaaagtttgccacagagacttgaagcctcaaaatatactggtggatcctcttacacaccaagtgaagctatgtgattttggaagtgcaaaagttctagtaaaaggtgaagctaatatatcatacatatgttcacgattctatcgcgctccagaacttatatttggcgccacagagtatacaagttcaattgatatttggtcagctggctgtgtccttgctgaacttcttttgggccagccattattccctggcgaaaatgcagtagaccagcttgtacatattataaaggtgcttggcacacccactcgagaggaagtacgctgtatgaatcccaattacaatgactttaggtttccacagataaaagcacacccatggcacaagatattccacaaaaagatgcctccagaagcaatttgttcgtccggcaggatcatgatgataagcttagagggggcatagtgtatactagttgataagttaaacaaaagtggcgccattatttttgtctaatttagcatgttctgtggcctgaccagtgtagtttcaagctgaacctggactgagacttggggtgctggatggctgcagttgatccatcaaaatatgtataccttttgattctctgttgctactgatggatcttatttcctcaggcaaaatagcctttgtttattgtaaacgtctacatgtcatatagtagttaagtatacttggcctgaaatggtcagaacttagattgcttctgtaaggggaaaaccaaagccttagctggaaggaggggagggtccacacagagttttgatgcggggttgttgggttcggtttcctcttattaatgtaatgtgcctgatttgtaatgttgttgaccagttcctttccttgtgaaatgtaattgtgctatcttatctgttttcttt

SEQ ID NO: 29570 - DNA, 939 bp, Glycine max
  Clone ID: UC-GMFLMINSOY069C08_FLI
tttctctcttctctctccccgcccaaaccctaactccctaccctattccgctttctctcatccatcatgaaaggaggaaagtccaagaccgaatctaagagagccgatgccaaacttgctgtgaataagaagggcgccgccaccaagactaggaaacccgccggaaaggggaaggcagcgaaagatcctaacaagccaaagaggcctccaagtgctttcttcgttttcatgtaattataatatattgttatctctacgattcatttgacttccgatgcgctctcttatctttcctccgaataattttatcgtcaaaacttttatccttgtccaattggaggaattcaggaaggtgttcaacaaggaacatcccgacaacaaagcagtgtctgctgtgggcaaagctgctggagcaaaatggaagacgatgtctgatgctgaaaaagcaccttatgtggcaaagtctgagaaaaggaaagtggagtacgagaagaacatgagagcttataacaagaaacaggcggaaggtcctactggtggggatgaagaagaatctgagaagtctgtatctgaggtgaatgatgaggatgatgacgaggaaggcagtggcgaggaggaggatgacgattagagaatggactgatgataatagcatttatgtaggttctgatgattttgatcatccgtgtaggtggtctggtcatttccttataaacatatttctctttccaaaaaatatttccctgctcctccttccgtaaattgctcgtctttccaaaacgtgaatagtttaaagaagggagttctctttatttgtatttctaaatccaactgtttagttaagggatggttatctcttgtagagcttttagtttgatttagagttttcttgttgaaatctggttaagtttgtatcaatataattgacttatcatcccc

SEQ ID NO: 29571 - DNA, 2362 bp, Glycine max
  Clone ID: UC-GMFLMINSOY069D07_FLI
gctttatttgcttctgatcgccaaagggcattggaaaaggtgctgaaaatcgaaagctgattctgttgaagaaatgggttgtgcgaattcggagttgaatttgcaaattttcatcttgtcaatgttgattttcactgcaagtttgtgtgttggggacactgacccacttgatgttgcggcaatcaatagtttgtatgtggctcttggctcaccaccccttgaggggtggaaagccataggaggagatccttgtttggaacaatgggaaggtgtgagttgtgtcttctccaacataactgcattacggctgggaggcatgaatttaagcggacagctggggagtaatttggatttcccatccatcatagacatggatcttagcaacaaccagattggagggaccattccatccactttgtcccctactttgaggaacttgtcactgtcagctaatcatttaaatggaagcattccagatgctttgtcctcgttaactcaattgtcagacttgtcattaaaagataaccatctgaatgggcaaatcccaaatgtgtttctacagctcactggtttgatgaatatggatctgtctggcaacaatttgagtggtcagctgcctccctcaatggggaatttgtcatctcttatcatattacacttgcagaacaatcaactttctgggatcctttttgttttgcaggacctccctcttcaggatctgaatatagagaacaatatattctctgggccaattcccccagagttgttgagtatccctaatttcagaaaagatgggaatccatttaatactactatcattccatcacctccagctgcttcccctgaacctgctgctatggctccttccccagaaaaatcaccttggaaagtgacacataatccctctgataccataaaagcaccaatacctgcaattgctgggagatctttcaaaactacaaaattagtttggattgttggtgcaggctttttgatatttattgcattaggagtctgtcttctaatgctgtggtgctttaagagaagacaggagaacaagaaatataagaaacacaacacgaatgtgtatacaagatctttgcataaacgtacaagcagcgactccccttttgaagcaactactgacaaggagaaaggatggagttccaaacttccacccctgcagccagcaccaccacatcatatcccaatcattccaggagagaatttaataataaatcaagctatatctaccacagcaaccaaaagacaaattgtaacaaattccatcaaagtttatactgttgcatcacttcagcagtacacaaatagtttttcccaagaaaattatataggggaaggcatgcttggccctgtttacagagctgaactccctgatggaaagttactggcagttaggaagctgaatgctactgcttctatggggcaaaatcatgaacagtttcttcaattagctttcagtatctccaaaattcaacatgctaatattgtaaagcttatgggctactgtgctgagtatagtcaacgactacttgtacatgagtattgcagtaatggtaccctacatgatgcattgcatactgatgataaacttcagattaaactttcatgggataatcgcatttgggtgtcacttggagcggcaagagctttagagtatttgcatgagcactgtcagccacctattgtgcaccaaaactttaggtctgctaatgtactcctcaatgacaatttggaagtgcgtgtctctgattgtggattaggttctttactatcttcaggctctgctagtcagttggtgggatgccacctcacagctaatggttacagtgctcctgaatttgagtatggaagttatacactgcaaagtgatgtctttagctttggagtcgtaatgctagaactcctcactggacgaaaatcctatgacagctcactgcctcgtggagaacaatttttggtgagatgggcagtccctcaactccatgacatagatgcattgtcaaaaatggttgacccctccttgaatggagaatatcctaagaaatcattgtcacgttttgcagacattatttcttcatgtatacagcatgaacctgaatttcgaccagtgatgtcagaaattgttcaggacctcttgcgaatgatgtagagggtcgtgtagctgttaatggggtgatgaactgccttagctagtaacagaagcttttggttaccaaattttctggatgttacatattcattctttcatttttatttttgttttcactgacatcaatcgttccgtaatgtgtgattttattgagtttgtatagtgtatgtacacagacacaagcacaac

SEQ ID NO: 29572 - DNA, 2223 bp, Glycine max
  Clone ID: UC-GMFLMINSOY069E04_FLI
gagggacggtatgatagttcaatcagggaaatacgatgaattattagattctggaatggattttaaagctctggtagttgcacatgagacctccatggctctagtagagcagggtcagggtgtggtcatgcctggtgaaaatttgaataaaccaatgaaatctcctgaggcaagaaattctggtgaaagcaattctcttgaccggcctgtgtcaagcaagaaaagttctaaactcatcaaagaagaggagagagaaaccggcaaagtgagcttacatatctataaactctactgcactgaggcttttgggtggtggggcattacagtagtattgattttttctttgttatggcaagcgtctatgatggcaagtgattattggctggcatatgaaacctcggaagaacgtgctaaaatgtttaacccttctctgttcatttccatctatgcaattattactgctgtttcaattattttggtagtgataagatcctacatctttacactcttggggctaaagacagcacaaattttcttcacacaaattcttcgtagcatcttgcgtgcgcccatgtccttctttgacactacgccatctgggagaattctaagtagggcatccactgatcagaccaatgttgatgtccttctccccttgttcacgggaattgttattgctatgtacattacagtgctcagcatcttgatcatcacctgtcaaaattcttggccaacatcgtttttgataattcctcttatttggttgaatatttggtaccggggttactatcttgcaacatctcgcgaattaactcgcttagattcaattaccaaagcaccagttattcatcacttctctgaaagcattgcaggggtcatgacaattcgctcattcagaaagcaaaagaatttttgtgaagaaaatctcaaacgggtgaatgataatttgcgtatggatttccacaactatagttctaatgtgtggttgggagtacgcttagagttgcttggaagctttgtcttttgcatttctgcaatgttcatgatcatcttacccagcagtatcattaagccagaaaatgttggtttatctctctcttatgggttgtccttaaatgctagcttgttctgggccgtattcatgagctgtttcatcgaaaacaagatggtatctgttgagaggataaagcaatttacaaatattccatcagaaccagcatggaatatcaaggatcgtatgcctccttcaaattggccaagtcaaggcaatgtagatatcaaagacttgcaggtcagatatcgtctaaacactcctctggttcttaaaggcattactttaagcattagtggaggtgaaaaggttggtgttgttggtcgaactgggagcggaaagtcaactttaattcaagtattctttaggctggtggaaccttcacgagggaaaataataattgatggtattgacatatccgctttggggcttcatgatcttagatcacggtttggtatcattcctcaggagccggtgctttttgaaggaactatcagaagcaacattgatcccattggacagtatacagatgaagaaatatggaagagcttggaacggtgtcaactaaaagaggttgttgctactaagcctgaaaagcttgactctttagtggtggataatggagagaactggagtgttgggcagagacagttgctttgtctagggagggtcatgcttaagagaagtcgactcttgtttatggatgaggcaactgcttctgttgattctcaaaccgatggtgtggttcagaagatcattagagaggactttgcagcatgtaccatcattagcattgctcacagaatacccacagtcatggactgtgacagagttttagtagtagatgcagggcgagccaaagaatttgataagccctccaacttgcttcagaggcaatctctctttggggcattagttcaagagtatgccaatcgctccactgaactataagaatctctcgtgctccttttgactcgtctatggtgggcttttagcctaatattcttcttaggttaagatgatagaaaaaggaaaacatgaatgttagggaatatattcttttaacattttttgaggtgttggattgtgtattgttttgagtaaaaattcaatccttgtgtccctaactcttaagctttttgtctgaacggacgtatttgtatgggtttatt

SEQ ID NO: 29573 - DNA, 2687 bp, Glycine max
  Clone ID: UC-GMFLMINSOY069G07_FLI
ggggagagagagcatgccagcgaaccaacgaacctatgaaacagatcacattttacgtccttttcaattcaacaattcacagaccaaccccctaaatctccataattggttaatacattctctctctctctctctctctgtggataagatcttgagaatatcacatacagatggaccccacttcctccattaaaataacaatatccaacacttctcaattccataaactgagaagaacccatttgattctctgcagaatctggggttgttcctgctttggtctggtctctcagctctgatagattggcaccgattctgggtgtgagccaaaaaagctttcttttgtttcctctatttttcttttcggcaaagtagaagatatttgtggtgagtgcggtgtggtggttgggttgggcgttaaataaataatgcgtttccggtttcggtgatgtgtttgcatcaatgcatggttcctgctagtgatgcttttgtcctcttcctgtcttttttagccggctattttgtcttaaactctctacatagcagattcattcattttgctttgcgtttttttttctttgttttctccggtgattagttatgttgcttgatccatttgcttcactgcatgtgtgtgtttaaacacttaaatttcttgtttttcttcggcaaattggtggattgtcttcggtatggtgtaatttactgttcaattaagaaaaatgggggtatcaatcggattacagaaagagacacggctttttctgcagatttagccacagacttttgatatattcgaggactttctaaatttatctccttcactccctcttatcctctttttgtctcttctttcttcaggttcggacctttattattattattatttttattattctttgtttcttcgattcatctattatcttttggtttcctgaattcattctctctctacggttatcttatcttattgagtgccatcttctgtatcttcctcaactggattctgcgtcttcttttaagtggaactaggcttgtttcattttagtatttgattgctaattttatatttttgtattttgtttcatttacgaatctagatgaggcctaaggttagtgagggagttatgtcctttatgttagattcaatcaccttcccctttgtcatgctgatgtataaatggttgcctttttttgtcccccatatgtccagattttcttctgtgaattgaattcgagtcgttgcttctggcttcggtgcttgctgttttgttggcacaagttattggtccaattgaaatgaaagagtttgagtgaaaaggagacttagactgtgtggtctggccatggagaattcttataaggcaaatggaaatggaccaactgagaatggttactctgttgcaaggcattcttatcaaccctccttgaaggggtcattaccttggctggacataaaggtgttttatgtaagagtgtgcaagtgtgagcttgatgattccactcctggatctcttacactgaatcatgttcctttgaatcctgacactcttcttgaaattaatggcgttcgtactagtatatattctgatgggatgtcaacccttctcaagagagacagggtagatagaaaatcagaagaagtgacatttgtaagcactgatagcataaggatgagtggtagtgtcaagttcgaggtgtttgataaagatgttctgctgctttccggtgctttagaattgtgtaataccaatggtgttgttggggaatcaagttataatggacaaaggtggaacatgaactgtgagtcatatataattccaggcaccagcttctttaaggggaaacaattgctgttgccagactcaagtctcccaacaattgaggtctacattgccggctccttctcgagtactccaattatcttgacaaaaaccttgcagctttctcagaaaaagcatacaaagaagggagtattggatgcaattccagagcatgaggccagtgaaaatgggaaagatatttcttcagcccatgctttgcaggccccagattacctttacgacaaacatgaagatgaagattataatagcctctacccaggaacagcatatgccgatggcgaagatggagaactttcatggttcaatgccggtgttagggtcggtgttggtattggacttagtgtttgtcttggcattggcattggagttggcctgcttgttaaaacctaccaaggcaccactagccactttagaagacggctgttctgatcggggcttctatttaagcttaaaactctctgctttttgttcatctccctcttaatccaaagacagctaaccttatttttgtccatctccctcttgagtcttgatccaaagacaacaggttaaatatcttgtccatctgagtggagggttttttttttttttgctgtatgtaatatagtttatttttagtgccattctatgcgaggtatgatcttaacttcttaagtaaaacagcaagaactaagaagtttttgaattatttgccctacttattaaggtgttgaactggtgaaagcatgattagtttagttttgactttcctattgatcgtaataatcctccttcaacaaagtaataagaaactagtcccaaaatgtatctatggtattaaaaaaatgtattttcttttatgac

SEQ ID NO: 29574 - DNA, 2399 bp, Glycine max
  Clone ID: UC-GMFLMINSOY069H02_FLI
tttaaaaatactattcttaaacgatttatgtttacttacaatttttcttctcgctgcatcaggaatttcaaaaactagtccttcatctgttccttccaacttatctattctgtcatatagtgaagcaagtgatttctcaaatcttccaacaccaaggtctgagggcgaaatcttgtcttccccaaatcttaaggcctttaccttcaatgagctaaagaatgccaccaggaactttcgcccggacagtcttcttggtgaagggggatttggttatgtttacaaggggtggattgatgaacacacatttacagcttcaaaacctggatcaggaatggttgttgctgttaagaaactcaaacctgaagggttacaaggtcataaggagtggttggtaggtgttttgtttccatttccaagcctaagatggcttaagcatactttacattaaatttaaacccccctaagaaggtacttagatcttttttggatattattcatggtgcaattagtgaagttttttaatcattttctagactgaagtggactaccttggacaactacaccatcagaatctggtaaaattgattggatactgtgcagatggagagaaccggttgttggtatacgagtttatgtccaaagggagcttagagaatcatctgtttagaagtaagttaccataaccattacactttgttttgtaactttagtttacttagctattaccttgatggttatgtcatcaaagaaactcacagaataatagagatatcaacaaagataaatggttccttaagagtgaccttctttgttattaacatgtttgactatgatttggtaactaatccacttaggaaaatgacatattactacattaaagtcgtttgatgggcttattatatgtgacaggaggaccacaacctctttcttggtcagtgaggatgaaagtggccattggtgctgctagaggactttcttttcttcataatgccaaatcacaagtcatataccgtgattttaaagcatccaatatcctactagacgcagtaagatcaatgagggtaaaaataatgtagtaatttattgttgtatcatgaaaaataatttcttatcattcgtttggttacaggagttcaatgctaagctctctgattttggcttagcaaaggctgggcctacgggtgatagaactcatgtctccactcaagtcatgggaactcaaggatatgcagcacctgaatatgttgcaacaggtataccttagctttgtgtaaacagtaaactgttgttacttttcattgtttcttgtaaatggttaatggtctgtaatcatttatgtccatttgaacatgctattgttctagtcaattgtatgagactctatacattgaactgatctacacttcagtttcttcccatattgtaaaccataaatgtctgatattgcttgtcacgcatactaatcatgtgtttttgtctaaacaagtgaatatgtgccacaatttttagattcattatgtttgctccaagcactgctcctcaggatagaattcagaagctaactcctttcacttgtctcattttaagcaaaccaccatactaaagctccaattcattaacaggtcggctgacggctaaaagtgatgtatacagctttggagttgtgttgcttgaactattgtccggtagacgagccgttgacagatcaaaagccggtgtagagcagaatctagtagaatgggcaaaaccatatttgggtgacaaaagaagactatttcggatcatggacaccaaattgggaggccaatacccacaaaaaggagcctatatggcggccactcttgctctaaaatgccttaatcgtgaagccaagggaaggcctccgattacagaggttttacaaactcttgaacagattgcagcctcaaaaactgcaggaagaaactcccaattagaacaaaagagagtccatgctcctgtcagaaagtctagtgtgcaaaaggggtcccatttgaatcatactcctactgcattcccataatctgcttgtgtactctgaattttgaacatctgtatatacattccttatttttataaggttggttttgacaaggagaaatgctagggaacacactcttagacatactcttttgaacacatcctctcttgttagttgaaatttattgaaaatgacaaatttttgtgagtcttacatcatgtttaatgatagtttctcttgattttgtaattttcaatcaattttaacaaattagagatagtgtgtttgaaggagtgcattatagagagagttcctactcccagcactcctctttaacaagatataatgtggcatgtaccttagatgaaatttcaatcgaatattaccacattatttctgt

SEQ ID NO: 29575 - DNA, 1944 bp, Glycine max
  Clone ID: UC-GMFLMINSOY069H09_FLI
tgattttaggtcaaaaggtgttcgagtgggatcaaacccttgacgaggtcaatatttacataactcttcctcctaacgttcattccaagcaattctactgtaagattcagtccaagcacctcgaacttggcatcaaaggcaatcctccgtatctcaacgtaaccctaatttccctccactccatttcctttcccatcttctcttattttattgtaatttgccccttatttatttgtgtgtgatttttcagcatgatcttactagcccggtgaagacagattcttctttttggaccttaggtaaaggtttaagcgatttccctaattgttttttcttttttttttggctcaaatttataattatatactttttttaattaagcatttatgcccttatggtgtaaaagtttttagttgttttatattgtgatccaatcagaaactgccaatctatgtattataagtttgttaatttttataataattaccttaaaagttgttgcagtaatgatttccaatttggtggcagtgtaaaactttgacacatgtcaattaaacttatatttttagtggtattgttttggctttggaatcaattgaggaagacttttgttttcagaatcaaagatggaataaatgtgatttatttggtgaagtttgatggtgatggtgatggtgattttggaatttgacctgcagaggatgacataatgcacataacactgcagaaaagagataagggtcagacatgggcttctcccatattaggtcagggtcagttggacccttacgctactgatcttgagcagaagcgactcatgcttcagagatttcaagaggaggtgggtttttctttcatcagaatccttttccgggtgttgggatttggatttcatttgcaaccccatgatatgtgtatcatgtgcttctcagcatccttgttcgttatgttctattattattgccttcatatgtttcatctgttgggtctagccatctagctgccaggttgtgttccttcattttcaaagtgtgttctttggttgatattgttttttgcctaagctgtgtataatattgagaagaggatctgataattagcaggtattattcatttgtgcatactaattatttgtgggtagctaatgtgggtaaacacaattgatgttaagatgaaaattctacttgttaagactactgatttccaacacttgatgctttattgctagttgatgcactcccattttagtgtttgtttgtcctcaccaacaattgtcaactatgcttcaatagttggcatgagttgaattattaatgaacttggcatgctgctcccattagacttttttcaaggacaatcttgaactaggcagataatttcttatttcattattagatgcactgattagattttgatgtgcttgaatgataatatatattttgaagtttcttgctaagggttaacgggaacactgactgagtcgagattttatattctgatctggtcagcactgattattctcctaaaggaaaagtaatcttttgactcatgattcaaattgcatgatgtatcatgtgatgaatcatagacgactcttaatcttgcaatatatggatgatgatcttattgcctcctgcagaacccaggttttgatttttcacaagctcaattttctggaaactgtcctgatccaaggaccttcatgggtggaatccgatcagattgatgatcttagatgctgtaatttgtatttgtctgctctaagatgatgatcagatggcaataatctgttgtggtatttgtctcctctttgttagatgtcatttaattatggcaatcttaatgcacttcctctaatctgttttgacatcttgtggtatttattaatctcttatctgacccttggcatttaaatatgtatataaaacatagagcatttttagc

SEQ ID NO: 29576 - DNA, 1172 bp, Glycine max
  Clone ID: UC-GMFLMINSOY070A12_FLI
gtcttcagaactcgaacccgccacaaccccagaagaagaagaaatcatgacaaagctcaaaaaccctcaacacagtgtaatcgaagaagcgcttatctctctcagaaaactaacgagaataagagaagaaacaaggcttcaactttgcactcctcggttactctccgcgttacgttccctcgttttgtcgaagcacgtgaacgttcaggtgaacgctcttgcatcggtggtgaacctatcgttggagaaaagtaataaggtgaggatcgtgcggtcggggatggttccgccgttgatcgaggttttgaagtttggatcctctgaggcgcaggagcacggtgcgggcgcgctgtttagtttggcaatggatgatgataacaaaaccgcgattggggttttgggtggtttggctccgttgcttcacatgctccgatccgagagcgagcggactcggcatgactcggctttggcgctttatcatttgtctttggttcagagtaaccggtccaagatggttaaactcggttcggttccggttcttttgagcatggttaaatcgggtcatatgatgggtcgggttatgttgatattggggaatttgggttccgggtcggacggccgggccgcaatgttggatgcgggtgtggtggagtgtttagtggggttgctcagtgggcccgaaccggggaccgggtcaactcgggagagttgtgtggcagtgatgtatgcactgagtcacggcgggttgaggtttaaggcggtggcgaaggcggccggggtggtggaggtgttgcaaaaggtggagaagatggggagtgagagggccaggcggaaggtgaggaagatattggagataatgaggacaaaggaggtggaggaggaggatgtggattgggaggagttgctagactcggggttgggttgccggactcggagtagactcggtggtgggttggatgagtcaagtgcaaactcggccgagttttgagtaaagttgatttttttttataaaaaaaatgtaaatgtttgattttttaagattatgttgttattaaggttcttttggttcacatgcttttttggatttttcttttaaaaaaatccattgtttttatgatttttgaagttggatgaagaattgataaatgggagtatttttttttaatttgatt

SEQ ID NO: 29577 - DNA, 1963 bp, Glycine max
  Clone ID: UC-GMFLMINSOY070C11_FLI
gttccagcgtcagaaaaagagaaattagcaaaatggcggatgtgagagggagggacacgtggacggaggagctgcccagtctgatagaggattcgggagtgctctacggtggagatccgacgacgacaacaacaacaacaacaacgacgtcgtttgaggtgtacgcgccgcatagcgagtcgggggagagcttcaaggagcaggccttggggttcgtgatggcgtggtgcgagatactcatggagttggggagaggcttcagggacattctgcgacagaacttgatgaacgaggattcgtatgtggttaggaagttcggtggaccttgttccaaggtttcgaagcggctgaggtttctcaacgactttctccccgaggatcgcgatcccgtccacgcttggtccgttgtgttcttcgttttcattctcgcgcttgcagctataagtgtagatcccagtcgtgaagcagtggcccctgcggtgaaggtccgtcaacatcctccttgtgctagtcgcgtgctacttccagatggtagatacatggcttatcacgagcaaggtgttccagctgacacagctagattttcacttgttgctccgcactcttttctttcatccagactagcaggtttacctggagtcaaagcatcactgcttgaagagtacggcattcgtctggtcacatatgatcttcctggttttggggagagtgatcctcatcccaacagaaatctcaactcatcagctatggatgtgctgcatctagtcaatgctgtcaatgttactgataaattctggttactgtgccactctagtggatgcattcatgcttgggcttctctcagatatattcccgagaaaattgcaggtgcagcaatgttggctcctatgattaatccatatgacacagacatgactaaggaggagacaaagagaacttgggagaagtggctgcaaaggaggaaaatgatgtattccttggctcgtagatttccaaaacttctcacttttttctatcggaaaagcttcttgcctgaaaagcatgacgagattgataagctgctatctttctcactaggaaagaaggataaacttatgattgaagaaccagaatttgaggaattttggcagagggatgtggaggagtcagttcgtcagggaaacatacgcccatttatagaagaagctgttctgcaggtatcaaattggggttttgaccttaaggaacttcatgtgcaaaagaagtgtcaaacaagaggcatacttctttggttgaaatccatgtacagtcaggcggactgtgaattagcaggatttcttggccttacacatatatggcagggactggatgatagggtggtcccaccatcagtgatggaatatatagaacgggttttgccagaggctgttatccataagcttccaaacgagggccacttctcctatttctatttctgtgatcaatgccataggcagattttcgccactctctttggaactcctcaaggtcccgttgaacgacaagaagaaactgcaactgtattggaggaagaggtttcacaagtacctgtttgacagcttctaatgcgacatgacacgttaatgctcataggcgcgtcttaggttggatgtaaataccacaggcggctccactgctcggtggagctttaaagaaaagagaatgatcgatatagttctcggaattttgaaccgttaagagcttttggagatataggtaaagcacgaatgtgacacattgtttttcctttcctctccctagcaaattgtaccttaaaccctgtctaatttgttctagacagtttcacgtgcaatcattttttaaaaacttacatagttattataagatttttagtcatattttcaaagatatggatccttagttgtatcctacaaataagctaaagccagtaaattggtaatcaatgctccttccttgccaaagc

SEQ ID NO: 29578 - DNA, 912 bp, Glycine max
  Clone ID: UC-GMFLMINSOY070D09_FLI
gaaaagattattatggccttgctcctgggaaatctgtgatactcaggttagtagaaggcacaaattgatattgtgagtgagaatttataggcccaatattcaaaattttcattattttgtgcagatatgcatttcctataaagtgcactgaagttattctagctgatgataatgagactattcttgagattcgagcagagtatgatccttcaaagaagaccaagcctaagggggttctccattgggttgctcaaccttctcctggagttgatccattaaaggtggaagtcagattgtttgagaggctgttcctatcagagaatcccgctgaacttgacaactggcttggcgatttaaacccaaattccaaagtgataattcccaatgcatatggtgtgtcttccatacagaatgcaaaagttggggacaatttccaatttgaaagattaggctattttgtggtcgaccaggactcgacatcagaaaaacttgtttttaataggactgtcaccttaaaggacagctatagcaaaggtggaaaatagggttcctgaatattgcttagaaataacaaggtgggggacaggcaggtctggggttaatacttgtttaaatggctacttataatgcatagttttttctttgagggggtgggggggttatgtacaaacacatttactggccacttagccatgtacattttctcaagggattactcaatagttccccagttatttgattaacttttgtttggttggttttgtagtttgaaggttatatttgtatactctcaatgaagtagtagcaacattgctgttattttcctacgatttttgtgagtgtaaaattagtattgaagaatctttccctttacataataaattaagtgaaaatctagtctattttttgttc

SEQ ID NO: 29579 - DNA, 971 bp, Glycine max
  Clone ID: UC-GMFLMINSOY073C12_FLI
ttacttggttttaaaacctaaattttcaaaaacaaatttttaaaaggggtagaagagagtaaacaagggaagaaaatgggatgaagagagtaatcaggcaagtagatgggatatcataagaaagaacatgagtaatggataattgaaattaaaaatcataacagtctagagatattttaattttaaactatttttagaaactgttcttatcaaacatttttgtttcaaaaatagaaaatagttaatgacaaaaaaagtggttttagtgatgttatttttttccatggttatcaggttaagattggtgacttgggtttggcagcaattgtgggcaagaaccattgtgcacacacgattcttggcacaccagaatttatggctccagagttatacgatgaagactacacagaattggtggacatatactcatttgggatgtgtgtgttagagatggtgacagtagagattccttatagtgaatgtgacaatgttgctaagatatacaagaaggtgtcttctggagttagacctgctgccttgaacaaggtcaaagatcctgaggttaaggctttcattgagaagtgccttgctcagccaagggctaggccttctgcagctgagcttctaagagatcctttctttgatgagattgttgatgatgatgacgaaaatgatgactgttcttgttcatatcaatagaataatatttcttacagtgttggttttttaatttgattcacctaccttttcagtatgcaatgtcaatttgggcagcctagatagaagtgtgaaaattaaattgtttttattttccatttggcgagttgtgaaattggataaggtttggttgatgaatatgggggttaccaggggagggcttgattggggttggtgtcattttgtacataggaaattttactgactgttgtgcagcatacattgaatgatgatttgatttggcaatatatgtt

SEQ ID NO: 29580 - DNA, 1923 bp, Glycine max
  Clone ID: UC-GMFLMINSOY074B06_FLI
ctgttatttattgctaaactaaatatcaatatcaattatcttcttcctctttaagtcaaaccataactattccatttctttccaccccacagtttctgaattctgggtgttgagtttcattttctccatttttttttatctcccttggatgtgttattttcaatccaaaagaccatgcaaaaaactatatttgagaatctgaaagagtgactaggtggtctatctgatcttgtgaagtttgtgtttgtgtgaaaggtgtgaggcttattattcagaagagtttgtgtttgttcacataattgattgtggtgtggtgtgtgtcggtggcaatggaggcaagtttggtggagaggggtagagagagagctggacatgttaacaaggttggttatgttagaagggtcattgcaaagaagaagaaacagctttatcgaagggttaggagacctgagttgagtgtttcaaagacacttcaccaattatttgattcatgcagagaagctttcaaaggccctggcactgttccttcgccacaagatgttcagagattgactcacatacttgataacatgaagccagaagatgtggggctaagtagagatctgcagttcttcaagcctggaaatattgtcaaagagaaccaaagggtcacttatacaaccgtgtacaagtgtgacaatttctcactctgcatctttttcatacctgaaggaggagtcattcctctccacaaccacccggacatgactgttttcagcaagcttttattaggactaatgcacattaagtcctatgattgggttgaccctgaggcctctgatgataacatgttgcaaccacaatctcaattgagattggcaatgttaaaagttgataaggtgttcacatcttcatgtgacacttctgtgctgtatccaacaacaggaggcaacatccatgaattcacagccataaccccatgtgctgtgcttgatgtcattggccctccttattccaaagaagatggaagggactgttcctactacagagatcacccttatacttgttttcctaacgaaaggattattggtgaggcaaaagaggaaaatgatagttacacgtggctggaagaaattgagatgccagagaactctgaaatgaatggtgttgagtacctgggtccaacaccctcttagtgtatgtttgggaatcacttgaatccaactccgatggtctttcaatgaaagctacaatatggttgctttgaaatttttacattggaacgtgtaatttctgggtgattttaatgctaattcaaacacacccttagtagtaacatcttaccgtgtactactaacgctacggatcatacacagaatctcccgtcgctttccctttttgtccacattcaatgaatgcgtgctgcacgtgttggcttttgttcttttatgttgaaaatgtacctataattcgcacatttttgctatagttggtatttataacatcatgggacttgttgtcatgtataggaaaactatgggcttgaggtggttcagctgtcaataagttgggagtttatgattcatcctttccggcttcttttgttactttttttttttttttttgcaaagggtccacagtggtaactttattgaacaagtggtgaacaaggttgactcacttgttatggagagaaagccatccatgacttgttatggggagaaagacatccatgacaggcaatacttttatgtttgtgggaaaataaatagataataaatattagagtgaattgcactttagattctttaatattgaacacgtctttattttttagtaaattacacctcaaccatgaggtttgtcctaattacattcgatatttttttttattttgaatcgtacaaaaaaaatcttttaatttctggatatttgttacaattt

SEQ ID NO: 29581 - DNA, 1511 bp, Glycine max
  Clone ID: UC-GMFLMINSOY074G03_FLI
tgccactgttgtccatccaagtcactgaactattggatggtgttttcataggctgttccatgaaccataccataggtgatggcacttcttattggaatttctttaacacatggtctgagatcttttttcaaactcaagctcaagggcttgaatatgatgctactgttcccatttcacgccaccctattcataataggtggtttccagatggttgtggtccattaatcaatcttcccttcaaacatgaggacgagtttattgacagatttgaatcaccaaagctgagagtgagaatcttccacttttcagcagagtctattgcaaagctgaaagcaagggctaactctgagtccaaatccaaaaccagcgaaatctcttcgttccaatccttatcagcgcatgtttggagatccgtaacacgagcacggaagctgccaaatgatgagataacaagttgcaaattggccataagcaatcgatcaagattggaaccgcctcttccacatgagtactttggaaacgcagttgatgtggtgagcactgcagggttcacggcaggggaattgcttgagaaggatctaggatgggcagcatggaaggtgcacgtggctgttgcgaaccaaaacgacaaagcggtgagacaaaagctcaaagagtggttgaagcttcctgtggtgtaccaacttggtgtgcactttgatccttgtactgtgaccatgtcgagttccccgaggttcaacatgtatgggaatgaatttgggatggggaaagcgattgcagttctgagtggatatgccaacaaaaatgatgggaacgtgacagcataccaaggatatgaaggagagggaagcatagatttggaaatttgcctttcgcctgatgcagtgagcgcgctggaatcagatgaggagtttatggaagctgcttctgtggccaatttcctacactagatagtgaaagctttttgagaggctatgagattcattaattcacaaagcgctctctgccaccgtttcactcactctgctctcttcgactcttctaaagtggattatgggaaaatcacatttactggttagatgagagatctgacaatagaattagttagcacgctgtacattttaagctttgtgtgtaagagagactggcccagcgtgtgtaggaacatcatatggttaagatctcttagtcttatgttgaaattatgcatcaatcgaggagaaagattttaaatgttgagtactgccagaaagaattgggagaaatgtagaggaaggatcacttggagccatttgggagaaatattcagcagatcttcaattcggttcgggcaagcagatttttcttccgtgactaatgaacggcacttggctcccgagtaataaagttaaagcatccgtactttggttcgtaaaaagtgaaaatttctaatttgaatgtttgattttaaaacataagttaaattagattattcatcttctcatctgaattacatccggtgttaaaaagtt

SEQ ID NO: 29582 - DNA, 1171 bp, Glycine max
  Clone ID: UC-GMFLMINSOY074H02_FLI
ctgatgcaatacgaataggaaactataaggatggcctgtatcctacagacagcagagaatttgctaaacgaatattctatactgtgtttatgggatctgaaaacagttccgaaatgacaaggtcacgagccaaggtgctggctgatgaaattggttcatggcaccttgatgttagcattgacgtagttgtgtctgcttttttgtcattgttccaaacacttacaggaaagcgaccacggtataaggtagatggtggatctaatgttgaaaatttaagcttgcagaacattcaagctcgaatcagaatggtgctagctttcatgttagcatcactcttaccttgggttcacagcaagcctgggttttatcttgtcttggggagctccaatgtggatgaagggttacgtggttacttgaccaagtatgattgcagctcagcagatataaatccaattggtagtataagtaagcaagaccttcgggcattcttgcaatgggcagccatccatcttggttactcatctttggcagatattgaagcagctccacccacagctgaactggagcctatacgttctaattacagtcagcttgatgaagtcgatatgggaatgacttacgaggagctatcagtttatggaagactacgaaaaattttccgttgtggtccagtttccatgttccagaatctatgctacagatggggtgcaagattgacaccatcacaagtggctgaaaaagtaaaacacttcttcaagtattattctatcaatcgacacaaaatgactgtcttgacgccttcctaccatgctgagagttattcaccagaggataataggtttgatcttcgccagtttctctataatgcaagatggccatatcaatttaggaaaattgatgaacttgtaagtgaattggatgttaaagatgttaaagattcaggagaccatgaggcaatggcagctacatctgatggtgttggtgggatgggagttgccgcagctggttcaggcaatcctaatgttggattgtaattaaaattaacccctaccctaataaaaaaaagaacaaataaagcgggattgatgaaattcattcaacctttcatttcagcttttattatgtcagtgtaaaaatatttttaattagtcaatgtcaatcatgtttcagc

SEQ ID NO: 29583 - DNA, 3440 bp, Glycine max
  Clone ID: UC-GMFLMINSOY075B06_FLI
ttacaaagtgccggctgtctcagaaagcaatgttgtcaaatagcggctatcacggcgctatcacgctatagcgtagcgggttttggagaaaacgcaattgcaacggcgtcgcgttgcggattccgcgagaatcgcgatccccggagtcttacgcgtcgcgaaaccacgttgggtcgtggctgttgcgtcgtcggtttccgacaaggatgaatccggagagaaactgcatcgacggcgacggcgcgtttagggttcatcgtgctgactgctgaaagaggaaaccgggtcggagcggatgcgggtcagtgcggattgcagttgttttgggcttgcagaatgctcacaagggcccaaaagtagccttacttctacttcacgtaagttttttccagagcattctagaacctctcatttcctctgattcttagtcaccacgtagccttcttcttcgcccagcctctgtttttttacgggtaagattacaacttttttttttcttttgtataatacttctttcttctttctctgttttttctttcttcttcttcttcttcttcctctgttttcttgatgctggggcaggggcagagcagaataaatagatgttttcttgatgcttttagctttttttgattatatgccttaatgggacttgtttagcttatatattctatttcaaccgctatgggccttcgccttctgctgtttagctgcgacgctatccgctatattctgtagtggccttttgcgattttccgcgatccactactgacaacactgccagaaagtgaaaatgaagagaatgatatcgttgaggtttgagggttcagcaatcaagattggtgttggggtagtgaccttagatgacacaagatttggaatttattttaaaagaaaattgaaccaaaccgaattgcatgtcttataagtttgattcaggtgatttttttatgaaaaaagaatcaaatcgaggcacaaacacctctaatgcaccgagcagagcaaccagaatgggatatttgtaggaaaagaatgcggaagggggaggttcatatagtaactgtcttcaattcaacgcttaatctgtgattctctcgggttatgacccgacccagttcagcccagcccattgtacatttctctttgtgacagtcacactcattctattttgccttaacctactctactgcattctcaggcagtcgggctgaactctgaagatcaaatcattgtgagtttttaataattgtttctttgttacatcaaaatgttaatcgcgcagggctatttttcttaaatctgtgtatgtaaatttagcttgggatggaacaacgggatacaaagcttaatcttcaatcacattctgttctacaattttgcataccttctggtgtgggttttgtgatattcactctttcttaggtttcacttttgatgtttacatatctgcatgtgattatatttttgttataattttgctttatttgtagtcctagggtatttgatttctagctgtagtttgagatctgattttgcatggagtaatacccttcctagtggtaggagaatatttctcacttcgtttaaattgtcttaaatccaaatttttacatatgcagagcatttattgaagcaaagtgtggattctgataactacaagtgcaaagggcatctttctgtgctagttatgctatctgtaatcggtttatagtatgttccattggctttttggtattgcaagaaattttggttttgttcgtggttatcaacaaggatacatttaccagcagaagtttagtctggtgaacataaagttgaaatgggtgaaagataggacattggatgctgttgttactggtcagagggatcttaaggcagctgggattcttgtctccatcatttattcttcttctgaatgctgccttccaatataccatctttctcgccaccgtggacaacttggtcttcccagtgacctcaaactttccacctttataagaagatatcccaacatatttaatgagtcctcttttcttgatagtggaggctctcctgttccgtgtttcagtttgagtcctgaagccttggagctccatcatgaggaagtcaacatccttcagcaaaatcagttggaactcagggataggctgtgcaaactgcttatgctcacaagtgatagaatccttccactacaaaccattgaccagttaaaatgggacttgggtttaccatacgattaccagcattcttttgttccaaatcatcctgaaagtttcttatatgttcgccttcctgatgatcgtattggcctgaaattgttattttgggatgacaagcttgccatctcagagttacagaagaatacttctctacaacaaaaggcagaagacataaaaaatggatccttagcatttccaattagtttcaccaggggttttggtttgaaaagaaaatgcatggagtggttgaaagattggcagaaactcccttatacttcaccttacatcaatgcctctcatttggatccccgtactgatgtatctgagaaaaggatagttggagtcttccatgagctccttcatctcacactccataagcaaactgagcgcaagaacgttagcaacttgcgtagacccttggccctacctcagaagtttactaaagtatttgagcgtcatcctggtattttttatatttccaagaggagtgatacccaaacagttgttcttagggaggcctataatggtcaggaacctgtgcagaatcatgcccttgtacaaattagagaggaattcgcaagcctgctgaagaaagggctattggataggagtaagggtgtatacaaaaaaagcagacacactaatttggtggagggttttagaaaggaggtttgcattgctaaaaaaactaaccagcttagttctcaggatgaatcagattccatgttttctgaatatgattcggatggccctccacaaaacccatgctgatatatgtgaatgtgatatttctctttagccattatgttaaagtggtttggcttattgacaatcttgaaatctggcctagatgggggatgtttgcattttactatttttcacccgcttttgcctcttgtgaagatctgtcaataaccaaatatgtcaacaatgctatcttcttagcaagggagagcattttctgattagatgtaatattctggaataagggttactgctcaatctcattttaagattagatagacccaggtatagctacaattcattttaccgagagaaattttgaatatctcaaaatctttatgggagttcaaaatgtaatttaaaaacaatgactagatacctatagttttagagcatctttttttcttggggttgtgggaggtgtttgacaaaaatcactattatgatataatttggttaatccggtattctattctt

SEQ ID NO: 29584 - DNA, 1663 bp, Glycine max
  Clone ID: UC-GMFLMINSOY075C01_FLI
atcacataacatggcatcattggcatgcaacacgtttattgttagcagcacgttaagatcagttgttactcgtgcggaaccacctaaacctggtcctcttttcgatcttagttcattcaatcgccacagctttccggcaggcttcactttcggggcatcatcttccgcgtaccagtttgaaggtgcggcaaaagaatatggtagaggaccaagtatatgggatactttcatcaatcaacatccaggtaagatagcagatggaacgaatggagatcgcgcacttgaccaatatcaccgctacaaggaagacgttcagatcatgaaaggtatgaatttggatgcatataggttctctatctcttggtcaagaatcctcccaaatggaaaacttagtggaggtataaatcgagaaggaataaattattacaacaatctcatccatgaattgcagactaaaggtttaaaaccttttgtgaccctttttcattgggatctcccccaagctttagaaaatgagtataaaggcttcttatccgagtccattatagatgattttggagactatgcgaaattttgtttcgaagaatttggagatagggtgaagcattggattacttttaatgaaccgcatatttttagctcgcatggctatgcatatgggacgaaggcaccgggtcgtaagtctcaggggctccgtccagacagtggagggacagagccttatcgtgtttcacataacatacttcttgctcatgcaaaagctgtccaattgtataggaattcctataaggaatctcaaaatggagagataggcataaccctcgattctagatggttcgtgccctattcagatgcttcttcagacatagaagctaccgaacgagcacttgacttcgagattggatggttcatggaaccattgacatcaggaaagtatccagaaagcatgcagctttatgttggtagacgattgccagagttctctaaagaggaagccgagcttgtccgtggatcatttgattttattggactaaactattacaccaccaataccgcgcgcgttgccactggctatacggactcagtgcatcatcatccagatctatctactgatcctaatgtcgaacttggattaactcgtctcaacgggtcgtctcctataggtccagtgccaggtttaggatggttatgtgtttatcccaaaggaattagagaattgctgctccgtatcaaaaacctgtacaacaatcccttgatttatataactgaaaatggaataaatgaattagatgatccaacactatcacctgaggaatctcttatggatttttacagaattgattatcattatcgtcatctattgaatgttgattatgcaataagggatggcgtgagagtaaagggatattttgtctggtcactgctggactgctttgaatggagtaatggttatatacctcgatttggattgatttttgtggatcacaaaaataatttgaaccgatctccaaaactctctgcaaaatggttccggaaatttttacaaaatcgactgctttgaatggagtaactcttaacaatgtaataaatttaactatgaattattatatgtttgtattttctccaaaaggaaaatatattccttaaattattcgtcctctat

SEQ ID NO: 29585 - DNA, 1562 bp, Glycine max
  Clone ID: UC-GMFLMINSOY075C04_FLI
gctactgttatgtgtgtgattctgtagcaccatgtccgaaatgggtcactggccttttaggtatggatcattgtcatgcaaccgatgaatccgagacatggagaacacggaggaaaattttcaagctgggcaagactgctccattaccgtcttcaaccaattatagtactttgagtgatgtcacgaatgcccaacagaacaatattctgccttttcgtgtgatgtctccatattccatgttgccgaatcagacatcaatgtcaactgcaacacatacatgctccccagtcaattccatacctcaaaatcaatcctcttcgccaattacaatgcgtacgtgctcctcgatacattctagcttccagaaccaggtatcctggccaaataatgtcccctccattgccaccaactttacaatcccgtctggtacaaaccgtggtagatatccagagtcaggatctactttggcgagaaacagataccagtctcaatccattccacagcactcgctaggcaatcgtgcaatccaaagggtgcgacaacatggagttagcactttagtgcctcagttccattctcatacattgtttaacggtttaggcagtgttggtgttgggagcaccatgccaatgaaccattctactcatgatgcttctggtggcttcagtaatcatgtgaatctagcacagcaatttgccggatatcatgctgcaacaggattttcaaatgataacagaacttcttacggacaaaatgcttatgtcccccaaaatttatggtaccctaatccttgctctcaaccgaataacctcagctctgtcagcaattacgctactgctcatgaaacccaagtatcataccaatcaaatggtagccagaatttttatgctgttcaaggtaacaatgctccttcaagtaataatgtggctggtctgagtagaaatgaaaatgtttgtggaaatgtaacccaaagtggaactacaaggcaatattcttgccaacagaaacctcatgatgtgagtctaattgaatctgcattgaaggcagataggattgagcatagcaaacaaagcattccttatcagcaaagttcaggatctacgaacacctgtcttggctcagtcgatgatatcaagcgctggctttttggcgatgaaaactctttcctggttggagccgatgatgctttagcatcatcatcagctccatccggtcttggctcagtcgatgatatcaagcgctggctttttagcgatgaaaacactgtcccggttggagctgatgatgctttggcgtctgaactgaatacgccatctcctgatcttagcacatttgatgggggctcattctttgattttgaatcctcttgggaatgtcgtgctcgtgtctagttatcgatgatgatgaatcttcaaggtaacgagacaagagttctgctacttgctttataaatggaagaactcggaacctgctagtgttagatatcagtggctattggctacatatttgtcaatacttatgacttactgactctgaggatctcataagtgattagatttttt

SEQ ID NO: 29586 - DNA, 1704 bp, Glycine max
  Clone ID: UC-GMFLMINSOY075G05_FLI
catcaagctccgctccaacacaggggaaaatgagggagatccttcacgtgcagggagggcaatgcgggaaccagatcggttccaagttctgggaagtggtgtgcgacgagcacggcatagatccgacggggaagtacgtcggaaactcagatctgcaactcgagcgcgtgaacgtctactacaatgaagcctcgtgcgggcgcttcgtgccacgcgcggtgctgatggacctggagcccggaaccatggacagcgtgcggaccgggccgtacgggcagatcttccgccccgacaacttcgtgttcgggcagtccggcgccggcaacaactgggctaaggggcactacaccgagggcgccgagctcatcgactccgtcctcgacgtcgtgcgtaaggaggccgagaactgcgactgcctccaggggttccaggtctgccactcgctcggcggcggaacgggctccgggatggggacgcttcttatttccaagatcagagaggagtatcctgacaggatgatgcttactttctccgtttttccttcgcccaaggtctccgacactgttgttgagccttataacgctactctctctgttcaccagttggtggagaatgctgatgagtgtatggtgctggataatgaggcgctctacgatatctgcttcaggactctcaagttgaccactcctagctttggtgacttgaatcacttgatctccgcaaccatgagtggtgttacatgctgtcttcgtttccctggtcaactcaactctgatctgaggaaactggccgtgaatctcatccctttccctcgtctgcacttcttcatggttggatttgcgcctctcacctctcgtggctctcagcagtaccgtgcattgacagttccagagctgacacagcaaatgtgggatgccaagaatatgatgtgtgccgctgatcccaggcacgggcgttacctcacggcatcagccatgttccgtggcaagatgagcacgaaggaggtggatgagcagatgataaacgtgcagaacaaaaactcttcgtactttgtcgagtggattcccaacaatgtcaagtcgagtgtgtgtgacattgctcctagagggctctccatggcgtccacattcattggaaactcgacctcgattcaggagatgttcaggagggtgagcgagcagttcacggccatgtttaggaggaaggctttcttgcattggtacactggtgaaggcatggacgagatggagttcacggaggcagagagcaacatgaatgaccttgtgtctgagtaccagcagtaccaggacgccactgctgaggacgaaggggagtacgaggatgaggaggaagaggatggtgaagcagacgaccatatgtgaagagactaaaatgtgaagatgcctgtgtcttacttatgctatgtgatgcgtaagtgtgtttgctctgcactccaacgtgaagaagattgtaattactaatagtgtatgtacggtttgcgggataatactttgatggtagtgagagtggagtttgggacctttgggtacatgttatgcggcacctatcggtttgttcttatattggcttgctttttatttttatttttgtccatctggtatattggatctcatgtttccgtaatatgttgttgttcttatgcatggcttttgtttacattgaattcttggaatgtcttggggg

SEQ ID NO: 29587 - DNA, 1362 bp, Glycine max
  Clone ID: uC-gmflminsoy075h09_FLI
ctggatttaggactgataagaaaggtcaaactgccctacacatggctgtgaaagggcaaaatgaagaaattttgctggaattggtaaaacctgacccagcagttttgagtctggaagataataaaggaaatacagcattgcatattgccacaaagaagggccgtactcagaatgttcgctgcttgttatcaatggagtgtatcaacatcaatgctacaaacaaggctggagagactcctcttgatgttgcagaaaaatttggaagtccagaactcgtctccatattgagggatgctggggctgccaattctactgaccaaaggaaacctccaaatccatcaaagcaactcaagcagactgtcagtgacataaagcatgacgtacaatcccaactccaacagacacgtcagactggcatgagggtccagaaaattgcaaagaagctgaaaaagctccacattagtggcctgaacaatgcgataaactctgctactgttgttgccgttcttattgctacagttgcttttgcagccatcttcacagtccctggtcaatacgttgaagacaaaacacatggattttcacttggacaagcaaatatagcaaacaatgcagctttcctaatattttttgtgtttgacagcctggcattgttcatctctctggcagttgtggtggttcaaacctctgtcgttgtgattgagcaaaaggcaaagaagcagctcgtttttgtcattaacaagctcatgtggatggcttgccttttcatttccattgccttcatttctcttacatacgtggtggtgggatcacactccagatggcttgcaatatatgctactgtgattggaagcttgataatgctctctacaattggctccatgtgctattgtgtaattttgcataggatggaggagacaaaattgagggccgagagtcgatcgttctctatgtctcatgcatcagaccaagagattttaaacagtgaatacaagagaatgtacgcactgtagtctgtaggatagttgatatatcagaatggaatggcttttatcctccagcatattcttgaagtgatatgtagtttctactatcagtatcagattttaccaagacaagctgtctatgttagactacaggtaccgtgagaaaagagggaaaagaagaaaatgggtggggaattctcgtcacatccactcgtaattataaatgatgtcaaatttagcatcatgtcagtgaaatgattgtggtgttgaagaatgaagacttatatccatttgtatttactctagtattctattataaactaaacttcataaaagaatctaattcaattggtttaagagagtctctgaatattat

SEQ ID NO: 29588 - DNA, 1638 bp, Glycine max
  Clone ID: uC-gmflminsoy076c09_FLI
tatattggatctcgcactttagaaattagcgaaagagagacgtatgggaatggaagaggagagtagcatcatagaaggtggtgcttcgcttccatcgtcgggttcagacgccaagaagcgaagagtgacctacttctacgagcccaccatcggcgattactactacggtcaggggcacccaatgaagccgcaccgaatccgcatggcgcacaacctcatcgtccactactccctccaccgccgcatggagatcaaccgccccttcccggcctcccccgccgacatccgccgcttccactccgacgactacgtcgacttcctctcctccgtctcccccgagaccctcgccgattccgccttctctcgtcacctcaagcgcttcaacgtcggcgaggactgccccgtcttcgacggcctcttccccttctgccaggcctccgccggtggctcccttggcgccgccgtcaaactcaaccgcgctgacgccgacatcgccatcaattgggccggcggcctccatcatgccaagaagtctgaggcctctggattctgctacgtcaacgacattgtcctcggcatcctcgaacttctcaaggctcacaggcgtgtgctgtatgttgacattgatgttcaccatggtgatggtgttgaggaggccttttacaccactgatagagtgatgacagtgtctttccacaagtttggggactttttccctggcacagggcacgtcaaagacattggggtgggctcaggaaagaattatgcagtaaatgtcccattaaatgatggaatggatgatgagagtttccgtagtctgtttcgatccatcattcaaaaagtcatggaggtttatcaacctgaggcagttgttctacaatgtggagctgattcattgtctggtgacagattgggttgcttcaacttgtctgtgagaggtcatgcagattgccttcgttttcttagatcgttcaatgttcctttaatggtcttgggtgggggtggatatacaattcggaatgttgcccgttgttggtgttatgagacagcagtggcagtaggagtggagcctgataataagttgccttataatgaatattatgaatattttggcccagattatactctctatgtcgatccaagcaacatggagaacctaaacacatccaaggatttggaaaaattaaggaacacactactagaacagatttcccgacttccacatgctcccagtgtaccttttcagacaacaccacctaccttgcaacttccggaagaggcggaagagaacatggatagaagaccaaaacttcgcaaatgggatggtgaagattatgattctgatcccgaagaaggtggaaaggataattccaagttctcaaacatcactgcccatatgagggacattgcagatgaaatggaagaagagaagccagaagagcatccatcatcttgtagttgatagaacagagcaagttcttgcacagcatgtttgtattgtaatctttatcgtatactattctgtttatgggggagatcattgctaaatagtacacaaacaacacttgagaatgcaaatataaacaacacattgtgcaaatgtaatatagtgtaaaacattgttttggtctccctcgt

SEQ ID NO: 29589 - DNA, 2345 bp, Glycine max
  Clone ID: UC-GMFLMINSOY076C12_FLI
aggctattgatctgtcgcagaatggattaatgggtcccatacccaaggggatattccagctcaagaacctcaacaagctcttgcttctctccaacaatctctcggggaaaatcccttctgagattgggaattgttcctccctaattcgattccgagccaacgacaacaacatcaccgggagcattccctcgcagattgggaatctcaataatttgaatttcctagacctagggaacaatcgcatttccggagttatcccggtggagatctccggctgccggaatctcgcttttctcgacgtacattccaacttcctcgccggaaatttgccggagagtttgagccggcttaattcgcttcagtttctcgatgcgtccgataacatgatcgaaggtaccctaaatcctaccctcggcgaactcgcggcactctccaagctcgttctcgcgaagaatcgaatctccggctcaattccgagtcaactcggttcatgctccaagctacaattgctggatctcagcagcaacaatatctccggcgaaatccccagcagcatcggcaacattccggcgctggaaatcgctctgaatctgagcctgaaccagctctccggcgagatccctctggagttttccagtttgacgaagctcggcatattggacatatctcacaacgttctcagcggaaacctccaatatctggcgggcctgcaaaatctcgtggtgctgaacatctcgtacaacaaattcacgggacgcattccggacacgccgttcttcgcgaagctgccgctgagcgtgctggcggggaacccggagctgtgcttctccggcaacgagtgcggcggcagagggaagtcggggcggcgggcgaggatggcgcacgtggcgatggtggttctgctttgcacagcgttcgtgctgctgatggcggcgctgtacgtggtggtggcagcgaaacgacgaggggaccgcgaaagcgacgtggaggtggatggaaaggacagcaacgcggacatggctccaccttgggaagtaacgctgtaccagaaactcgatctgtctatctctgacgtagcgaaatgtctctctgctggcaacgtcatcggccacggccgatccggcgtcgtttacagggtcgacttgcccgccacgggactcgccatcgcggtcaagaagttccgtttgtcggagaaattctccgcggcggcgttctcgtcggagattgccacgctggcgcgaatccgccaccggaacatcgtgcgcctcctgggctggggggccaacagaagaaccaagttactgttttacgattacttaccgaacggtaacttggatactctcttacacgaggggtgcacaggattaattgattgggagacgcggctcaggatagcattgggcgtggctgaaggtgtggcttacttacaccacgattgcgtgcctgctatcttgcaccgggatgttaaggcgcagaacattttgttgggagacagatatgaaccctgtttggctgattttggtttcgctcgcttcgtcgaagaggatcacgcttccttttccgttaacccacagtttgcaggctcctacggctacattgctcccgagtatgcttgcatgcttaagatcacagagaagagcgacgtgtacagctttggagtggtcctactggagataataacggggaaaaggccagtggatccatcattcccggatggacaacaacatgttattcagtgggtgagggagcacctcaagagcaagaaggacccagtcgaggttcttgattccaagctacaaggccatccagacacgcaaatacaagagatgctacaagcacttggtattgctctcttgtgcacaagtaatcgtgcagaggatcgacccacaatgaaagatgttgctgcattattgagagaaattcgtcacgaccctccaacaagtgctgagccccacaagcccaagcccaagcccaagccctattcaaccgaggcttcttcctattcctcctcctcagtcacccctgctcagttgttgctcctacaatctagctcccattcctcatcatcacttgcttattcctcttcctcagcagctggctaccaccctccaaggaaccaatcctgaattgaagaatattcaagccctagaatatattaattactatattttcaggattttagaccatgttagatattttgattggttaattaattagttagtacaagtcattaacgttagtgtaatgtgggaattgtaaaggtgcttttgagtatcccgattgagataaggtaaaatgaaatgagtgtacagaagaagcttaattgattgacacgattccatttt

SEQ ID NO: 29590 - DNA, 1949 bp, Glycine max
  Clone ID: UC-GMFLMINSOY077B08_FLI
tgcatgatagctacttaacacaaactagcaagtagcatcacgcatcatggtcatacattatacaaggcaacttctccgttaatttcctcacacatccctttctccctctttctctttctctttctctttctctccttccttttcatcactcacttttcactcccaagtcccaaccacaacccctcctctcctctcctcgatcagtgccataaatcaattctttctttctatctatctctgtccacaattctctttatgtcaacaaacctaaaactaaaacctgcttgagagagtagggaattaattaattaattttctttcatttcatcttttaagttgatctgtgaaaatggcttcatcttcctccaacggcagttccagcggaagcaagagttgggacatcgacggcgacctcgccggtttcggctacaaagtccgttcatcggagctgcaacacgtggcagaaaacatggagcgtttagagaacgtgatggacattgtgaactcatcaaccaacaataacatatctcagctggcctccgatacagtcttctacaacccctccgacataggttcctgggtcgacacgcttctctccgagttcgaccaaacggcgtcgttgccctacgatttctcggattttctcgatctcgacacggatcagaatcaaaaccacaaaccaacgctggtaacaatggaagaagactcagggataagactcgtccacacgctgatgacctgtgcggattccgtgcaacgtggtgacctcgcattcgcgggctccctcatcgagaacatgcaggggctgttggctcacgtgaacaccaacatcggaatcggtaaagtcgctggatatttcatcgatgccttgcgccgtcgcatcttagggcaaggcgtgtttcaaacgttgtcgtcgtcctcgtatccgtacgaggacaacgtactctaccaccactactacgaggcctgcccttacttgaagttcgcgcacttcacggcgaatcaggctattttagaagctttcaacggtcatgattgtgtccacgtgattgacttcaatctcatgcaggggctccagtggcccgcgctgattcaggccctggcgcttcggcccggtgggcctccgttgttgaggctcacgggcattgggcctccctcatctgacaaccgcgacacgctccgcgaaatcgggctcaggctcgctgagctggcgcggtcggttaatgttagatttgcatttcgtggcgtggcggcgtggcggctcgaagacgtgaagccgtggatgctgcaggtgaatccgaacgaagccgtggcggttaactccatcatgcagttgcatcggcttcttgcttcggactccgatccaataggttcgggcatcgaaaccgtgctgggttggatccgaagcttgaacccgaagattatttccgttgtagaacaggaagcgaaccacaaccaggaccggttcttggagcggttcacggaagcgttgcattactactcgaccgttttcgactcgctggaggcgtgtccggtcgaaccggacaaggcacttgcggagatgtacctgcaaagggagatatgcaacgtggtgagcagcgagggaccggcgcgagtcgagaggcacgagccgctggctaagtggagggagcggctcgagaaagccggcttcaagccgctgcatttggggtcaaacgcgtacaagcaagccagcatgttgctgactcttttctctgctgaagggtactccgtggaagagaatcaaggatgcttgactttggggtggcatagccgccctctcattgcggcttcggcttggcaagctgcgccgatgcaggacagggaaacgctgcgtttcgagcaatgagtttcaagaaacggaaaaattgtttaattatagtagtaactagtaaacaagagtgatgtataatgtaaatttttctctctct

SEQ ID NO: 29591 - DNA, 1591 bp, Glycine max
  Clone ID: UC-GMFLMINSOY077C01_FLI
tagtactcgtgaattaacaagcctagctagctacgtacagttttaatattcctgaaaaatggatggtaaggttggagaaggagaattcattgtgagtgtgaccaaggaggagatagtggtaccagagcttccaatgaaagagcaatggctgccactatcaaaccttgatctactcattcccccagtggacgtgagtgtattcttctgctacaaaaaacctttgcctgaaaaatattattgctttggaaccatggtggggtcactgaaaaatgcactggctcaggctctggtatactattacccttttgctggtgaaatggtggccaacaccatgggtgagcctgagctgttttgcagtaaccgtggggtagattttgttgaagctgtagctgatgttgaactacagtgcctcaacttgtacaaccctgatgacactgttgaagggaagcttgtaccaaggaagaagcatggcgtgcttgctgttcaggcaactgggcttaagtgtgggggtttagtagttgcatgtactttcgaccatcgcatagctgatgcctactctgcgaacatgttcctcgtatcatgggccgaagcagcccggcccaacaagcccataatctcagcccagccatgtttccgacgctcccttctcaccccacgtcgcccaccttccatccaccctttactccaccacatgtacgttcccgtctcggcgctacctccaccgtcagatcctaataagaaactcgtgttcgaatctgagccactcatcagccgcatatactacgtcacaagcgaatccctgaaccgcatgcaagcactagctagctcaaacggtaccgtgaagcgcacaaagctcgagtctttctctgcattcttgtggaagatggttgctgaagctactgctagtgttgatggtaagaaaaacgttgctgcgaagatgggtgttgtggttgatggaaggaagatgttatgcaacgatgaaaagaacatgggttcgtattttggcaatgttctttcgattccctatggtgggaatgcggttgatgagcttgtggaaaagccattgagttgggtggcggagaaagttcatgagtttttgaagatgggtgtgacagaagaccattttttagggcttgttgattgggttgaagaacatcgacctgtgcctggtttgtcaaggatttattgtgggcatggaaaagaaaaaggacctagttttgtggtttcttcagggcaaaggtttccggagtcaaaggttgactttgggtgggggaagcccgtgtttgcatcgtaccattttccttggggtggagattctggctatgtcatgccaatgccttgtgctaatgggaatggtgattggttggtttacatgcaccttctcaaggctcatttgaatttcatggaagttagggctcctcaaattcttaggcctttctcttgggattacctcctcaattaatcttcattgactttgcttgttcttcatcaatcacgcaacttgttgatttgcaacaagggaaaataatttctagtgtgaattttatccatacaaatagtatcaagtggtgtgacgcaagtatttattttt

SEQ ID NO: 29592 - DNA, 1309 bp, Glycine max
  Clone ID: UC-GMFLMINSOY077C06_FLI
gtgggatctgccacaatacagtatctttattgtcacatcgttcacaccattctcccttcttttgaaagtgtagggggtaatcttgcccgaagaatcatgtgacaataaagatactgtattgtgggatctgccacacggacctccactatgctaaaaatgaatggggcattactatgtatcctgtagtacccggacacgagatcattggggtggtaactaaggtggggagagacgtgaaggggttcaaggaaggagacagagtgggtgtggggtgtttggcggcttcatgtttggaatgtgagcactgcaagaccgatcaggaaaattactgtgaaaagttgcaatttgtctacaacggagtattctgggatggcagcatcacctatgggggctactctcaaatttttgtcgcagattacagatatgtggtacacattccggaaaacctagcaatggatgcagcggctcctctgctatgcgcaggaataacagtgttcaatcctttgaaagaccacgatttggtagcatcaccgggaaagaagattggggtggttggtctgggaggccttgggcacattgccgttaaatttggcaaggctttcggccaccatgttaccgtcatcagcacttctccctccaaggaggctgaagctaagcagcgtttgggtgctgatgatttcattgtcagctccaaccctaaacaattacaggctgcaaggagaagcatagatttcatattggacactgtttcggcagagcactctctgttgcccatcttggaattgctcaaagtcaacgggaccttatttctcgtgggtgcaccagataagcccttacaattgccagctttcccattgatatttggcaagagatcagtgaaaggtgggatcatagggggaataaaagagacgcaggaaatgttggaggtttgtgcaaagtacaatataacgagtgacattgaattaatcacaccagacagaatcaacgaggctatggagcgccttgctaagaatgatgtgcgctaccgtttcgtcattgatattgctaatgctgccgcttccaacaactaaactagccttcaattcggatcaaattttacttgtttcgatatttactgtttaatagacccgtgattttacctctgcaattggacgaataagtcatatatttatgtcaatgactttttacttgttaaactgatctatcgtttaagtctgaattaattttttaagcttttagagaaaaaaattataatttaaacatttgtatgtttggtactctcgttttatttaataaaatgaatcaatct
